United States Patent Application Publication US 2018/0126003 A1 - sequence listing, part 114

SEQ ID NO: 200887 - DNA, 2781 bp, Artificial Sequence
  derived and/or modified sequence
atgagcagaagaagaaagcacgacgacagccccagccccaagaagaccccccacaagaccgtggccgccgaggagtgcggcagcgtggtggagcccggcagaagaagactgagaagcgccagaggcagctggccctgcggcgccagagagggcccccccggccccgtgagacagagagagcagccccccaccgccgccctgtgcagcaagagcaaccccgaggagagatacgagacccccaagagagccctgaagatggacagcctgagcagcagcttcagcagccccaacgaccccgacggccagaacgacatcttctgggaccagaacagccccctgaccaagcagctgggcaagggcagaaagaagcagatctacaccaccgacagcgacgagatcagccacatcgtgaacagaatcgccccccaggacgagaagcccaccaccaacagcatgctggacatgtggatcggcgagaccgccatcccctgcacccccagcgtggccaagggcaagagcagagccaagatcagctgcaccaagctgaagacccagagccaggaggaggagctgatgaagctggccaagcagttcgacaagaacatggaggagctggacgtgatccaggagcagaacaagagaaactacgacttcacccagatgatcagcgagaccgagatcctgagcaactacaaggacaacatccagatgtggagcctgcacaacatcgtgcccgagatcgacaacgccaccaagaagcccatcaagggcaacaccaagatcagcgtggccaacaaccagaacagcagccagaagcccttcgaccagatcgccgaggccgccttcaacgccatcttcgacggcagcacccagaagtgcagcggccagctgagccaggagctgcccgaggccttctggagcaccagcaacaccaccttcgtgaagaccaacgccctgaaggaggagaagatcatcaccaacgagaccctggtgatcgagaagctgagcaacaagacccccagaagcctgagcagccaggtggacacccccatcatgaccaagagctgcgtgaccagctgcaccaaggagcccgagaccagcaacaagtacatcgacgccttcaccaccagcgacttcgaggacgactgggagaacctgctgggcagcgagcccttcgccatgcagaacatcgacatgcccgagctgttccccagcaagaccgcccacgtgaccgaccagaaggagatctgcaccttcaacagcaagaccgtgaagaacaccagcagagccaacaccagccccgacgccagactgggcgacagcaaggtgctgcaggacctgagcagcaagacctacgacagagagctgatcgacgccgagtacagattcagccccaacagcaacaagagcaacaagctgagcaccggcaacaagatgaagttcgagaacagcagcaacaagatcgtgatccaggacgagatccagaactgcatcgtgaccagcaacctgaccaagatcaaggaggacatcctgaccaacagcaccgaggccagcgagagaaagagcgccctgaacaccagatacagcaacgagcagaagaacaagtgcatcctgaaccagagcatcaaggcccccgtgaacaccgacctgttcggcagcgccaacctgggcagcaagaccagcgtgagcaaccccaaccagaccagcgccagcaaggtgggcagcttcttcgacgactggaacgaccccagcttcgccaacgagatcatcaaggcctgccaccagctggacaacacctgggaggccgacgacgtggacgacgacctgctgtaccaggcctgcgacgacatcgagagactgacccagcagcaggacatcagaaaggacagcaagaccagcgagagcatctgcgagatcaacaacaacagcgagcacggcgccaagctgacccagcagcaggacatcagaaaggacagcaagaccagcgagagcatctgcgagatcaacaacaacagcgagcacggcgccaagaacatgttcgccatcagcaagcagggcagcaacctggtgcagagcaagcacctgaaccccggcagcatcagcgtgcagaccagcctgaccaacagcagccagatcgacaagcccatgaagatggagaagggcgagatgtacggcaacagccccagattcctgggcgccaccaacctgaccatgtacagcaagatcagcaactgccagatcaacaacctgcacgtgagctacaccaacaccgacgtgcccatccaggtgaacagcagcaagctggtgctgcccggcagcagcagcctgaacgtgaccagcgaccacatgaacaccgagatcaccacctacaagaagaagctgagcaccaaccagccctgccacaagaccgtgaccgacgaggcccagagcaacctgaacaccaccgtgggcttcagcaagttcaccttcaccagaatgaagaacagccagatcctgagccagttcaaccagaactgcatcaccggcagcatgagcgacaccaagatcacccagggcgtggagaagaagaagggcgtgaaccccctgctggaggaggccgtgggccagcagagcctggtgaagctgagcgagagcctgaagcagagcagcaaggaggaggaggagaagaacagaaagtgcagccccgaggagatccagagaaagagacaggaggccctggtgagaagaatggccaaggccagagccagcagcgtgaacgccgcccccaccagcttcctgtag

SEQ ID NO: 200888 - protein, 258 aa, Artificial Sequence
  derived and/or modified sequence
MKTPNAQEAEGQQTRAAAGRATGSANMTKKKVSQKKQRGRPSSQPRRNIVGCRISHGWKEGDEPITQWKGTVLDQVPINPSLYLVKYDGIDCVYGLELHRDERVLSLKILSDRVASSHISDANLANTIIGKAVEHMFEGEHGSKDEWRGMVLAQAPIMKAWFYITYEKDPVLYMYQLLDDYKEGDLRIMPESSESPPTEREPGGVVDGLIGKHVEYTKEDGSKRIGMVIHQVETKPSVYFIKFDDDFHIYVYDLVKKS

SEQ ID NO: 200889 - DNA, 777 bp, Artificial Sequence
  derived and/or modified sequence
atgaagacccccaacgcccaggaggccgagggccagcagaccagagccgccgccggcagagccaccggcagcgccaacatgaccaagaagaaggtgagccagaagaagcagagaggcagacccagcagccagcccagaagaaacatcgtgggctgcagaatcagccacggctggaaggagggcgacgagcccatcacccagtggaagggcaccgtgctggaccaggtgcccatcaaccccagcctgtacctggtgaagtacgacggcatcgactgcgtgtacggcctggagctgcacagagacgagagagtgctgagcctgaagatcctgagcgacagagtggccagcagccacatcagcgacgccaacctggccaacaccatcatcggcaaggccgtggagcacatgttcgagggcgagcacggcagcaaggacgagtggagaggcatggtgctggcccaggcccccatcatgaaggcctggttctacatcacctacgagaaggaccccgtgctgtacatgtaccagctgctggacgactacaaggagggcgacctgagaatcatgcccgagagcagcgagagcccccccaccgagagagagcccggcggcgtggtggacggcctgatcggcaagcacgtggagtacaccaaggaggacggcagcaagagaatcggcatggtgatccaccaggtggagaccaagcccagcgtgtacttcatcaagttcgacgacgacttccacatctacgtgtacgacctggtgaagaagagctag

SEQ ID NO: 200890 - DNA, 777 bp, Artificial Sequence
  derived and/or modified sequence
atgaaaacacccaacgcgcaggaggctgaggggcaacagacacgcgcagcagccggaagggccacaggctctgccaacatgacgaagaagaaggtatcacaaaagaagcagagaggacggcctagctcacagcccagacgaaacattgtggggtgccgaatcagccatggctggaaagagggcgatgagcccatcacccaatggaaaggcactgtgctggatcaagtgcctataaacccctccctgtatctcgtcaagtacgatgggatagactgcgtctacgggttagagctgcaccgagatgagcgagtgctcagtctaaagatcctgtccgaccgcgtcgcgtcttctcatataagtgacgccaacctcgcaaataccattatcggcaaggccgtggaacacatgtttgagggggagcatgggtctaaggacgaatggcggggtatggtacttgctcaggcccccatcatgaaagcatggttctacataacctacgagaaggacccggtgttgtacatgtaccaactgctcgacgattacaaggagggggatctccgcattatgccggaaagcagcgagtcacctcccaccgagcgcgaaccagggggcgtggtggacggccttatcggcaaacacgtcgagtacacaaaggaggatggttccaagcgaattggcatggtcatccaccaggtggaaaccaagcctagcgtttattttatcaagttcgacgacgactttcacatctacgtgtatgaccttgtgaaaaagagttag

SEQ ID NO: 200891 - DNA, 777 bp, Artificial Sequence
  derived and/or modified sequence
atgaaaacgcccaacgcacaggaagctgaaggccagcagactcgcgctgccgctgggcgtgctacaggttccgctaatatgacaaaaaagaaggtcagccagaagaagcagcgcggtcgcccatcctcacagccacggcgtaatatcgtagggtgtcggatttcccatggctggaaagagggtgatgagccaattacacagtggaaggggaccgtcttagaccaagtaccgattaatccttcactatacctcgtcaaatacgatggcattgattgtgtttacggtctggagctgcatagggacgagagagtgctgtctctgaagatcttgagcgacagagtagcatcctcccatattagcgacgctaacctggctaataccattataggaaaagccgtcgagcacatgttcgagggcgagcatgggagtaaagacgagtggagaggaatggttctggcacaagcacctattatgaaggcctggttttacataacctatgagaaggaccccgtactctacatgtatcagctgctggatgactacaaagaaggcgatttgcgcatcatgccagaatcttctgagagtcccccgactgagagagagccaggtggagtcgtggacggacttattggcaagcatgtcgagtacacaaaagaggacgggtccaagcggattgggatggtaattcatcaggtggaaacaaagccctctgtctatttcatcaagtttgatgatgatttccacatctatgtctatgatttagtcaaaaaatcctag

SEQ ID NO: 200892 - DNA, 777 bp, Artificial Sequence
  derived and/or modified sequence
atgaagaccccaaatgcccaggaggccgagggccagcagaccagggctgctgctggccgggccaccggcagcgccaacatgaccaagaagaaggtgtcccagaagaagcagaggggccggcccagcagccagcccaggagaaatattgtgggctgccgcatcagccacggctggaaggagggagatgagcccatcacccagtggaagggcaccgtgctggaccaggtgcccatcaaccccagcctgtacctggtgaagtatgatggcatcgactgtgtgtatggcctggagctgcacagagatgagcgggtgctgagcctgaagatcctgagtgacagagtggccagcagccacatcagtgatgccaacctggccaacaccatcatcggcaaggctgtggagcacatgtttgaaggagaacatggcagcaaggatgagtggaggggcatggtgctggcccaggcccccatcatgaaggcctggttctacatcacctatgagaaggaccctgtgctgtacatgtaccagctgctggatgactacaaggagggggacctgcgcatcatgcctgagagcagcgagagccccccaacagagcgggagcccggcggcgtggtggatggcctcatcggcaagcacgtggagtacaccaaggaggatggcagcaagagaattggcatggtgatccaccaggtggagaccaagcccagcgtgtacttcatcaagtttgatgatgacttccacatctacgtgtatgacctggtgaagaagagctag

SEQ ID NO: 200893 - DNA, 777 bp, Artificial Sequence
  derived and/or modified sequence
atgaagacccccaacgcccaggaggccgagggccagcagacccgggctgccgctggcagagccacaggctccgcaaatatgaccaagaaaaaagtctctcagaaaaaacagcgcgggaggccttcgtctcagcccaggcgcaatattgtgggatgcagaatttcccatggatggaaagaaggagatgagccaattactcagtggaaggggacagttctcgatcaggttccgattaacccgtccctgtacctcgtgaagtacgacggcatcgactgcgtgtatggcctggaactgcatagagatgagcgcgtcttgtcactgaagattctgagcgaccgggtggcatcctcacatatctcagacgccaacctcgcgaacacaatcatcgggaaagcagtggagcacatgtttgaaggcgaacacggcagcaaggatgaatggcggggcatggttctggcccaggctcctataatgaaggcctggttctatattacatatgaaaaagacccagtgttgtacatgtatcaactcctggatgactacaaggagggggacctcaggatcatgccggagagcagtgaaagcccaccaacagaaagagaaccaggaggcgttgtggacgggctgattggaaaacacgtggagtatacaaaagaagatgggagcaagcggataggcatggtcattcatcaggttgagaccaagccctctgtatacttcattaagttcgacgacgactttcacatttacgtgtacgacctggtaaagaagagttag

SEQ ID NO: 200894 - DNA, 777 bp, Artificial Sequence
  derived and/or modified sequence
atgaagacccccaacgcccaggaggccgagggccagcagacccgggcggcagctggccgcgccacgggctcagccaatatgacaaagaaaaaagtttcccagaaaaaacagcggggccgaccgtcgagtcaaccccgtaggaatattgtagggtgccgtatctctcatggatggaaagagggggacgagcccattactcagtggaaaggtactgtgcttgaccaagttccaataaatccgagcctgtacctggttaagtacgatggcattgattgtgtctatggactcgagcttcatcgagatgaaagggtgctctccttgaagatcttatcggatcgggtcgcctcatcccacatctctgacgccaacctcgcgaataccattatcggtaaggccgtggagcatatgtttgagggcgagcacggatctaaggatgaatggcgcggcatggttctggcgcaggcccccatcatgaaggcatggttctatataacatatgaaaaagacccggtgctctacatgtaccagctgctggacgattataaagaaggggatctgcgcataatgcctgagagttccgagtctcctcccacagaaagggaacctggcggagtggttgatgggcttattggcaagcacgtcgagtacactaaggaggatggctcaaagcggatcgggatggtcatccatcaagtggagactaagccctctgtctattttattaaattcgacgatgactttcacatttacgtgtacgaccttgtcaagaagagctag

SEQ ID NO: 200895 - DNA, 777 bp, Artificial Sequence
  derived and/or modified sequence
atgaaaactccgaacgcacaggaagctgagggccagcagacccgcgctgccgctggcagagctaccggcagcgctaatatgacaaagaagaaggtatcccaaaagaagcaacggggacggccttcgagccagccgcgaagaaacatcgttggttgtaggatctctcacggctggaaagagggcgacgaaccaataacgcagtggaaaggaacagttctagaccaggttcccataaacccatctctgtacctggtgaagtacgatggcatcgattgtgtttacggactggagctgcaccgcgacgagcgggtattaagcctaaagatccttagcgaccgcgttgccagttcgcacatcagcgatgcaaacctggccaacacaatcatcggcaaggctgtggagcacatgtttgagggcgagcatggcagcaaagacgagtggcgcggaatggtgcttgctcaggcaccaattatgaaggcctggttctatatcacatacgagaaggatcctgtgttatatatgtaccagctgttggacgactacaaagagggagatttacggattatgcccgagtcaagcgaatctcctccaacagaacgcgagccaggtggagtggtggatggtcttattggcaaacacgtggagtatacaaaagaggacgggtctaaacggatcggtatggtgattcaccaggtggaaaccaagccttccgtctattttattaagttcgatgacgacttccacatttacgtgtatgatcttgtaaagaaaagctag

SEQ ID NO: 200896 - DNA, 777 bp, Artificial Sequence
  derived and/or modified sequence
atgaagacaccaaatgctcaagaagcagaggggcagcaaacccgggctgccgcagggagggccactggatcagctaacatgaccaagaagaaagtgtcacagaaaaagcagcggggaagaccaagtagtcaacctcgacgtaacatcgtcggctgcagaataagccacggctggaaagagggcgatgaacctattacacagtggaagggcacagtgctggatcaggttccaattaacccgtcactgtatctggtaaagtacgatgggattgattgtgtgtacgggctcgagctgcacagggacgaaagagtactgagccttaagatcttgtctgaccgagttgcttctagccacatctccgatgctaacctagctaacacgataatcggaaaggcagtcgagcatatgttcgagggggaacatggtagcaaggacgagtggcgcggaatggtgttggcacaagccccaattatgaaggcctggttctacattacttacgagaaagaccctgtgttgtacatgtatcagttactcgacgattacaaggagggggatctccggatcatgcctgagtcctcagagagtcctcctactgagagggagccgggaggcgtagtagatggtctgatcggcaagcacgtggagtatacaaaggaggacggaagtaaacgaatcgggatggtgattcatcaggtggagactaaaccaagcgtgtacttcataaaatttgacgacgactttcacatatatgtttatgaccttgtaaaaaagagttag

SEQ ID NO: 200897 - protein, 208 aa, Artificial Sequence
  derived and/or modified sequence
MAQETNHSQVPMLCSTGCGFYGNPRTNGMCSVCYKEHLQRQNSSNGRISPPATSVSSLSESLPVQCTDGSVPEAQSALDSTSSSMQPSPVSNQSLLSESVASSQLDSTSVDKAVPETEDVQASVSDTAQQPSEEQSKSLEKPKQKKNRCFMCRKKVGLTGFECRCGNVYCGVHRYSDVHNCSYNYKADAAEKIRKENPVVVGEKIQKI

SEQ ID NO: 200898 - DNA, 627 bp, Artificial Sequence
  derived and/or modified sequence
atggcccaggagaccaaccacagccaggtgcccatgctgtgcagcaccggctgcggcttctacggcaaccccagaaccaacggcatgtgcagcgtgtgctacaaggagcacctgcagagacagaacagcagcaacggcagaatcagcccccccgccaccagcgtgagcagcctgagcgagagcctgcccgtgcagtgcaccgacggcagcgtgcccgaggcccagagcgccctggacagcaccagcagcagcatgcagcccagccccgtgagcaaccagagcctgctgagcgagagcgtggccagcagccagctggacagcaccagcgtggacaaggccgtgcccgagaccgaggacgtgcaggccagcgtgagcgacaccgcccagcagcccagcgaggagcagagcaagagcctggagaagcccaagcagaagaagaacagatgcttcatgtgcagaaagaaggtgggcctgaccggcttcgagtgcagatgcggcaacgtgtactgcggcgtgcacagatacagcgacgtgcacaactgcagctacaactacaaggccgacgccgccgagaagatcagaaaggagaaccccgtggtggtgggcgagaagatccagaagatctag

SEQ ID NO: 200899 - DNA, 627 bp, Artificial Sequence
  derived and/or modified sequence
atggctcaggagaccaaccacagtcaggtccctatgctgtgttctaccgggtgtgggttctacggtaatccccggactaacggtatgtgcagcgtttgctataaggagcacttacagcggcagaatagttccaacggccgtatcagcccgcccgccacttccgtcagttcccttagtgagagcctacccgttcagtgtactgacggaagcgtgccagaagctcaaagtgccctggatagcaccagctcgagcatgcaacctagccccgtttccaatcagagcctgctttcagagagtgtagcttcttcccagctggacagtacgtcagtagataaagccgttcctgagaccgaggatgtgcaggcaagcgtttccgataccgcccagcaacccagcgaagaacagtcaaagagtcttgaaaagcctaaacagaaaaaaaacaggtgctttatgtgcaggaagaaagtcggcctgactggttttgagtgtcggtgcggcaatgtctactgcggagtgcacagatattctgacgtacataactgcagttataactataaagcagacgcggcagagaaaataagaaaggaaaatcctgtggtggtcggggagaagatccaaaagatctag

SEQ ID NO: 200900 - DNA, 627 bp, Artificial Sequence
  derived and/or modified sequence
atggcccaggagaccaaccacagccaggtgcccatgctgtgcagcacaggctgcggcttctacggcaaccccaggaccaacggcatgtgcagcgtgtgctacaaggagcacctgcagaggcagaacagcagcaatggccgcatcagccccccagccacctctgtgagcagcctgtctgagagcctgcctgtgcagtgcacagatggctctgtgcctgaggcccagagcgccctggacagcaccagcagctccatgcagcccagccctgtgagcaaccagagcctgctgtctgagagcgtggccagcagccagctggacagcacctctgtggacaaggctgtgcctgagacagaagatgtgcaggcctctgtgtctgacacagcccagcagcccagcgaggagcagagcaagagcctggagaagcccaagcagaagaagaaccgctgcttcatgtgcaggaagaaggtgggcctgactggatttgagtgccgctgtggaaatgtgtactgcggcgtgcaccgctacagtgatgtgcacaactgcagctacaactacaaggcagatgctgctgagaagatcaggaaggagaaccctgtggtggtgggggagaagatccagaagatctag

SEQ ID NO: 200901 - DNA, 627 bp, Artificial Sequence
  derived and/or modified sequence
atggcccaggagaccaaccacagccaggtgcccatgctgtgcagcacagggtgtggtttttacgggaacccaagaaccaatggaatgtgttccgtatgttataaagagcacctccagcgacagaattcctcaaatggccgaatctcccctcccgccactagcgtgtcaagtctgagtgagtcgctcccagtccagtgcacagacggaagcgtgcctgaggctcagagcgctctggatagcacaagctcaagtatgcagcccagccccgttagtaaccaaagccttctgtcagaaagcgtggcttcaagccagttggacagcaccagcgtagataaggccgtgcctgaaaccgaggacgtgcaggccagcgtgtctgataccgcccagcagccttcagaagaacagagtaagtctctcgaaaaacctaagcaaaagaagaacagatgtttcatgtgcagaaaaaaggttggtctaaccggttttgagtgccggtgcggcaatgtgtactgtggcgtgcatcggtacagcgatgtgcataactgttcatacaactacaaggccgacgccgccgagaaaatcaggaaagagaacccagtcgtggtaggcgagaaaattcagaagatctag

SEQ ID NO: 200902 - DNA, 627 bp, Artificial Sequence
  derived and/or modified sequence
atggcccaggagactaatcatagccaggtccccatgctctgcagcactggctgcggattctatggcaaccccagaacgaatggcatgtgttctgtgtgttataaagagcacctgcagcggcagaactcaagcaacgggaggatttctcctccagctaccagtgtaagctcactgtcagagtcactcccagtgcagtgcacagatgggtccgtgccagaagcccagagtgcgctggattctacctctagcagcatgcagcccagccctgtgtctaaccaatcactcctgtccgagtctgtcgcttcatcccaacttgattcaacctcagtggataaggctgtgcctgagaccgaggacgtgcaagcatctgtctctgatacagcacagcagccctccgaagaacagtccaagtccttggagaagccaaagcagaagaagaacagatgcttcatgtgccggaaaaaggttggattgaccggctttgaatgcaggtgcggcaacgtgtactgcggcgtgcaccggtattcagacgtgcataattgctcttataattataaagctgacgctgccgaaaaaataaggaaggaaaacccagtcgtagtcggcgaaaaaattcagaagatctag

SEQ ID NO: 200903 - DNA, 627 bp, Artificial Sequence
  derived and/or modified sequence
atggctcaggaaacgaaccatagtcaggtgcccatgctgtgctccacgggatgtggtttttacggaaatccgcgaactaatggtatgtgcagtgtgtgctacaaagagcatttgcaacgacagaactcctctaacggcagaatcagcccacccgccaccagcgtatccagcttgtccgagagcctacccgttcagtgcaccgacggttccgttccagaagcccagagtgcacttgactccacgagttcatctatgcaacctagccctgtgtccaatcagtcactgctgagcgaaagcgtcgcgagttctcagctggatagtacctccgttgacaaggcggttcctgaaacagaggacgtccaggcctctgtgtcagacacagcccagcagcccagtgaggagcagtccaaatctcttgagaaacctaagcagaagaagaatagatgctttatgtgcagaaaaaaggttggactgaccggctttgaatgcagatgtggaaatgtgtattgtggagtgcacagatatagcgacgtccacaattgttcctataattacaaagcagatgctgctgaaaagatcagaaaggaaaatcctgtggtggtaggggagaaaatccaaaagatctag

SEQ ID NO: 200904 - DNA, 627 bp, Artificial Sequence
  derived and/or modified sequence
atggctcaggaaaccaatcattctcaagtgcctatgctgtgcagtacaggttgtggattttacggaaacccaagaactaatggaatgtgcagcgtttgctataaggaacacttgcagaggcaaaacagtagcaacgggcgcatatccccacccgctacttccgtgtccagtctatcagagagtcttccagtgcaatgcactgacggcagcgtacctgaggcgcagagcgcgctggactccacctccagcagcatgcagccatcgcctgtttctaaccagagtctgctgagtgagtcagtcgcctccagtcaactcgactcgacttctgtcgacaaggccgtcccagaaacagaggatgtgcaggcctcagtgagcgacacagcacagcaacccagtgaggagcagtccaaaagcctggagaaaccgaagcagaagaagaaccggtgttttatgtgtcggaaaaaagtgggacttacggggtttgaatgtcgttgcggaaacgtgtattgcggggtccatcggtatagcgacgttcacaactgttcctacaactataaagcagacgccgcagaaaagattcgcaaagaaaacccggttgtcgtgggagaaaagatacagaaaatatag

SEQ ID NO: 200905 - DNA, 627 bp, Artificial Sequence
  derived and/or modified sequence
atggcccaggaaactaatcactcacaggtgccaatgttatgttcaacaggatgtggattttatgggaacccacgaaccaatggcatgtgttccgtgtgctataaagaacacctgcaaagacaaaacagctcaaatgggcggatttcaccccctgctacctctgtcagctccctgtctgagtccctccctgtgcaatgcaccgatggctctgtgcccgaggctcaatcagcactggactcaacatccagttccatgcagccctcgcccgtcagcaaccagagcctgctgtccgaatcggtggcgtctagccagctggatagcacaagcgtggacaaagccgtaccagaaaccgaggacgtccaggcctctgtctcggacacggcacagcagccaagtgaggagcaatccaaaagcttagagaaaccaaagcagaaaaaaaataggtgcttcatgtgccgaaagaaggtgggactgaccgggttcgagtgccgatgtggaaacgtgtattgcggcgtgcacagatattctgacgtgcataactgttcctacaactacaaggccgacgccgcagaaaagatccgtaaggagaacccagtagtcgttggcgagaaaatccagaaaatttag

SEQ ID NO: 200906 - DNA, 627 bp, Artificial Sequence
  derived and/or modified sequence
atggcccaggagaccaatcactctcaagtgccaatgctgtgcagcaccggttgtggtttctacggtaacccccgcactaacggcatgtgctcagtgtgctacaaggaacatctgcagagacagaatagtagtaatgggagaataagtccaccagccacgagcgtgagttccctttccgaaagtcttccagtgcagtgcacggacgggtccgtgcccgaggcccagtctgcgctggactccacctcatctagtatgcaaccttcccctgtgtctaatcagtcactgctctccgagagcgtggctagttctcaactggactctacatcagtcgataaggccgtccctgagacggaagatgttcaggccagtgtgagtgacacagctcaacagccaagcgaagaacaaagtaagagccttgagaagcccaaacagaagaaaaatcgctgctttatgtgtcgcaaaaaagtcgggctcacggggttcgaatgcagatgcgggaatgtctattgcggtgtccacaggtactccgatgtgcacaactgcagctacaactataaggcagacgccgccgaaaagatacggaaagagaatcccgtcgtggtgggagagaaaatccaaaaaatctag

SEQ ID NO: 200907 - DNA, 627 bp, Artificial Sequence
  derived and/or modified sequence
atggcccaggaaacaaatcacagccaagttccgatgctgtgttccacaggctgtggcttttacggcaaccctaggactaacggaatgtgttccgtgtgctacaaagagcacctacaaagacagaattcctccaatggccgaatctcaccaccagccacatccgtctcatccctgtctgagtcactacctgtccagtgtacagatggtagtgtgccggaggctcagagcgcacttgactcgacatcttctagtatgcagccgagtcctgtaagcaatcaaagtttgctgtcagagtccgttgcatcctcccaattggactctactagcgtcgataaggccgtgcccgagacagaagacgtgcaagcatctgtgagtgacaccgcccagcagccatccgaggagcagtccaagagtctggaaaagcccaaacagaagaaaaacagatgtttcatgtgccggaagaaagtcggactcacaggattcgagtgtcgctgtggaaatgtgtattgcggcgtccaccgctacagcgacgttcacaactgtagctacaattataaggctgacgctgctgaaaagataagaaaggagaaccccgtcgtggtgggcgagaagattcaaaagatctag

SEQ ID NO: 200908 - DNA, 627 bp, Artificial Sequence
  derived and/or modified sequence
atggcccaggagaccaaccacagccaggtgcccatgctgtgcagcactgggtgcgggttctatggaaatcctcgtactaacggaatgtgctccgtttgctacaaggagcatctgcagcgccaaaacagcagtaatggccggataagtccacccgccacctccgtcagcagtctgtcggagagtttgcccgtgcaatgtacagatgggtctgtccctgaggctcagtcggctctggacagtacttcttcatcaatgcaacctagccctgtcagcaaccagagtctcttgtccgagagtgtagccagttcccagctcgactcaacctcagtggacaaagccgtgccagaaacggaggatgtgcaggccagtgtgagcgatacagcacagcaaccttctgaagagcagagcaaaagtttggagaaacccaagcagaaaaagaatagatgcttcatgtgtagaaagaaagtgggactcactggctttgagtgtcgatgcggaaatgtgtactgcggcgttcaccggtattctgacgttcacaattgctcatacaactacaaggccgacgcagccgagaagataagaaaagagaaccctgttgtggtgggcgagaagattcagaagatctag

SEQ ID NO: 200909 - DNA, 627 bp, Artificial Sequence
  derived and/or modified sequence
atggcccaggagaccaaccacagccaggtgcccatgctgtgcagcaccgggtgcggattctatggaaatcctcgaaccaacggtatgtgctctgtgtgctacaaggaacatttacaacggcagaactcctcaaatggtcggatttcccccccagctaccagcgtgtcatccctctcagagtccttacccgtgcaatgcaccgacggcagtgtgccagaagcccagtccgctcttgactctacctcaagctccatgcagccctctcccgtgtccaatcagtctctgctgagcgaatccgtggcaagctcccaactggattcaacatcagtcgataaagccgtgcctgaaacggaggacgtgcaagcaagcgtctctgacaccgcacagcagcctagcgaggaacaaagcaagtcactggagaaacccaaacagaagaagaataggtgcttcatgtgtcgcaagaaggttgggctgacggggttcgagtgccgttgcggcaacgtctactgtggagtgcacagatattctgacgtacacaattgtagttacaattacaaagcagatgccgctgaaaaaatccgcaaagaaaaccccgttgtggttggcgaaaagattcagaagatttag

SEQ ID NO: 200910 - DNA, 627 bp, Artificial Sequence
  derived and/or modified sequence
atggcccaggagaccaaccacagccaggtgcccatgctgtgcagcaccggatgcggcttctacggaaatcctagaaccaacggaatgtgctcagtgtgttacaaggagcacctgcagaggcagaatagcagcaatggccgcatcagtccccctgctacctctgtctcttctctctccgagagcttgcctgtacagtgcacggacggctccgtgccggaagcacagtctgctcttgactcgacttctagctcaatgcagcctagtcctgtaagcaaccagagtttactttcagagtctgttgccagcagtcagctggacagcacatctgttgataaagccgtaccagaaaccgaagatgtacaggcgtccgtcagcgatactgcccaacagccctcggaggagcagagcaagtctctggaaaaaccaaaacagaagaaaaacagatgcttcatgtgccggaaaaaagttggcttgaccggctttgagtgtcggtgcgggaacgtgtattgtggtgtacaccggtactccgacgtgcataattgcagctacaactacaaggcagacgccgccgaaaagattaggaaggagaatccagtggtggtgggggagaaaattcagaagatctag

SEQ ID NO: 200911 - DNA, 627 bp, Artificial Sequence
  derived and/or modified sequence
atggcccaggagaccaaccacagccaggtgcccatgctgtgcagcaccggttgtgggttttacggcaatcctagaacgaacggcatgtgtagcgtgtgctacaaggagcacctccagcgccagaattcgtctaacggtcgcatcagcccccctgccacctccgtcagctccctctctgaatcattacctgtccagtgcactgatggaagtgtaccggaagcccagagtgccctggattctactagctccagtatgcagccctcaccagtcagtaatcagtcccttctgagcgagtcagtcgcatcaagtcagctcgattcaaccagcgtggataaggcagttcccgagaccgaggatgtgcaggcctccgtcagtgacacggcgcagcagccatcagaggagcagtctaaaagcctggagaaacccaagcagaaaaaaaatcggtgtttcatgtgcagaaaaaaggtgggcttaaccgggttcgagtgtcgctgtggcaacgtgtattgtggcgtgcataggtacagcgatgttcataactgctcttataactacaaggccgatgccgctgagaagattcgtaaagagaatccagtggttgtgggggagaagatccagaaaatctag

SEQ ID NO: 200912 - DNA, 627 bp, Artificial Sequence
  derived and/or modified sequence
atggcccaggagaccaaccacagccaggtgcccatgctgtgcagcaccggctgcggcttctacggaaaccctcgcacaaatggcatgtgtagcgtgtgctataaagagcacttgcagagacagaattctagcaacggtcggataagccctccagccacttcagtgtcaagtctttctgaatctctgccagtacagtgcaccgatgggtctgtacctgaggcacagagcgcactcgactcaacttcctcctcaatgcagccgtcccccgtttccaatcagagtctgctgtccgagtcggtcgcgtcgagtcagcttgactcaacctctgtggataaggccgttccagagaccgaagatgtgcaagcctccgtgtccgataccgctcagcaaccgagcgaagagcaatcgaagtccttggaaaagcccaagcaaaagaagaaccgatgttttatgtgccgcaagaaggtgggcctgaccgggttcgaatgtcgttgtgggaacgtttattgtggcgtccataggtactcagatgtccataactgttcctacaattataaggcagatgctgccgagaagataaggaaggagaacccagtggtggttggtgaaaagattcagaagatttag

SEQ ID NO: 200913 - DNA, 627 bp, Artificial Sequence
  derived and/or modified sequence
atggcacaggaaaccaaccattcccaagtccctatgctttgcagtacggggtgcggtttctacggcaatcccagaaccaacggcatgtgcagcgtctgttataaagaacacctgcaaagacaaaatagttcaaatggcagaatcagtcctcccgcaaccagcgtttctagccttagtgagtccctgcccgtgcagtgcaccgatgggagtgttcctgaggcacagtctgccctggattccacgtctagttctatgcaaccgagccctgttagtaaccagagcctgctgtcagagtccgtagcatctagccagctcgacagtacgagcgtggataaggccgtcccagagacagaagacgtgcaggcctccgtcagcgacacggcccagcagccctcagaagagcagtcaaagtcactggagaaacctaaacagaagaagaaccgctgctttatgtgtcgtaaaaaggttggtctaaccgggttcgagtgcagatgcgggaatgtgtattgcggcgtgcaccgttacagcgacgtgcacaactgttcttacaattataaggccgacgccgcagaaaaaatccgcaaggaaaatcctgtggtggtgggcgaaaaaatccaaaagatttag

SEQ ID NO: 200914 - DNA, 627 bp, Artificial Sequence
  derived and/or modified sequence
atggcgcaagagacaaaccatagccaggtgccaatgctgtgctctactggctgcggcttttatggtaatccaagaactaatggcatgtgctccgtttgctacaaggaacacctccagaggcagaatagctctaacggcagaatatcccctccggctaccagtgttagttcattgagtgagtcacttcccgttcagtgtacggatgggtccgtgcccgaggcccagtctgctttggattccactagcagctccatgcagccatcccccgtgagtaaccagagcctgctgagtgaatctgtggcttcgtctcagctcgattctaccagtgtggacaaggccgtgccagagaccgaagacgtgcaagctagcgtgtcagatacagcacaacagccaagcgaggaacagagcaaaagcctggagaagccgaaacagaagaagaatcgttgcttcatgtgtcggaaaaaagtgggattaaccggtttcgagtgtcggtgtgggaatgtatattgcggtgtgcatcgttattccgacgtgcacaactgcagctataactacaaggctgatgccgctgagaagatcaggaaagaaaatcccgtcgttgttggagaaaagattcaaaaaatttag

SEQ ID NO: 200915 - DNA, 627 bp, Artificial Sequence
  derived and/or modified sequence
atggctcaagagactaaccattctcaggttcccatgctttgctcaacagggtgcggcttttacgggaaccccagaactaacgggatgtgttccgtctgttacaaggagcatcttcaaagacagaactcaagcaacggcaggatctccccacctgccaccagcgtttcttccctgagtgagagcctgcccgtccagtgcaccgacggatctgtgcccgaggcacagtctgcactcgatagtacaagttcctccatgcaaccgtcccctgtgagtaaccagtctttgctgtctgaaagcgttgctagcagccaactggattcaacgtcagtcgacaaggcagttccagagacagaggacgtccaagcctccgtgagcgacaccgcccagcaacctagcgaagagcagagcaagtccttggaaaagccaaaacagaagaaaaatcgttgcttcatgtgtcggaagaaggtggggttgaccggctttgagtgcaggtgtggaaacgtgtactgtggagttcaccgctatagcgacgtacacaattgctcctataattataaagccgacgctgccgagaagataaggaaagaaaatcctgtagtggtcggagagaagatacaaaagatctag

SEQ ID NO: 200916 - DNA, 627 bp, Artificial Sequence
  derived and/or modified sequence
atggcgcaagaaaccaatcactctcaggtgccaatgctgtgttcgaccggctgcgggttctacggtaaccctcggaccaacggcatgtgctccgtgtgttacaaggaacatctgcagcggcagaattcttctaatggcaggatcagtcccccagctacatccgtcagttctctcagtgaaagcctcccagtacagtgtacggacgggtccgtccccgaagcgcagtccgcactcgatagcactagctctagcatgcagccttctccagtgagcaaccagtcattgctgtctgaatctgttgcctcttcacaactggattcaacttcagtggacaaggctgtccctgaaactgaagacgtccaagccagcgtttccgatactgcgcagcagccttcagaagaacagtcaaagtctctcgaaaagcccaagcagaagaagaacagatgtttcatgtgtagaaagaaagtggggttgacaggattcgaatgtcgctgtggtaacgtgtactgcggtgtgcacaggtatagcgacgtccacaactgctcctacaattataaagcagatgcagccgagaagatccgcaaggagaatcccgtggtggtgggggagaagatccagaaaatatag

SEQ ID NO: 200917 - DNA, 627 bp, Artificial Sequence
  derived and/or modified sequence
atggcccaagagacaaatcattcccaggttccaatgctgtgttcaacaggctgtggcttctacggaaaccctagaaccaacggtatgtgctctgtttgttataaggagcatctccaacgccagaattcctcgaacgggagaatctcacccccagctacatcagtcagttccctgtccgaatcccttcctgtccagtgtaccgacggctcagtcccggaggctcagtctgcccttgattctacatccagcagcatgcagccttcccctgtatctaatcagagtctgttgtccgagagtgtggcgagctctcagctggattctacctccgtagataaagcagtgccagagacagaggatgtgcaggcttccgtgagtgacaccgcacagcaaccaagcgaagagcagtctaagtccctcgagaagcccaagcagaagaaaaatagatgcttcatgtgccgcaaaaaagtaggtctgactggcttcgagtgtcgatgcggcaatgtgtattgcggggtacacagatacagtgatgtgcacaattgttcatataattacaaagccgacgcggcagagaagatccggaaagaaaatcccgtggtggtgggcgagaagatacagaaaatttag

SEQ ID NO: 200918 - protein, 274 aa, Artificial Sequence
  derived and/or modified sequence
MATTVSTQRGPVYIGELPQDFLRITPTQQQRQVQLDAQAAQQLQYGGAVGTVGRLNITVVQAKLAKNYGMTRMDPYCRLRLGYAVYETPTAHNGAKNPRWNKVIHCTVPPGVDSFYLEIFDERAFSMDDRIAWTHITIPESLRQGKVEDKWYSLSGRQGDDKEGMINLVMSYALLPAAMVMPPQPVVLMPTVYQQGVGYVPITGMPAVCSPGMVPVALPPAAVNAQPRCSEEDLKAIQDMFPNMDQEVIRSVLEAQRGNKDAAINSLLQMGEEP

SEQ ID NO: 200919 - protein, 352 aa, Artificial Sequence
  derived and/or modified sequence
QLSPSQAPAGAQEVARRVTVGSASHGGRRSTMATTVSTQRGPVYIGELPQDFLRITPTQQQRQVQLDAQAAQQLQYGGAVGTVGRLNITVVQAKLAKNYGMTRMDPYCRLRLGYAVYETPTAHNGAKNPRWNKVIHCTVPPGVDSFYLEIFDERAFSMDDRIAWTHITIPESLRQGKVEDKWYSLSGRQGDDKEGMINLVMSYALLPAAMVMPPQPVVLMPTVYQQGVGYVPITGMPAVCSPGMVPVALPPAAVNAQPRCSEEDLKAIQDMFPNMDQEVIRSVLEAQRGNKDAAIPSHLVLGGLSALSCPWDVRLSFSCRSGKCSCCREQLLLPGCWRWWSAFRFHSWHFVM

SEQ ID NO: 200920 - DNA, 825 bp, Artificial Sequence
  derived and/or modified sequence
atggccaccaccgtgagcacccagagaggccccgtgtacatcggcgagctgccccaggacttcctgagaatcacccccacccagcagcagagacaggtgcagctggacgcccaggccgcccagcagctgcagtacggcggcgccgtgggcaccgtgggcagactgaacatcaccgtggtgcaggccaagctggccaagaactacggcatgaccagaatggacccctactgcagactgagactgggctacgccgtgtacgagacccccaccgcccacaacggcgccaagaaccccagatggaacaaggtgatccactgcaccgtgccccccggcgtggacagcttctacctggagatcttcgacgagagagccttcagcatggacgacagaatcgcctggacccacatcaccatccccgagagcctgagacagggcaaggtggaggacaagtggtacagcctgagcggcagacagggcgacgacaaggagggcatgatcaacctggtgatgagctacgccctgctgcccgccgccatggtgatgcccccccagcccgtggtgctgatgcccaccgtgtaccagcagggcgtgggctacgtgcccatcaccggcatgcccgccgtgtgcagccccggcatggtgcccgtggccctgccccccgccgccgtgaacgcccagcccagatgcagcgaggaggacctgaaggccatccaggacatgttccccaacatggaccaggaggtgatcagaagcgtgctggaggcccagagaggcaacaaggacgccgccatcaacagcctgctgcagatgggcgaggagccctag

SEQ ID NO: 200921 - DNA, 1059 bp, Artificial Sequence
  derived and/or modified sequence
cagctgagccccagccaggcccccgccggcgcccaggaggtggccagaagagtgaccgtgggcagcgccagccacggcggcagaagaagcaccatggccaccaccgtgagcacccagagaggccccgtgtacatcggcgagctgccccaggacttcctgagaatcacccccacccagcagcagagacaggtgcagctggacgcccaggccgcccagcagctgcagtacggcggcgccgtgggcaccgtgggcagactgaacatcaccgtggtgcaggccaagctggccaagaactacggcatgaccagaatggacccctactgcagactgagactgggctacgccgtgtacgagacccccaccgcccacaacggcgccaagaaccccagatggaacaaggtgatccactgcaccgtgccccccggcgtggacagcttctacctggagatcttcgacgagagagccttcagcatggacgacagaatcgcctggacccacatcaccatccccgagagcctgagacagggcaaggtggaggacaagtggtacagcctgagcggcagacagggcgacgacaaggagggcatgatcaacctggtgatgagctacgccctgctgcccgccgccatggtgatgcccccccagcccgtggtgctgatgcccaccgtgtaccagcagggcgtgggctacgtgcccatcaccggcatgcccgccgtgtgcagccccggcatggtgcccgtggccctgccccccgccgccgtgaacgcccagcccagatgcagcgaggaggacctgaaggccatccaggacatgttccccaacatggaccaggaggtgatcagaagcgtgctggaggcccagagaggcaacaaggacgccgccatccccagccacctggtgctgggcggcctgagcgccctgagctgcccctgggacgtgagactgagcttcagctgcagaagcggcaagtgcagctgctgcagagagcagctgctgctgcccggctgctggagatggtggagcgccttcagattccacagctggcacttcgtgatgtag

SEQ ID NO: 200922 - DNA, 825 bp, Artificial Sequence
  derived and/or modified sequence
atggccaccactgtaagtacccagagaggtcccgtgtatatcggtgagctccctcaggacttcctgcggatcactcctacacagcagcagcgccaggttcagcttgacgcacaggctgcacagcagctccagtacggcggcgctgtcgggactgtggggcgattaaatattaccgtggtccaggccaaattggccaaaaactatggaatgaccagaatggacccctattgccggctgcgtctggggtatgctgtatatgaaactcctacagctcataatggggccaaaaatccgcgttggaacaaagttatccactgcacggtgccacccggggtcgactcgttttaccttgagatcttcgacgagagagccttttccatggacgatcgtatagcttggacccatatcacaattcctgagagcttgagacaaggaaaggtggaagacaagtggtactcgctgtcgggacgccagggcgacgataaggaaggaatgatcaatcttgtcatgtcttacgccctgcttcccgcggccatggtgatgcccccacaacccgtggtcctcatgcctaccgtttatcaacaaggagtgggatatgttcccattactggaatgccggccgtttgtagtcccgggatggttcccgtggcacttcctcctgctgccgttaacgcgcagcctagatgttcggaggaggatctcaaggcaatccaggacatgttcccgaacatggatcaagaggtgattcgttcagtgttagaagcgcaaagaggcaataaggatgccgctattaattctctactacaaatgggcgaggaaccgtag

SEQ ID NO: 200923 - DNA, 1059 bp, Artificial Sequence
  derived and/or modified sequence
cagctgtccccttcgcaggcccccgccggcgcacaggaagtggcacgcagggtaaccgtgggcagcgcctcccacggaggacgacggtccacgatggctactactgtgtcaacccagcgcggtccggtttacattggcgagctgccacaagattttttgcgtattactcccacacaacagcaaaggcaggtgcaactggacgcgcaggccgctcagcagttgcaatatggaggcgctgtaggcactgtggggcggcttaacattaccgtggtgcaggcaaaactcgctaaaaactatggaatgacccgaatggacccgtactgtaggctgcggcttggttacgccgtgtacgaaacgcccacagcccacaatggtgcaaagaacccccggtggaacaaggtgatccactgcaccgtgcctcccggcgtcgattccttctacctggagatctttgatgagagggccttttcaatggacgaccgaatcgcttggactcacataaccattccagaatccctcaggcagggaaaagtcgaagacaaatggtacagcctcagtggtcgtcagggggatgacaaagagggcatgatcaacttggttatgtcctacgcactgcttcccgccgccatggtaatgcctccacagcccgtggtgttgatgcccaccgtctaccagcagggggttggctacgtgcctatcacagggatgcctgcagtgtgttcgcccggcatggtgccagttgccttaccacctgccgcagtgaacgcccagccaaggtgcagtgaggaggacctcaaagcaattcaggatatgttccctaatatggaccaggaagtgattcgcagtgtgcttgaggcgcaaagggggaataaagacgcagccattcccagccatctggtactgggagggctgtctgctctgtcttgtccatgggatgtgcgactttcattctcctgtcggtcagggaagtgctcatgctgtcgggagcagctgctcttgcccggctgttggaggtggtggagtgcatttagatttcacagttggcactttgtgatgtag

SEQ ID NO: 200924 - DNA, 825 bp, Artificial Sequence
  derived and/or modified sequence
atggccaccaccgtgtccacccagaggggccctgtgtacatcggggagctgccccaggacttcctgcgcatcacccccacccagcagcagaggcaggtgcagctggatgcccaggccgcccagcagctgcagtatggaggagctgtgggcaccgtgggccgcctgaacatcaccgtggtgcaggccaagctggccaagaactacggcatgaccaggatggacccctactgccgcctgcggctgggctatgctgtgtatgagacccccacagcccacaatggagccaagaacccccgctggaacaaggtgatccactgcaccgtgcccccaggagtggacagcttctacctggagatctttgatgagcgggccttctccatggatgacagaattgcctggacccacatcaccatccctgagagcctgcggcagggcaaggtggaggacaagtggtacagcctgagcggccggcagggagatgacaaggagggcatgatcaacctggtgatgtcctatgccctgctgcctgctgccatggtgatgccaccccagcctgtggtgctgatgcccaccgtgtaccagcagggcgtgggctacgtgcccatcaccggcatgcctgctgtgtgcagccctggcatggtgcctgtggccctgcccccagctgctgtgaatgcccagccccgctgcagcgaggaggacctgaaggccatccaggacatgttccccaacatggaccaggaggtgatccgctctgtgctggaggcccagaggggcaacaaggatgctgccatcaacagcctgctgcagatgggagaggagccctag

SEQ ID NO: 200925 - DNA, 1059 bp, Artificial Sequence
  derived and/or modified sequence
cagctgagccccagccaggccccagctggggcccaggaggtggcccggcgggtgacagtgggcagcgccagccatggaggccgccgcagcaccatggccaccaccgtgtccacccagaggggccctgtgtacatcggggagctgccccaggacttcctgcgcatcacccccacccagcagcagaggcaggtgcagctggatgcccaggccgcccagcagctgcagtatggaggagctgtgggcaccgtgggccgcctgaacatcaccgtggtgcaggccaagctggccaagaactacggcatgaccaggatggacccctactgccgcctgcggctgggctatgctgtgtatgagacccccacagcccacaacggggccaagaacccccgctggaacaaggtgatccactgcaccgtgcccccaggagtggacagcttctacctggagatctttgatgagcgggccttctccatggatgaccgcatcgcctggacccacatcaccatccctgagagcctgcggcagggcaaggtggaggacaagtggtacagcctgagcggccggcagggagatgacaaggagggcatgatcaacctggtgatgtcctatgccctgctgcctgctgccatggtgatgccaccccagcctgtggtgctgatgcccaccgtgtaccagcagggcgtgggctacgtgcccatcaccggcatgcctgctgtgtgcagccctggcatggtgcctgtggccctgcccccagctgctgtgaatgcccagccccgctgcagcgaggaggacctgaaggccatccaggacatgttccccaacatggaccaggaggtgatccgctctgtgctggaggcccagaggggcaacaaggatgctgccatccccagccacctggtgctgggcggcctgagcgccctgagctgcccctgggatgtgcggctgtccttcagctgccgcagcggcaagtgcagctgctgccgggagcagctgctgctgcccggctgctggcgctggtggagcgccttccgcttccacagctggcactttgtgatgtag

SEQ ID NO: 200926 - DNA, 825 bp, Artificial Sequence
  derived and/or modified sequence
atggccaccaccgtgagcacccagcggggccccgtgtacatcggcgagctgcctcaggactttctcaggattactccgactcaacagcagagacaggtgcagctggacgcccaggctgctcaacagctgcaatacggcggcgctgttgggaccgttgggcgcctcaatatcactgtcgttcaggctaagttggccaaaaactatggaatgactcgaatggatccatattgtaggctaaggcttggctatgctgtgtacgagaccccaactgctcacaacggcgccaaaaaccccagatggaataaggtgatccactgcaccgtcccccctggggtggacagcttctatctggagatctttgatgagagagccttctcaatggatgaccgaatcgcctggactcacattacgattcccgagagtctgagacaaggcaaagtggaggataagtggtattctctgagtgggcgtcagggcgacgacaaggaaggcatgatcaatctggtgatgtcgtacgctcttttgcctgcggccatggttatgcccccccagcccgttgttctgatgcccaccgtttatcaacagggggtcggctacgtgccaataaccggaatgcctgccgtgtgctccccgggaatggtacccgttgccctacccccagctgcagtgaacgcccagcccagatgcagcgaggaggatctcaaagccatccaagacatgttccccaacatggatcaggaggtcatccgctctgtgttggaagcccagcgcggaaacaaggatgcagccataaactctcttcttcagatgggtgaagagccttag

SEQ ID NO: 200927 - DNA, 1059 bp, Artificial Sequence
  derived and/or modified sequence
cagctgagccccagccaggcccccgccggcgcccaggaggtggccagacgggttaccgtaggatctgcctcacacggcggaagacgttctactatggcaacgactgtgagcactcagagaggtccggtgtacatcggagaactcccacaggattttctccgaatcacgcccacacagcagcaacgacaggtgcaactggacgcccaggctgctcagcagttacagtacgggggcgccgtaggcacagtcggaaggctcaatataactgtcgttcaggcaaaattagccaagaattacggaatgacacggatggacccgtattgtcggctgcggttgggttatgccgtttacgaaactccaacagcacacaacggcgcgaaaaacccaagatggaacaaggtgattcattgcaccgtaccaccaggggtggacagcttctacttggaaatatttgacgagcgggcgttttctatggatgatcgcattgcttggacacacattacaatcccagagtcccttaggcagggcaaggtagaggacaagtggtactccctctccgggcgccagggggacgataaggagggtatgatcaacctcgtaatgagctacgctcttcttcccgccgcaatggtcatgccccctcagcctgtggtcctcatgcctaccgtctatcaacagggggtgggctacgtcccaattaccggaatgccggccgtgtgttccccagggatggtcccggttgccctgccacctgccgccgttaatgctcagcccaggtgctctgaagaagacctaaaagcgatccaggatatgttccctaatatggaccaggaggtaatccggtccgtcctcgaggcacagcgagggaacaaggacgcagcgatcccttcccacctggtcctgggtgggctttccgcacttagctgcccctgggatgtccggctgagtttcagttgcaggagcggaaaatgtagctgctgtagagaacagctccttcttccagggtgttggaggtggtggtcggcttttcgcttccactcctggcacttcgtgatgtag

SEQ ID NO: 200928 - DNA, 825 bp, Artificial Sequence
  derived and/or modified sequence
atggccaccaccgtatccacgcagagagggccagtatatattggggagctgcctcaggacttcctgaggataaccccaacacaacaacagcggcaagtacagctggacgcacaggccgcacagcagttgcagtacggaggtgccgtggggacggtggggcgactgaacatcaccgtggtgcaggcaaaactagccaaaaattatggaatgactagaatggatccatattgccgcctgcgcctcgggtacgctgtgtatgagacaccaactgctcataatggtgcgaagaacccacgttggaataaagtcatccactgcaccgtccctcctggggtagactcattttacttggagattttcgatgaacgcgcttttagcatggacgacaggattgcctggacacacataaccattcctgaatctctgagacagggaaaggttgaggataaatggtatagcctgtcaggcagacaaggcgacgataaggagggaatgatcaacttggtcatgtcttatgccctgctgcctgcggcaatggtgatgccaccccagcctgtggttttaatgcctacggtctaccagcagggcgtgggctatgtcccaattacgggcatgccagcagtctgttcaccgggaatggttcccgtggcccttcctcccgctgcggtcaacgcgcaaccccgttgctctgaggaggatttaaaagccattcaggatatgtttcctaacatggaccaggaagtcatcagatccgttttagaggcccagaggggaaacaaggatgccgcaatcaacagcctgctccagatgggggaggagccctag

SEQ ID NO: 200929 - DNA, 1059 bp, Artificial Sequence
  derived and/or modified sequence
caactgtcaccctctcaggcccctgctggagcgcaggaggtggccagaagagttacggtgggcagcgcctcacacggaggccgaaggagcaccatggcaaccacagtttcgacacaaaggggccctgtctacatcggggaactgccccaggacttcctccggattacccccacccagcagcaaaggcaggtgcaactcgacgcccaggctgctcaacaactgcaatacggaggggcagtcgggaccgtgggcaggttaaacatcacagtcgtacaggctaaactggccaagaactacgggatgacccgcatggacccctactgtcgcctgcggttgggctacgctgtgtatgaaacccctaccgcccacaacggcgcaaagaatcctcgatggaacaaagtgattcactgcaccgtgccccctggagtagactctttctacctggagatcttcgacgagcgcgcattctctatggacgatcggattgcctggacccatattactatcccagagtcccttcgccaaggcaaagtggaagataagtggtactctctaagcggtagacagggtgatgataaagagggcatgatcaacttggtgatgtcctacgccctactaccagctgccatggtcatgcccccacagccagttgtcctgatgccaaccgtctatcaacaaggcgtgggctacgtgcccatcaccggcatgcccgctgtatgcagccccggaatggtacccgttgcattgcccccagccgctgtgaacgcccagcctcggtgctcagaagaggatttgaaagcaattcaggacatgtttcccaacatggaccaggaggtgatccggtcggtcctcgaggctcagcgtggcaacaaggacgccgcaattccaagccacttggtcttagggggtctctccgccctcagctgtccatgggatgtgcgcttgtcttttagctgccgctccggcaagtgctcatgttgcagagaacagctactgttgccaggttgctggagatggtggtcggctttccggtttcactcctggcatttcgtgatgtag

SEQ ID NO: 200930 - DNA, 3617 bp, Artificial Sequence
  derived and/or modified sequence
gctgactgtggcggcggcggcctcgaggtgacaactgtctccgtcgcaggctccggcgggggcgcaggaggtcgcccggcgcgtcactgtcgggtcggcgagccacgggggccgccgcagcaccatggcgaccaccgtcagcactcagcgcgggccggtgtacatcggtgagctcccgcaggacttcctccgcatcacgcccacacagcagcagcggcaggtccagctggacgcccaggcggcccagcagctgcagtacggaggcgcagtgggcaccgtgggccgactgaacatcacggtggtacaggcaaagttggccaagaattacggcatgacccgcatggacccctactgccgactgcgcctgggctacgcggtgtacgagacgcccacggcacacaatggcgccaagaatccccgctggaataaggtcatccactgcacggtgcccccaggcgtggactctttctatctcgagatcttcgatgagagagccttctccatggacgaccgcattgcctggacccacatcaccatcccggagtccctgaggcagggcaaggtggaggacaagtggtacagcctgagcgggaggcagggggacgacaaggagggcatgatcaacctcgtcatgtcctacgcgctgcttccagctgccatggtgatgccaccccagcccgtggtcctgatgccaacagtgtaccagcagggcgttggctatgtgcccatcacagggatgcccgctgtctgtagccccggcatggtgcccgtggccctgcccccggccgccgtgaacgcccagccccgctgtagcgaggaggacctgaaagccatccaggacatgttccccaacatggaccaggaggtgatccgctccgtgctggaagcccagcgagggaacaaggatgccgccatcaactccctgctgcagatgggggaggagccatagagcctctgcctcgatgccgttttgcccccgctctttggacacgccgacccggcgctccccaaggaatgctgtcccaacaagattcccgtgaaagagcacccgtgtcgccccctcccgtggacttctgtgccgccccgtccacacctgttcttgggtgcatgtgggttttcggttcctggcggtccaggacggggcgggggctcccctcccatctcgtgctgggaggtctcagcgcgctctcctgtccctgggacgtgcgtctctccttctcatgccgttctggaaaatgctcttgctgtagagagcagctgcttctgccagggtgttggaggtggtggagcgccttccgattccattcatggcattttgtgatgtgatgtaattggaatagagctgttgatttaaggcacacacaatccctcacactgtgggttttttttagaacttcccagacgaaaactcacgcccttgccctaacgcgctttgctgtgagcctggcccctgcccagggcttgggtctggtgagctgagcagcttcctgtggatggtgtggggccggcctctggcctggctcacctggccactgtccagccagccttgtgacagactccggcctgaaggcagaatgaacccacacctggagtgaggaagggggcctggcacggttggccaggctctgcctgattgccagccagcgggcatctgaagccgggtccttcgcccgccggaggctgccgtccgtctctcctgctgcgctcgtgccagctccgtgggtgtcctcccagggagcttctcttctcaacaggccttgcgaggctggggtgagaggtgatagaggcagcactgtgcatgattccgagagggtgtggtggcactgccagccgactgctgacagcttgggagctgctgtgcccaggacgtgggttcagcgtgggcgaggaaagcctggcgagcgtggccctgtaaaagctttctgaggcgggaggcgctcacttacctctgactgcctgggcgctgcgtgtagcatcttggcctacaggacagattttaggtgacacctggttatgacagtcagaaatttgagaagcttctcacaagtgatgcactttaaataatctgcatgccattgagacacctgcatgtctggtgtttgtggttcaagtgtcttgccgccggccttcggatgtaaacccactgataacggacagaaagagaatgcccacaagtgggtcttctgtggaagatgcagaaggaggaagttagtgcttacattttagtctttttctccctcaaaaaaataggttaagtttcagtgccagctagaaaatactgctttctgccatcgattgggggtggtttttgtcaaatatactgttgataaatatttatttttgtaaacttgaagtgtgtggtggccgtgggggagggacatgctggcagcaggcgccttcttcagctgtgggtcctaaaggcctttgatcctttgaagaagaaagacatggtatttgttcagcagacgccgaccactcagacggaggggcccctgggattccctgtctcagatggcctggtcttacgcctgtgtagatttcttctccattgggaatgaaggtgtcaggcgggactggaacgttctagatggtatgttccgtgatattaacaactctaacccaggacagaccacaagccacactcagaggcctcactgtgctgggggcttcggtgtccaggcgcccaggtgtggccaccagcaccggtttctgccttcgcgttgctggggtgcagtgagactgccacacgcgtgcacatgtggctctgtgggtgtctcctagagaggacgtggcccctgctgccagcccttgagcagcccgtgtgggggcccgagggacccacacagtgggggccagcctcgctggagggagagcaaccctttgccgatgaccacgcttgccgccatctcttagttttctttttcacaagcgctttatttttttaatagacaaatcacattttgcaaggcctttaattaaataagattcttctttccttcattttatgctttatttcctgtttgaaggcttactgtagaagtggcttactgtagaagcagcttgctgagcccctccgagcggtccccagaattagctggttcacaacccccaccctcccccgcccccgcctgtgtcaggtgtggatgaggtcgtcacactcagaaggacaggcttgtctgccagctcacaaggggaggctgcagtgggtttgggagctgggtttaggcccctggtgtctgagggcccaggccttgccagcctctgctgctcctgctcctgggtttgaagatgcaggccgatcgccagctccgtggcagcggtcactaaggacagcctgactgtgccatcttggagcctcaggcggggctccggagatagaagacaggtcgccggaggctccccctcctctcctctcccctctgcagatgctccctgggcgctaccctgcagggtgccaggcaggagtggtctcagaacgtgcgcttctgattattttactggggtccattgtccagatttttctttgattgtaaaatatatttttactttttagtcttctaatttaataaatgatccatataaaaatagagaaataaagtcctttaagggaaggttta

SEQ ID NO: 200931 - DNA, 1090 bp, Artificial Sequence
  derived and/or modified sequence
gctgactgtggcggcggcggcctcgaggtgacaactgtctccgtcgcaggctccggcgggggcgcaggaggtcgcccggcgcgtcactgtcgggtcggcgagccacgggggccgccgcagcaccatggcgaccaccgtcagcactcagcgcgggccggtgtacatcggtgagctcccgcaggacttcctccgcatcacgcccacacagcagcagcggcaggtccagctggacgcccaggcggcccagcagctgcagtacggaggcgcagtgggcaccgtgggccgactgaacatcacggtggtacaggcaaagttggccaagaattacggcatgacccgcatggacccctactgccgactgcgcctgggctacgcggtgtacgagacgcccacggcacacaatggcgccaagaatccccgctggaataaggtcatccactgcacggtgcccccaggcgtggactctttctatctcgagatcttcgatgagagagccttctccatggacgaccgcattgcctggacccacatcaccatcccggagtccctgaggcagggcaaggtggaggacaagtggtacagcctgagcgggaggcagggggacgacaaggagggcatgatcaacctcgtcatgtcctacgcgctgcttccagctgccatggtgatgccaccccagcccgtggtcctgatgccaacagtgtaccagcagggcgttggctatgtgcccatcacagggatgcccgctgtctgtagccccggcatggtgcccgtggccctgcccccggccgccgtgaacgcccagccccgctgtagcgaggaggacctgaaagccatccaggacatgttccccaacatggaccaggaggtgatccgctccgtgctggaagcccagcgagggaacaaggatgccgccatcccctcccatctcgtgctgggaggtctcagcgcgctctcctgtccctgggacgtgcgtctctccttctcatgccgttctggaaaatgctcttgctgtagagagcagctgcttctgccagggtgttggaggtggtggagcgccttccgattccattcatggcattttgtgatgtga

SEQ ID NO: 200932 - protein, 424 aa, Artificial Sequence
  derived and/or modified sequence
MDFSRRSFHRSLSSSLQAPVVSTVGMQRLGTTPSVYGGAGGRGIRISNSRHTVNYGSDLTGGGDLFVGNEKMAMQNLNDRLASYLEKVRTLEQSNSKLEVQIKQWYETNAPRAGRDYSAYYRQIEELRSQIKDAQLQNARCVLQIDNAKLAAEDFRLKYETERGIRLTVEADLQGLNKVFDDLTLHKTDLEIQIEELNKDLALLKKEHQEEVDGLHKHLGNTVNVEVDAAPGLNLGVIMNEMRQKYEVMAQKNLQEAKEQFERQTAVLQQQVTVNTEELKGTEVQLTELRRTSQSLEIELQSHLSMKESLEHTLEETKARYSSQLANLQSLLSSLEAQLMQIRSNMERQNNEYHILLDIKTRLEQEIATYRRLLEGEDVKTTEYQLSTLEERDIKKTRKIKTVVQEVVDGKVVSSEVKEVEENI

SEQ ID NO: 200933 - DNA, 1275 bp, Artificial Sequence
  derived and/or modified sequence
atggatttctctcggcgttcctttcataggtctctttcttcatctttacaggcccctgtagtatccacagttggaatgcaaagacttggtacaactccatcagtgtacggcggtgccgggggtcgcggtattaggatttccaacagcaggcacaccgtaaactatgggagcgatttaacaggcggtggtgacctgttcgttggaaatgaaaagatggctatgcagaatctgaatgacagactagcatcgtatttggagaaagtcagaaccttggaacagagcaatagcaaactagaggttcagataaagcagtggtacgagacaaacgccccaagggccggtagggattatagcgcgtactaccggcagatagaggagttgagaagccagatcaaagacgctcaactgcaaaacgctcgctgcgttctccagattgacaacgccaaactggcggccgaggattttcgactgaagtatgaaaccgagcgcgggatacgtctaacggtggaggcggatctccaaggccttaacaaagtgtttgacgatcttaccctgcataagaccgaccttgaaatccagattgaggagctgaacaaggacttggcactcctcaagaaggaacatcaggaggaagtcgatggtcttcacaaacacttgggaaacacagtgaacgtggaggttgatgcggctcccggcttgaatcttggcgtgattatgaacgaaatgcggcaaaagtatgaggttatggcccagaagaatttgcaggaggcgaaggaacagtttgagcggcagaccgcagtgctccaacaacaggtgaccgtgaatacagaggaactgaagggaactgaggtccagctaaccgaactgcggagaacttctcagagcctcgagatcgaacttcagtctcacctcagtatgaaggagtctctagagcatacgctggaggagacaaaggcccgctactcatcccaactcgcaaacctccaaagcctgctttcttccctagaagcccagctcatgcagattaggagcaatatggagcgtcagaacaacgagtatcatatattgctggacatcaagactcggttggagcaggaaattgcaacatatcgaagactgctggagggggaggatgtgaagactaccgagtatcaactgtcgaccctagaagaacgtgacattaagaagacgcgtaagataaagacagtagtccaggaagttgtagatgggaaagtcgtcagttccgaggtgaaggaggtcgaagagaacatctag

SEQ ID NO: 200934 - DNA, 3078 bp, Artificial Sequence
  derived and/or modified sequence
caaccatcctgaagctacaggtgctccctcctggaatctccaatggatttcagtcgcagaagcttccacagaagcctgagctcctccttgcaggcccctgtagtcagtacagtgggcatgcagcgcctcgggacgacacccagcgtttatgggggtgctggaggccggggcatccgcatctccaactccagacacacggtgaactatgggagcgatctcacaggcggcggggacctgtttgttggcaatgagaaaatggccatgcagaacctaaatgaccgtctagcgagctacctagaaaaggtgcggaccctggagcagtccaactccaaacttgaagtgcaaatcaagcagtggtacgaaaccaacgccccgagggctggtcgcgactacagtgcatattacagacaaattgaagagctgcgaagtcagattaaggatgctcaactgcaaaatgctcggtgtgtcctgcaaattgataatgctaaactggctgctgaggacttcagactgaagtatgagactgagagaggaatacgtctaacagtggaagctgatctccaaggcctgaataaggtctttgatgacctaaccctacataaaacagatttggagattcaaattgaagaactgaataaagacctagctctcctcaaaaaggagcatcaggaggaagtcgatggcctacacaagcatctgggcaacactgtcaatgtggaggttgatgctgctccaggcctgaaccttggcgtcatcatgaatgaaatgaggcagaagtatgaagtcatggcccagaagaaccttcaagaggccaaagaacagtttgagagacagactgcagttctgcagcaacaggtcacagtgaatactgaagaattaaaaggaactgaggttcaactaacggagctgagacgcacctcccagagccttgagatagaactccagtcccatctcagcatgaaagagtctttggagcacactctagaggagaccaaggcccgttacagcagccagttagccaacctccagtcgctgttgagctctctggaggcccaactgatgcagattcggagtaacatggaacgccagaacaacgaataccatatccttcttgacataaagactcgacttgaacaggaaattgctacttaccgccgccttctggaaggagaagacgtaaaaactacagaatatcagttaagcaccctggaagagagagatataaagaaaaccaggaagattaagacagtcgtgcaagaagtagtggatggcaaggtcgtgtcatctgaagtcaaagaggtggaagaaaatatctaaatagctaccagaaggagatgctgctgaggttttgaaagaaatttggctataatcttatctttgctccctgcaagaaatcagccataagaaagcactattaatactctgcagtgattagaaggggtggggtggcgggaatcctatttatcagactctgtaattgaatataaatgttttactcagaggagctgcaaattgcctgcaaaaatgaaatccagtgagcactagaatatttaaaacatcattactgccatctttatcatgaagcacatcaattacaagctgtagaccacctaatatcaatttgtaggtaatgttcctgaaaattgcaatacatttcaattatactaaacctcacaaagtagaggaatccatgtaaattgcaaataaaccactttctaattttttcctgtttctgaattgtaaaaccccctttgggagtccctggtttcttattgagccaatttctgggttaatcttattgatttttcagcatcagtacaactctacaacctttgagctatatctgctttttcccattgcttccactgccttttaaaactcaacacagctttttgaataatttgagagtcaaattcaatcacaaatgctgagcagaataagagtgaagtacactatacttaaaatggaaatagattaaaaacaacattactgaaacccttctcaaggcaaaatgtgtctccttttgataataagctgcatatactatcaggtcctctctttctttatatggtgaacatatatttttaatgaaatgtctctcatttttttaataacagatttattgagatataattcacacaccatgaaattcacccttacaaaacgtacaattcagtggtcttcagtatgcttacaatgttttgcaaccatcaccactatctagttttagaacacttcatcaccccaaaaggaaatcttgtacctattagtagtcaccgccttttcccttcctcccagcccctaacaaccactaatctacttcctgtctctacggatttgcctactctggacatttcatataaataggttaatacgatgtgtccttttatacacaaatgttcatagcagcattactcataaaagccccaaagcgaaacacctcaagtgtccatcaaccgatgaatggataaacaaaatgtaatatatccacacaatagaatcttattcgtcaataaaaaggaatgaagtactgatacatgctataacagagatgaacttcgaaaacatgctaagtgaaagaagccaaatccaaaaacaataaaaacacatattgtatcctcaccctttttgcattttagtgagcaatcattgcatatgaatgtttatgggaaaaatcaatgtgtgctaaatcattgtattccagtaaatagattggacttaaaacttgatacagaagttgcaaataagtgggattgagtttgattattatatagaaaataattacatgattcatttaagaataataatatccaccatttattgagcacttactatgagcctgtgtgccaaacatttcatgcatttctcatttaattctcacaataatcctgtgaggtagaagctattaggttgaatcatatgaacttgccaatatatgataatttctaagagttgggaatttttgaggatgtgaatggtaccactttgaattcctaagatgtaatataatatctaacacatagcaggcacttgattcattattttaaattgaaagaataaagatttttttaaagcttt

SEQ ID NO: 200935 - DNA, 1275 bp, Artificial Sequence
  derived and/or modified sequence
atggacttcagcagaagaagcttccacaggagcctgagcagcagcctgcaggcccctgtggtgtccacagtgggcatgcagaggctgggcaccacccccagcgtgtatggaggagctgggggccggggcatccgcatcagcaacagccgccacacagtgaactacggcagtgacctgaccggcggcggggacctgtttgtgggcaatgagaagatggccatgcagaacctgaatgaccggctggccagctacctggagaaggtgaggaccctggagcagagcaacagcaagctggaggtgcagatcaagcagtggtatgagaccaatgcccccagggctggccgggactacagcgcctactaccggcagatcgaggagctgcggagccagatcaaggatgcccagctgcagaatgcccgctgtgtgctgcagattgacaatgccaagctggccgctgaggacttccggctgaagtatgaaacagagcggggcatccggctgactgtggaggccgacctgcagggcctgaacaaggtgtttgatgacctgaccctgcacaagacagacctggagatccagatcgaggagctgaacaaggacctggccctgctgaagaaggagcaccaggaggaggtggatggcctgcacaagcacctgggcaacacagtgaatgtggaggtggatgctgcccctggcctgaacctgggcgtcatcatgaatgagatgaggcagaagtatgaggtgatggcccagaagaacctgcaggaggccaaggagcagtttgagcggcagacagctgtgctgcagcagcaggtgacagtgaacacagaggagctgaagggcacagaggtgcagctgacagagctgcggaggaccagccagagcctggagattgagctgcagagccacctgtccatgaaggagagcctggagcacaccctggaggagaccaaggcccgctacagcagccagctggccaacctgcagagcctgctgagcagcctggaggcccagctgatgcagatccgcagcaacatggagcggcagaacaatgagtaccacatcctgctggacatcaagacccggctggagcaggagatcgccacctacagaaggctgctggagggagaagatgtgaagaccacagagtaccagctgagcaccctggaggagcgggacatcaagaagaccaggaagatcaagacagtggtgcaggaggtggtggatggcaaggtggtgtcctctgaggtgaaggaggtggaggagaacatctag

SEQ ID NO: 200936 - DNA, 1275 bp, Artificial Sequence
  derived and/or modified sequence
atggacttcagccggcggagcttccaccggagcctgagcagcagcctccaggcgccggtggtctccacggtggggatgcagcgtctgggcacaacaccctccgtgtatggcggcgcaggtggccgcggcatacgtataagtaactctaggcacaccgttaattatggctccgatttaaccggaggtggcgatctgtttgtgggcaacgaaaagatggccatgcagaacctgaatgatagactagcatcttacctcgagaaagtcagaacccttgagcagagcaatagcaaactcgaggtacaaattaaacaatggtacgaaacgaacgcacctcgtgctggacgagattacagcgcctactatcgacaaatagaggaattgcggtcccagatcaaagatgctcagctccaaaatgcccggtgtgttttacagatcgataatgcaaagctggccgccgaagattttagattgaaatacgagactgaaaggggaattaggctgactgtagaagctgaccttcagggcctgaataaggtattcgatgatttgaccctccacaagacagatctcgagatccagatcgaggagttgaacaaggacttggccctgttgaaaaaggaacatcaggaggaggtcgacggtctccataagcacctgggtaatactgtaaatgtggaggtggatgcggctcccggactgaacctgggtgtgattatgaacgagatgagacaaaaatacgaggtcatggctcaaaaaaacctgcaggaggcaaaagagcagttcgaacgccagactgctgttctgcagcagcaagtgaccgttaatacggaggagcttaaagggacagaggtgcagttgacggaattgcggcgcacatctcagtctcttgagattgagttgcagtcccacctaagtatgaaggaaagccttgagcacacactggaggaaacaaaagcccggtactctagccaactagccaaccttcaatcactgctctcctccctggaggctcagctgatgcagatccggagcaatatggagcgccagaacaacgaatatcacattctgctcgacattaaaaccaggctcgagcaggaaattgctacataccgccgcctcttagagggggaagacgtaaagacaacagaataccaattaagtacgttggaggagagggacatcaaaaagaccaggaagattaaaaccgtcgtccaggaggttgttgatggtaaggtggtgtcttccgaagtgaaggaagtggaagagaatatttag

SEQ ID NO: 200937 - DNA, 1275 bp, Artificial Sequence
  derived and/or modified sequence
atggatttctctaggaggtccttccaccgatcactgtcctcctccctgcaggctccagtggtcagcaccgtggggatgcaacgactgggtacaactccctctgtgtatggcggagccggtggcagaggtatcaggatctccaattcacggcacaccgtaaactatgggtcagacctgactggtggtggagatctgttcgtgggcaacgaaaaaatggcgatgcagaatcttaatgatcgtctcgcctcttaccttgagaaagtgagaaccttggaacagagcaattcaaaacttgaagtgcaaattaagcagtggtacgaaacaaatgcccctagggccggacgtgactactccgcctattacaggcaaatcgaagaattgagatctcagatcaaggacgctcagctgcaaaatgccaggtgtgtcctgcagatcgataatgccaagctcgccgctgaggatttccggctgaaatatgaaaccgaaaggggaatccgccttacagttgaggccgatctgcaggggttgaataaggtgtttgacgaccttacactgcacaagaccgaccttgaaatccagattgaagagctgaataaggacttggccctattgaaaaaggagcatcaggaggaagtggacgggctccataaacacctgggcaatactgtgaacgtggaagtagatgccgcacctggtcttaatctaggggtgataatgaatgaaatgcgacaaaaatatgaggtcatggctcagaaaaacttgcaagaagccaaagaacaatttgagcggcaaaccgccgtgctgcaacaacaggtgacagtgaacaccgaggagctgaagggaaccgaggtgcagctcactgaattaagacggacttctcagtctctcgaaatagagctgcagtcccacctgagcatgaaagagtccctggaacataccctggaggaaactaaggcacgctatagcagccagctggccaacttgcagtccttgctgtcgagcctggaagcacagctgatgcagatccggtcaaacatggaaaggcagaataatgagtaccatatcttactcgacatcaagacccgtttagagcaggagatagccacatatagaagactgctcgaaggggaagatgtgaagactaccgagtatcagcttagcaccctggaggaacgtgatatcaaaaaaactcgcaagataaagaccgtcgttcaggaggtcgttgatgggaaggttgtgtctagcgaagtcaaagaggtcgaagaaaatatctag

SEQ ID NO: 200938 - DNA, 1275 bp, Artificial Sequence
  derived and/or modified sequence
atggacttcagccggagatcgtttcacagatcactatccagctctctgcaagcccccgttgtcagcacagtgggtatgcagcggctgggcacaacaccctccgtatatggtggggccggcggacgcgggatccgaattagtaactctcgacacacagtcaattatgggtccgacctgaccggagggggagacttatttgtgggcaatgaaaagatggcaatgcaaaatctcaatgaccgattagcctcctatctggagaaagtgagaaccctcgagcagtccaactccaaactcgaagtacagataaaacagtggtatgagactaatgccccacgggcaggcagggattactcagcgtattaccgccagatcgaggaactgcgctcccagattaaagatgcacagctgcagaatgcccggtgcgtgctccagattgacaatgctaaattggccgccgaagatttccgccttaagtacgagacagagaggggtataaggctgaccgtggaagccgatttgcaggggttaaataaggtctttgacgaccttaccctccacaaaacagacctggagattcagatcgaagaacttaataaagatcttgcccttttgaagaaagaacaccaagaagaagtcgacgggcttcacaaacaccttggaaataccgtgaacgtagaggtggacgccgctccagggttgaaccttggtgttatcatgaacgagatgagacagaagtacgaagtgatggcccagaaaaacttacaggaggctaaagaacagtttgagagacagacagctgtgctccagcagcaggtgaccgttaatacagaagaactgaaaggcaccgaggtacagctgaccgaactgagacgaacttcgcagagcttagaaatagaattgcagagccatctgagcatgaaagagtccttggagcacaccctggaggaaacaaaagcacgctattcatcccagctcgccaacctacaatctctcctcagcagtttggaggcgcaattaatgcagattagaagcaacatggaacgtcaaaacaacgagtaccacattttgctcgatatcaaaacgcggctggagcaggaaatagcgacctaccgccggctgctcgaaggggaagatgttaaaacaaccgagtatcagctgtccactttagaggaaagagatatcaagaaaacccggaagataaaaaccgtggtgcaagaagtagttgacggaaaggtcgtgtcctctgaggtaaaggaagtggaggaaaatatctag

SEQ ID NO: 200939 - DNA, 1275 bp, Artificial Sequence
  derived and/or modified sequence
atggattttagccgcaggagcttccataggagcctgtcatccagcctacaggcacccgtggtaagtacagtgggaatgcagcgtctaggtacaaccccatcagtgtatggcggagcaggtggaagggggatccgcatctcaaattcacggcatacagtcaattacggcagtgacctgacgggcggaggggatctatttgtcggaaatgagaaaatggctatgcaaaacttgaacgaccggctggcatcttaccttgaaaaagtccgaactctggagcagtccaattccaagctggaggtgcagattaaacagtggtacgaaacaaacgctccacgtgccggaagagactactccgcttactatcgccagattgaagagctgaggtcgcagattaaagacgcccagttgcaaaatgctcgctgtgtgctccaaatagacaatgccaagctcgctgccgaggacttcaggcttaaatatgagactgagcgcgggatcaggttaactgtcgaggccgatctgcagggactgaataaggtgttcgacgaccttactttgcacaagactgatttggaaattcagatcgaagagttaaacaaagatcttgctttactaaagaaagaacaccaggaggaggtggacggcctgcacaaacacctggggaataccgtcaatgtagaagtggacgcagctcctggactgaatctgggggtgattatgaacgaaatgagacaaaagtacgaagtaatggcacaaaagaatctgcaagaagcaaaggaacaatttgaaagacaaacagcggtactccaacagcaggtgactgtgaacaccgaggagttgaaaggcacggaagtgcaactgactgaactgaggaggacgtcccagtctttggagattgaactccagagccatttatctatgaaggagagcttagaacacaccttggaagaaaccaaagctcgatactcgtcacagttagccaacctacagtctttattatcatctctcgaggctcagctcatgcagattaggtctaacatggagcgacagaataatgaatatcacatcctgctcgatattaagactcgcttggagcaagagattgccacctatcggcgcctgctcgagggagaagatgtcaaaaccactgaatatcaactctccactcttgaggaacgggacattaagaaaacaagaaaaatcaagacggtggtgcaagaggtggtggacggaaaggttgtgagtagtgaagtgaaagaagttgaagagaatatttag

SEQ ID NO: 200940 - DNA, 1275 bp, Artificial Sequence
  derived and/or modified sequence
atggacttcagcagaagaagcttccacagaagcctgagcagcagcctgcaggcccccgtggtgagcaccgtgggcatgcagagactgggcaccacccccagcgtgtacggcggcgccggcggcagaggcatcagaatcagcaacagcagacacaccgtgaactacggcagcgacctgaccggcggcggcgacctgttcgtgggcaacgagaagatggccatgcagaacctgaacgacagactggccagctacctggagaaggtgagaaccctggagcagagcaacagcaagctggaggtgcagatcaagcagtggtacgagaccaacgcccccagagccggcagagactacagcgcctactacagacagatcgaggagctgagaagccagatcaaggacgcccagctgcagaacgccagatgcgtgctgcagatcgacaacgccaagctggccgccgaggacttcagactgaagtacgagaccgagagaggcatcagactgaccgtggaggccgacctgcagggcctgaacaaggtgttcgacgacctgaccctgcacaagaccgacctggagatccagatcgaggagctgaacaaggacctggccctgctgaagaaggagcaccaggaggaggtggacggcctgcacaagcacctgggcaacaccgtgaacgtggaggtggacgccgcccccggcctgaacctgggcgtgatcatgaacgagatgagacagaagtacgaggtgatggcccagaagaacctgcaggaggccaaggagcagttcgagagacagaccgccgtgctgcagcagcaggtgaccgtgaacaccgaggagctgaagggcaccgaggtgcagctgaccgagctgagaagaaccagccagagcctggagatcgagctgcagagccacctgagcatgaaggagagcctggagcacaccctggaggagaccaaggccagatacagcagccagctggccaacctgcagagcctgctgagcagcctggaggcccagctgatgcagatcagaagcaacatggagagacagaacaacgagtaccacatcctgctggacatcaagaccagactggagcaggagatcgccacctacagaagactgctggagggcgaggacgtgaagaccaccgagtaccagctgagcaccctggaggagagagacatcaagaagaccagaaagatcaagaccgtggtgcaggaggtggtggacggcaaggtggtgagcagcgaggtgaaggaggtggaggagaacatctag

SEQ ID NO: 200941 - protein, 1116 aa, Artificial Sequence
  derived and/or modified sequence
MAADLNLEWISLPRSWTYGITRGGRVFFINEEAKSTTWLHPVTGEAVVTGHRRQSTDLPTGWEEAYTFEGARYYINHNERKVTCKHPVTGQPSQDNCIFVVNEQTVATMTSEEKKERPISMINEASNYNVTSDYAVHPMSPVGRTSRASKKVHNFGKRSNSIKRNPNAPVVRRGWLYKQDSTGMKLWKKRWFVLSDLCLFYYRDEKEEGILGSILLPSFQIALLTSEDHINRKYAFKAAHPNMRTYYFCTDTGKEMELWMKAMLDAALVQTEPVKRVDKITSENAPTKETNNIPNHRVLIKPEIQNNQKNKEMSKIEEKKALEAEKYGFQKDGQDRPLTKINSVKLNSLPSEYESGSACPAQTVHYRPINLSSSENKIVNVSLADLRGGNRPNTGPLYTEADRVIQRTNSMQQLEQWIKIQKGRGHEEETRGVISYQTLPRNMPSHRAQIMARYPEGYRTLPRNSKTRPESICSVTPSTHDKTLGPGAEEKRRSMRDDTMWQLYEWQQRQFYNKQSTLPRHSTLSSPKTMVNISDQTMHSIPTSPSHGSIAAYQGYSPQRTYRSEVSSPIQRGDVTIDRRHRAHHPKHVYVPDRRSVPAGLTLQSVSPQSLQGKTLSQDEGRGTLYKYRPEEVDIDAKLSRLCEQDKVVHALEEKLQQLHKEKYTLEQALLSASQEIEMHADNPAAIQTVVLQRDDLQNGLLSTCRELSRATAELERAWREYDKLEYDVTVTRNQMQEQLDHLGEVQTESAGIQRAQIQKELWRIQDVMEGLSKHKQQRGTTEIGMIGSKPFSTVKYKNEGPDYRLYKSEPELTTVAEVDESNGEEKSEPVSEIETSVVKGSHFPVGVVPPRAKSPTPESSTIASYVTLRKTKKMMDLRTERPRSAVEQLCLAESTRPRMTVEEQMERIRRHQQACLREKKKGLNVIGASDQSPLQSPSNLRDNPFRTTQTRRRDDKELDTAIRENDVKPDHETPATEIVQLKETEPQNVDFSKELKKTENISYEMLFEPEPNGVNSVEMMDKERNKDKMPEDVTFSPQDETQTANHKPEEHPEENTKNSVDEQEETVISYESTPEVSRGNQTMAVKSLSPSPESSASPVPSTQPQLTEGSHFMCV

SEQ ID NO: 200942 - protein, 1060 aa, Artificial Sequence
  derived and/or modified sequence
MAADLNLEWISLPRSWTYGITRGGRVFFINEEAKSTTWLHPVTGEAVVTGHRRQSTDLPTGWEEAYTFEGARYYINHNERKVTCKHPVTGQPSQDNCIFVVNEQTVATMTSEEKKERPISMINEASNYNVTSDYAVHPMSPVGRTSRASKKVHNFGKRSNSIKRNPNAPVVRRGWLYKQDSTGMKLWKKRWFVLSDLCLFYYRDEKEEGILGSILLPSFQIALLTSEDHINRKYAFKAAHPNMRTYYFCTDTGKEMELWMKAMLDAALVQTEPVKRVDKITSENAPTKETNNIPNHRVLIKPEIQNNQKNKEMSKIEEKKALEAEKYGFQKDGQDRPLTKINSVKLNSLPSEYESGSACPAQTVHYRPINLSSSENKIVNVSLADLRGGNRPNTGPLYTEADRVIQRTNSMQQLEQWIKIQKGRGHEEETRGVISYQTLPRNMPSHRAQIMARYPEGYRTLPRNSKTRPESICSVTPSTHDKTLGPGAEEKRRSMRDDTMWQLYEWQQRQFYNKQSTLPRHSTLSSPKTMVNISDQTMHSIPTSPSHGSIAAYQGYSPQRTYRSEVSSPIQRGDVTIDRRHRAHHPKHVYVPDRRSVPAGLTLQSVSPQSLQGKTLSQDEGRGTLYKYRPEEVDIDAKLSRLCEQDKVVHALEEKLQQLHKEKYTLEQALLSASQEIEMHADNPAAIQTVVLQRDDLQNGLLSTCRELSRATAELERAWREYDKLEYDVTVTRNQMQEQLDHLGEVQTESAGIQRAQIQKELWRIQDVMEGLSKHKQQRGTTEIGSHFPVGVVPPRAKSPTPESSTIASYVTLRKTKKMMDLRTERPRSAVEQLCLAESTRPRMTVEEQMERIRRHQQACLREKKKGLNVIGASDQSPLQSPSNLRDNPFRTTQTRRRDDKELDTAIRENDVKPDHETPATEIVQLKETEPQNVDFSKELKKTENISYEMLFEPEPNGVNSVEMMDKERNKDKMPEDVTFSPQDETQTANHKPEEHPEENTKNSVDEQEETVISYESTPEVSRGNQTMAVKSLSPSPESSASPVPSTQPQLTEGSHFMCV

SEQ ID NO: 200943 - protein, 397 aa, Artificial Sequence
  derived and/or modified sequence
YTLEQALLSASQEIEMHADNPAAIQTVVLQRDDLQNGLLSTCRELSRATAELERAWREYDKLEYDVTVTRNQMQEQLDHLGEVQTESAGIQRAQIQKELWRIQDVMEGLSKHKQQRGTTEIGSHFPVGVVPPRAKSPTPESSTIASYVTLRKTKKMMDLRTERPRSAVEQLCLAESTRPRMTVEEQMERIRRHQQACLREKKKGLNVIGASDQSPLQSPSNLRDNPFRTTQTRRRDDKELDTAIRENDVKPDHETPATEIVQLKETEPQNVDFSKELKKTENISYEMLFEPEPNGVNSVEMMDKERNKDKMPEDVTFSPQDETQTANHKPEEHPEENTKNSVDEQEETVISYESTPEVSRGNQTMAVKSLSPSPESSASPVPSTQPQLTEGSHFMCV

SEQ ID NO: 200944 - protein, 874 aa, Artificial Sequence
  derived and/or modified sequence
MRTYYFCTDTGKEMELWMKAMLDAALVQTEPVKRVDKITSENAPTKETNNIPNHRVLIKPEIQNNQKNKEMSKIEEKKALEAEKYGFQKDGQDRPLTKINSVKLNSLPSEYESGSACPAQTVHYRPINLSSSENKIVNVSLADLRGGNRPNTGPLYTEADRVIQRTNSMQQLEQWIKIQKGRGHEEETRGVISYQTLPRNMPSHRAQIMARYPEGYRTLPRNSKTRPESICSVTPSTHDKTLGPGAEEKRRSMRDDTMWQLYEWQQRQFYNKQSTLPRHSTLSSPKTMVNISDQTMHSIPTSPSHGSIAAYQGYSPQRTYRSEVSSPIQRGDVTIDRRHRAHHPKHVYVPDRRSVPAGLTLQSVSPQSLQGKTLSQDEGRGTLYKYRPEEVDIDAKLSRLCEQDKVVHALEEKLQQLHKEKYTLEQALLSASQEIEMHADNPAAIQTVVLQRDDLQNGLLSTCRELSRATAELERAWREYDKLEYDVTVTRNQMQEQLDHLGEVQTESAGIQRAQIQKELWRIQDVMEGLSKHKQQRGTTEIGMIGSKPFSTVKYKNEGPDYRLYKSEPELTTVAEVDESNGEEKSEPVSEIETSVVKGSHFPVGVVPPRAKSPTPESSTIASYVTLRKTKKMMDLRTERPRSAVEQLCLAESTRPRMTVEEQMERIRRHQQACLREKKKGLNVIGASDQSPLQSPSNLRDNPFRTTQTRRRDDKELDTAIRENDVKPDHETPATEIVQLKETEPQNVDFSKELKKTENISYEMLFEPEPNGVNSVEMMDKERNKDKMPEDVTFSPQDETQTANHKPEEHPEENTKNSVDEQEETVISYESTPEVSRGNQTMAVKSLSPSPESSASPVPSTQPQLTEGSHFMCV

SEQ ID NO: 200945 - DNA, 3351 bp, Artificial Sequence
  derived and/or modified sequence
atggccgccgacctgaacctggagtggatcagcctgcccagaagctggacctacggcatcaccagaggcggcagagtgttcttcatcaacgaggaggccaagagcaccacctggctgcaccccgtgaccggcgaggccgtggtgaccggccacagaagacagagcaccgacctgcccaccggctgggaggaggcctacaccttcgagggcgccagatactacatcaaccacaacgagagaaaggtgacctgcaagcaccccgtgaccggccagcccagccaggacaactgcatcttcgtggtgaacgagcagaccgtggccaccatgaccagcgaggagaagaaggagagacccatcagcatgatcaacgaggccagcaactacaacgtgaccagcgactacgccgtgcaccccatgagccccgtgggcagaaccagcagagccagcaagaaggtgcacaacttcggcaagagaagcaacagcatcaagagaaaccccaacgcccccgtggtgagaagaggctggctgtacaagcaggacagcaccggcatgaagctgtggaagaagagatggttcgtgctgagcgacctgtgcctgttctactacagagacgagaaggaggagggcatcctgggcagcatcctgctgcccagcttccagatcgccctgctgaccagcgaggaccacatcaacagaaagtacgccttcaaggccgcccaccccaacatgagaacctactacttctgcaccgacaccggcaaggagatggagctgtggatgaaggccatgctggacgccgccctggtgcagaccgagcccgtgaagagagtggacaagatcaccagcgagaacgcccccaccaaggagaccaacaacatccccaaccacagagtgctgatcaagcccgagatccagaacaaccagaagaacaaggagatgagcaagatcgaggagaagaaggccctggaggccgagaagtacggcttccagaaggacggccaggacagacccctgaccaagatcaacagcgtgaagctgaacagcctgcccagcgagtacgagagcggcagcgcctgccccgcccagaccgtgcactacagacccatcaacctgagcagcagcgagaacaagatcgtgaacgtgagcctggccgacctgagaggcggcaacagacccaacaccggccccctgtacaccgaggccgacagagtgatccagagaaccaacagcatgcagcagctggagcagtggatcaagatccagaagggcagaggccacgaggaggagaccagaggcgtgatcagctaccagaccctgcccagaaacatgcccagccacagagcccagatcatggccagataccccgagggctacagaaccctgcccagaaacagcaagaccagacccgagagcatctgcagcgtgacccccagcacccacgacaagaccctgggccccggcgccgaggagaagagaagaagcatgagagacgacaccatgtggcagctgtacgagtggcagcagagacagttctacaacaagcagagcaccctgcccagacacagcaccctgagcagccccaagaccatggtgaacatcagcgaccagaccatgcacagcatccccaccagccccagccacggcagcatcgccgcctaccagggctacagcccccagagaacctacagaagcgaggtgagcagccccatccagagaggcgacgtgaccatcgacagaagacacagagcccaccaccccaagcacgtgtacgtgcccgacagaagaagcgtgcccgccggcctgaccctgcagagcgtgagcccccagagcctgcagggcaagaccctgagccaggacgagggcagaggcaccctgtacaagtacagacccgaggaggtggacatcgacgccaagctgagcagactgtgcgagcaggacaaggtggtgcacgccctggaggagaagctgcagcagctgcacaaggagaagtacaccctggagcaggccctgctgagcgccagccaggagatcgagatgcacgccgacaaccccgccgccatccagaccgtggtgctgcagagagacgacctgcagaacggcctgctgagcacctgcagagagctgagcagagccaccgccgagctggagagagcctggagagagtacgacaagctggagtacgacgtgaccgtgaccagaaaccagatgcaggagcagctggaccacctgggcgaggtgcagaccgagagcgccggcatccagagagcccagatccagaaggagctgtggagaatccaggacgtgatggagggcctgagcaagcacaagcagcagagaggcaccaccgagatcggcatgatcggcagcaagcccttcagcaccgtgaagtacaagaacgagggccccgactacagactgtacaagagcgagcccgagctgaccaccgtggccgaggtggacgagagcaacggcgaggagaagagcgagcccgtgagcgagatcgagaccagcgtggtgaagggcagccacttccccgtgggcgtggtgccccccagagccaagagccccacccccgagagcagcaccatcgccagctacgtgaccctgagaaagaccaagaagatgatggacctgagaaccgagagacccagaagcgccgtggagcagctgtgcctggccgagagcaccagacccagaatgaccgtggaggagcagatggagagaatcagaagacaccagcaggcctgcctgagagagaagaagaagggcctgaacgtgatcggcgccagcgaccagagccccctgcagagccccagcaacctgagagacaaccccttcagaaccacccagaccagaagaagagacgacaaggagctggacaccgccatcagagagaacgacgtgaagcccgaccacgagacccccgccaccgagatcgtgcagctgaaggagaccgagccccagaacgtggacttcagcaaggagctgaagaagaccgagaacatcagctacgagatgctgttcgagcccgagcccaacggcgtgaacagcgtggagatgatggacaaggagagaaacaaggacaagatgcccgaggacgtgaccttcagcccccaggacgagacccagaccgccaaccacaagcccgaggagcaccccgaggagaacaccaagaacagcgtggacgagcaggaggagaccgtgatcagctacgagagcacccccgaggtgagcagaggcaaccagaccatggccgtgaagagcctgagccccagccccgagagcagcgccagccccgtgcccagcacccagccccagctgaccgagggcagccacttcatgtgcgtgtag

SEQ ID NO: 200946 - DNA, 1953 bp, Artificial Sequence
  derived and/or modified sequence
atggccgccgacctgaacctggagtggatcagcctgcccagaagctggacctacggcatcaccagaggcggcagagtgttcttcatcaacgaggaggccaagagcaccacctggctgcaccccgtgaccggcgaggccgtggtgaccggccacagaagacagagcaccgacctgcccaccggctgggaggaggcctacaccttcgagggcgccagatactacatcaaccacaacgagagaaaggtgacctgcaagcaccccgtgaccggccagcccagccaggacaactgcatcttcgtggtgaacgagcagaccgtggccaccatgaccagcgaggagaagaaggagagacccatcagcatgatcaacgaggccagcaactacaacgtgaccagcgactacgccgtgcaccccatgagccccgtgggcagaaccagcagagccagcaagaaggtgcacaacttcggcaagagaagcaacagcatcaagagaaaccccaacgcccccgtggtgagaagaggctggctgtacaagcaggacagcaccggcatgaagctgtggaagaagagatggttcgtgctgagcgacctgtgcctgttctactacagagacgagaaggaggagggcatcctgggcagcatcctgctgcccagcttccagatcgccctgctgaccagcgaggaccacatcaacagaaagtacgccttcaaggccgcccaccccaacatgagaacctactacttctgcaccgacaccggcaaggagatggagctgtggatgaaggccatgctggacgccgccctggtgcagaccgagcccgtgaagagagtggacaagatcaccagcgagaacgcccccaccaaggagaccaacaacatccccaaccacagagtgctgatcaagcccgagatccagaacaaccagaagaacaaggagatgagcaagatcgaggagaagaaggccctggaggccgagaagtacggcttccagaaggacggccaggacagacccctgaccaagatcaacagcgtgaagctgaacagcctgcccagcgagtacgagagcggcagcgcctgccccgcccagaccgtgcactacagacccatcaacctgagcagcagcgagaacaagatcgtgaacgtgagcctggccgacctgagaggcggcaacagacccaacaccggccccctgtacaccgaggccgacagagtgatccagagaaccaacagcatgcagcagctggagcagtggatcaagatccagaagggcagaggccacgaggaggagaccagaggcgtgatcagctaccagaccctgcccagaaacatgcccagccacagagcccagatcatggccagataccccgagggctacagaaccctgcccagaaacagcaagaccagacccgagagcatctgcagcgtgacccccagcacccacgacaagaccctgggccccggcgccgaggagaagagaagaagcatgagagacgacaccatgtggcagctgtacgagtggcagcagagacagttctacaacaagcagagcaccctgcccagacacagcaccctgagcagccccaagaccatggtgaacatcagcgaccagaccatgcacagcatccccaccagccccagccacggcagcatcgccgcctaccagggctacagcccccagagaacctacagaagcgaggtgagcagccccatccagagaggcgacgtgaccatcgacagaagacacagagcccaccaccccaagcacgtgtacgtgcccgacagaagaagcgtgcccgccggcctgaccctgcagagcgtgagcccccagagcctgcagggcaagacctggggcagagagaaggtggccaccgccaccggcgccgccgaggccgtggccagcgacacccacctgcccagaaccggcagcagcagccccagcctgctgtgcgtgtag

SEQ ID NO: 200947 - DNA, 3183 bp, Artificial Sequence
  derived and/or modified sequence
atggccgccgacctgaacctggagtggatcagcctgcccagaagctggacctacggcatcaccagaggcggcagagtgttcttcatcaacgaggaggccaagagcaccacctggctgcaccccgtgaccggcgaggccgtggtgaccggccacagaagacagagcaccgacctgcccaccggctgggaggaggcctacaccttcgagggcgccagatactacatcaaccacaacgagagaaaggtgacctgcaagcaccccgtgaccggccagcccagccaggacaactgcatcttcgtggtgaacgagcagaccgtggccaccatgaccagcgaggagaagaaggagagacccatcagcatgatcaacgaggccagcaactacaacgtgaccagcgactacgccgtgcaccccatgagccccgtgggcagaaccagcagagccagcaagaaggtgcacaacttcggcaagagaagcaacagcatcaagagaaaccccaacgcccccgtggtgagaagaggctggctgtacaagcaggacagcaccggcatgaagctgtggaagaagagatggttcgtgctgagcgacctgtgcctgttctactacagagacgagaaggaggagggcatcctgggcagcatcctgctgcccagcttccagatcgccctgctgaccagcgaggaccacatcaacagaaagtacgccttcaaggccgcccaccccaacatgagaacctactacttctgcaccgacaccggcaaggagatggagctgtggatgaaggccatgctggacgccgccctggtgcagaccgagcccgtgaagagagtggacaagatcaccagcgagaacgcccccaccaaggagaccaacaacatccccaaccacagagtgctgatcaagcccgagatccagaacaaccagaagaacaaggagatgagcaagatcgaggagaagaaggccctggaggccgagaagtacggcttccagaaggacggccaggacagacccctgaccaagatcaacagcgtgaagctgaacagcctgcccagcgagtacgagagcggcagcgcctgccccgcccagaccgtgcactacagacccatcaacctgagcagcagcgagaacaagatcgtgaacgtgagcctggccgacctgagaggcggcaacagacccaacaccggccccctgtacaccgaggccgacagagtgatccagagaaccaacagcatgcagcagctggagcagtggatcaagatccagaagggcagaggccacgaggaggagaccagaggcgtgatcagctaccagaccctgcccagaaacatgcccagccacagagcccagatcatggccagataccccgagggctacagaaccctgcccagaaacagcaagaccagacccgagagcatctgcagcgtgacccccagcacccacgacaagaccctgggccccggcgccgaggagaagagaagaagcatgagagacgacaccatgtggcagctgtacgagtggcagcagagacagttctacaacaagcagagcaccctgcccagacacagcaccctgagcagccccaagaccatggtgaacatcagcgaccagaccatgcacagcatccccaccagccccagccacggcagcatcgccgcctaccagggctacagcccccagagaacctacagaagcgaggtgagcagccccatccagagaggcgacgtgaccatcgacagaagacacagagcccaccaccccaagcacgtgtacgtgcccgacagaagaagcgtgcccgccggcctgaccctgcagagcgtgagcccccagagcctgcagggcaagaccctgagccaggacgagggcagaggcaccctgtacaagtacagacccgaggaggtggacatcgacgccaagctgagcagactgtgcgagcaggacaaggtggtgcacgccctggaggagaagctgcagcagctgcacaaggagaagtacaccctggagcaggccctgctgagcgccagccaggagatcgagatgcacgccgacaaccccgccgccatccagaccgtggtgctgcagagagacgacctgcagaacggcctgctgagcacctgcagagagctgagcagagccaccgccgagctggagagagcctggagagagtacgacaagctggagtacgacgtgaccgtgaccagaaaccagatgcaggagcagctggaccacctgggcgaggtgcagaccgagagcgccggcatccagagagcccagatccagaaggagctgtggagaatccaggacgtgatggagggcctgagcaagcacaagcagcagagaggcaccaccgagatcggcagccacttccccgtgggcgtggtgccccccagagccaagagccccacccccgagagcagcaccatcgccagctacgtgaccctgagaaagaccaagaagatgatggacctgagaaccgagagacccagaagcgccgtggagcagctgtgcctggccgagagcaccagacccagaatgaccgtggaggagcagatggagagaatcagaagacaccagcaggcctgcctgagagagaagaagaagggcctgaacgtgatcggcgccagcgaccagagccccctgcagagccccagcaacctgagagacaaccccttcagaaccacccagaccagaagaagagacgacaaggagctggacaccgccatcagagagaacgacgtgaagcccgaccacgagacccccgccaccgagatcgtgcagctgaaggagaccgagccccagaacgtggacttcagcaaggagctgaagaagaccgagaacatcagctacgagatgctgttcgagcccgagcccaacggcgtgaacagcgtggagatgatggacaaggagagaaacaaggacaagatgcccgaggacgtgaccttcagcccccaggacgagacccagaccgccaaccacaagcccgaggagcaccccgaggagaacaccaagaacagcgtggacgagcaggaggagaccgtgatcagctacgagagcacccccgaggtgagcagaggcaaccagaccatggccgtgaagagcctgagccccagccccgagagcagcgccagccccgtgcccagcacccagccccagctgaccgagggcagccacttcatgtgcgtgtag

SEQ ID NO: 200948 - DNA, 963 bp, Artificial Sequence
  derived and/or modified sequence
atggccgccgacctgaacctggagtggatcagcctgcccagaagctggacctacggcatcaccagaggcggcagagtgttcttcatcaacgaggaggccaagagcaccacctggctgcaccccgtgaccggcgaggccgtggtgaccggccacagaagacagagcaccgacctgcccaccggctgggaggaggcctacaccttcgagggcgccagatactacatcaaccacaacgagagaaaggtgacctgcaagcaccccgtgaccggccagcccagccaggacaactgcatcttcgtggtgaacgagcagaccgtggccaccatgaccagcgaggagaagaaggagagacccatcagcatgatcaacgaggccagcaactacaacgtgaccagcgactacgccgtgcaccccatgagccccgtgggcagaaccagcagagccagcaagaaggtgcacaacttcggcaagagaagcaacagcatcaagagaaaccccaacgcccccgtggtgagaagaggctggctgtacaagcaggacagcaccggcatgaagctgtggaagaagagatggttcgtgctgagcgacctgtgcctgttctactacagagacgagaaggaggagggcatcctgggcagcatcctgctgcccagcttccagatcgccctgctgaccagcgaggaccacatcaacagaaagtacgccttcaaggccgcccaccccaacatgagaacctactacttctgcaccgacaccggcaaggagatggagctgtggatgaaggccatgctggacgccgccctggtgcagaccgagcccgtgaagagagtggacaagatcaccagcgagaacgcccccaccaaggagaccaacaacatccccaaccacagagtgctgatcaagcccgagatccagaacaaccagaagaacaaggagaagaagaagaagaagaagaagaagtag

SEQ ID NO: 200949 - DNA, 1194 bp, Artificial Sequence
  derived and/or modified sequence
tacaccctggagcaggccctgctgagcgccagccaggagatcgagatgcacgccgacaaccccgccgccatccagaccgtggtgctgcagagagacgacctgcagaacggcctgctgagcacctgcagagagctgagcagagccaccgccgagctggagagagcctggagagagtacgacaagctggagtacgacgtgaccgtgaccagaaaccagatgcaggagcagctggaccacctgggcgaggtgcagaccgagagcgccggcatccagagagcccagatccagaaggagctgtggagaatccaggacgtgatggagggcctgagcaagcacaagcagcagagaggcaccaccgagatcggcagccacttccccgtgggcgtggtgccccccagagccaagagccccacccccgagagcagcaccatcgccagctacgtgaccctgagaaagaccaagaagatgatggacctgagaaccgagagacccagaagcgccgtggagcagctgtgcctggccgagagcaccagacccagaatgaccgtggaggagcagatggagagaatcagaagacaccagcaggcctgcctgagagagaagaagaagggcctgaacgtgatcggcgccagcgaccagagccccctgcagagccccagcaacctgagagacaaccccttcagaaccacccagaccagaagaagagacgacaaggagctggacaccgccatcagagagaacgacgtgaagcccgaccacgagacccccgccaccgagatcgtgcagctgaaggagaccgagccccagaacgtggacttcagcaaggagctgaagaagaccgagaacatcagctacgagatgctgttcgagcccgagcccaacggcgtgaacagcgtggagatgatggacaaggagagaaacaaggacaagatgcccgaggacgtgaccttcagcccccaggacgagacccagaccgccaaccacaagcccgaggagcaccccgaggagaacaccaagaacagcgtggacgagcaggaggagaccgtgatcagctacgagagcacccccgaggtgagcagaggcaaccagaccatggccgtgaagagcctgagccccagccccgagagcagcgccagccccgtgcccagcacccagccccagctgaccgagggcagccacttcatgtgcgtgtag

SEQ ID NO: 200950 - DNA, 2625 bp, Artificial Sequence
  derived and/or modified sequence
atgagaacctactacttctgcaccgacaccggcaaggagatggagctgtggatgaaggccatgctggacgccgccctggtgcagaccgagcccgtgaagagagtggacaagatcaccagcgagaacgcccccaccaaggagaccaacaacatccccaaccacagagtgctgatcaagcccgagatccagaacaaccagaagaacaaggagatgagcaagatcgaggagaagaaggccctggaggccgagaagtacggcttccagaaggacggccaggacagacccctgaccaagatcaacagcgtgaagctgaacagcctgcccagcgagtacgagagcggcagcgcctgccccgcccagaccgtgcactacagacccatcaacctgagcagcagcgagaacaagatcgtgaacgtgagcctggccgacctgagaggcggcaacagacccaacaccggccccctgtacaccgaggccgacagagtgatccagagaaccaacagcatgcagcagctggagcagtggatcaagatccagaagggcagaggccacgaggaggagaccagaggcgtgatcagctaccagaccctgcccagaaacatgcccagccacagagcccagatcatggccagataccccgagggctacagaaccctgcccagaaacagcaagaccagacccgagagcatctgcagcgtgacccccagcacccacgacaagaccctgggccccggcgccgaggagaagagaagaagcatgagagacgacaccatgtggcagctgtacgagtggcagcagagacagttctacaacaagcagagcaccctgcccagacacagcaccctgagcagccccaagaccatggtgaacatcagcgaccagaccatgcacagcatccccaccagccccagccacggcagcatcgccgcctaccagggctacagcccccagagaacctacagaagcgaggtgagcagccccatccagagaggcgacgtgaccatcgacagaagacacagagcccaccaccccaagcacgtgtacgtgcccgacagaagaagcgtgcccgccggcctgaccctgcagagcgtgagcccccagagcctgcagggcaagaccctgagccaggacgagggcagaggcaccctgtacaagtacagacccgaggaggtggacatcgacgccaagctgagcagactgtgcgagcaggacaaggtggtgcacgccctggaggagaagctgcagcagctgcacaaggagaagtacaccctggagcaggccctgctgagcgccagccaggagatcgagatgcacgccgacaaccccgccgccatccagaccgtggtgctgcagagagacgacctgcagaacggcctgctgagcacctgcagagagctgagcagagccaccgccgagctggagagagcctggagagagtacgacaagctggagtacgacgtgaccgtgaccagaaaccagatgcaggagcagctggaccacctgggcgaggtgcagaccgagagcgccggcatccagagagcccagatccagaaggagctgtggagaatccaggacgtgatggagggcctgagcaagcacaagcagcagagaggcaccaccgagatcggcatgatcggcagcaagcccttcagcaccgtgaagtacaagaacgagggccccgactacagactgtacaagagcgagcccgagctgaccaccgtggccgaggtggacgagagcaacggcgaggagaagagcgagcccgtgagcgagatcgagaccagcgtggtgaagggcagccacttccccgtgggcgtggtgccccccagagccaagagccccacccccgagagcagcaccatcgccagctacgtgaccctgagaaagaccaagaagatgatggacctgagaaccgagagacccagaagcgccgtggagcagctgtgcctggccgagagcaccagacccagaatgaccgtggaggagcagatggagagaatcagaagacaccagcaggcctgcctgagagagaagaagaagggcctgaacgtgatcggcgccagcgaccagagccccctgcagagccccagcaacctgagagacaaccccttcagaaccacccagaccagaagaagagacgacaaggagctggacaccgccatcagagagaacgacgtgaagcccgaccacgagacccccgccaccgagatcgtgcagctgaaggagaccgagccccagaacgtggacttcagcaaggagctgaagaagaccgagaacatcagctacgagatgctgttcgagcccgagcccaacggcgtgaacagcgtggagatgatggacaaggagagaaacaaggacaagatgcccgaggacgtgaccttcagcccccaggacgagacccagaccgccaaccacaagcccgaggagcaccccgaggagaacaccaagaacagcgtggacgagcaggaggagaccgtgatcagctacgagagcacccccgaggtgagcagaggcaaccagaccatggccgtgaagagcctgagccccagccccgagagcagcgccagccccgtgcccagcacccagccccagctgaccgagggcagccacttcatgtgcgtgtag

SEQ ID NO: 200951 - DNA, 3351 bp, Artificial Sequence
  derived and/or modified sequence
atggccgcagatttgaacttggagtggatcagtctgccacggtcctggacttacgggatcactaggggcgggcgggtatttttcattaatgaagaagctaaatctaccacttggctgcatccagtgaccggggaggccgtggtgaccgggcataggcgacagtccacggacctgcccactggctgggaggaagcgtatacctttgaaggagcccgatattacattaatcataacgagagaaaagtaacgtgtaagcaccccgtcaccgggcagccgtcccaggacaattgcatcttcgtagttaatgagcagaccgttgcgacaatgacatccgaagaaaagaaggaacgtccaatctcgatgattaacgaggccagtaactataacgtgacaagcgactatgccgtgcaccccatgtctccagttggacggacctctcgtgcatcaaagaaggtacacaatttcggaaaacgctctaatagtattaagaggaacccaaatgcgcccgtggtgcgcagaggttggttgtataagcaagattccaccggcatgaagctctggaaaaaacgctggttcgtgctcagtgatctgtgcctgttctactacagagatgaaaaggaagagggcattctgggctcaatacttctgcctagcttccagatcgccctgctgactagcgaggaccatatcaatcgcaaatacgcatttaaggcagcccatccaaacatgcgcacatactacttttgcacagacacaggaaaagaaatggaattgtggatgaaggccatgctcgatgccgccttagtccaaaccgagcctgttaagcgggttgacaaaatcaccagtgagaatgcccccacaaaagaaacaaataacatcccgaaccaccgcgtcctaatcaagccagagatccagaataatcaaaaaaacaaagaaatgagtaagatcgaggaaaagaaagccctggaagccgagaagtacgggttccaaaaggacggccaggaccggcccctgacaaagatcaatagcgtgaagttaaattccttgccctctgagtacgagtctggcagcgcttgccccgcccagacagttcactatcggccaatcaacttatcttcatctgaaaataagatcgtgaacgtgtctttagctgatttgaggggtgggaaccggccaaacaccggacccctttacactgaagccgatcgtgtgattcagaggaccaacagcatgcagcagctggaacagtggattaagatccagaaagggcgcggacatgaggaagagacgcgtggggtgatttcctaccagacgctcccacgcaatatgcccagtcaccgtgcacagattatggccaggtaccccgagggataccgtaccttgccccggaatagtaagactaggcccgaatccatttgttccgtcactccatcaacacacgacaaaacccttggacctggagctgaggagaagcgaaggagcatgagagatgataccatgtggcagctttatgaatggcagcagcggcaattctataacaaacagagtaccttgcctagacatagcacgctgagttctccaaaaaccatggttaacatcagcgatcaaaccatgcactcaataccgacatccccctcacatggtagcatcgccgcataccagggctattcccctcaacgcacctatcggtccgaggtgagttcacccatccaacgtggagacgtgacaattgaccgccgacatcgggctcaccaccctaagcatgtgtacgtgcccgacaggcgatctgtgcctgcgggcttgacacttcaaagcgtgtccccccaatctctccagggaaagaccctctcacaggatgagggccggggcactttatataaatatagacctgaggaggttgacatcgatgcaaagctgtcacggctctgcgaacaggacaaggtggtgcatgcactcgaggagaaacttcagcagttacacaaggagaagtataccctggaacaggcgttgttaagtgccagccaagagatcgagatgcatgcggataatccggcagccatccagaccgtggtgctccagcgagatgatcttcagaacggactgctaagtacttgcagggagttgagcagagcaaccgctgagcttgagcgcgcgtggcgggagtatgacaagctcgaatacgacgtcaccgtcacacggaatcagatgcaggaacaattggatcacctgggcgaggtgcagactgaatctgccggcattcaaagggcacagattcaaaaagagttgtggaggatccaagacgtcatggaaggcctgtccaaacacaagcagcagaggggaacaactgaaatagggatgatcgggagcaagccgttcagcacagtcaagtacaaaaacgaaggcccagactacagattgtacaaaagcgaacccgagctcaccaccgtggccgaagttgatgagtctaatggcgaggagaagagcgagcctgtgtccgaaattgaaacctcagtggtcaaggggtcacacttccctgtaggggtggtacctccccgggccaaatctcccactcccgaatcaagcaccatcgccagctacgtgactctgagaaagactaaaaaaatgatggacctaaggacagagagacctagaagcgctgtcgagcagttatgcctcgcagaatccacccgacccaggatgacagtggaggaacaaatggagcgtattcggcgtcaccagcaggcttgtctccgagaaaagaagaaaggcctaaatgtcattggagccagtgatcagtcgcccctacagagtccctccaatctgcgcgacaacccgtttagaaccacccagacccgccgaagggacgacaaggagctggacactgccatcagggaaaacgatgtcaagccggatcatgaaactcctgccaccgagatcgtgcagcttaaggagaccgagccgcagaacgttgattttagcaaagagttgaagaagaccgaaaatataagctacgaaatgctattcgagccagagcccaacggcgtcaatagcgtggagatgatggacaaagaacggaacaaggacaagatgccagaggatgtgaccttttctccccaggatgagacccagactgcaaatcacaagcccgaagaacacccagaggaaaacacgaaaaatagcgttgacgaacaggaggaaaccgtgatctcttatgagtccactccagaggtatcacggggcaatcagacaatggctgtgaaatcactgtcgccttccccagagagctctgcttcgccagtgccatcgacccagccgcagctcaccgaagggagtcattttatgtgtgtgtag

SEQ ID NO: 200952 - DNA, 1953 bp, Artificial Sequence
  derived and/or modified sequence
atggctgccgaccttaatcttgaatggatctccctgcccaggagttggacatatggaatcactaggggaggccgggtttttttcatcaatgaggaggcgaagagcacaacctggctccaccccgtgaccggggaagctgtggtgacaggtcaccgaagacaatctacagacctcccaactggttgggaagaagcttacacgttcgaaggcgcaaggtattacatcaaccacaatgagagaaaagtgacatgtaagcatcctgtgacaggacagccatcacaggacaactgtattttcgttgtgaatgagcaaacagtggccactatgacatcagaggagaagaaggagagaccaatatcaatgattaacgaggcttctaattataatgttacctctgactatgccgttcaccccatgagccccgtgggaagaacaagtagggcctccaagaaagtccataatttcggtaagagaagcaactcaattaagagaaatcctaacgcgcctgtcgtgagacggggatggctgtacaagcaggacagtaccgggatgaagttgtggaagaagaggtggttcgtgctaagcgacttgtgcctgttctattaccgggacgagaaggaagagggaatcctcggctcaatactgcttccgtcttttcagatagctctcttgactagtgaggaccatattaatcgcaaatatgcttttaaagctgcacaccccaatatgaggacatactacttttgtacagacaccgggaaagagatggaactgtggatgaaggctatgctcgacgcagcacttgtccagacagagccagtgaaacgggtggacaagattacctcggagaatgcacctaccaaagagactaataatattccaaatcatcgggtgctgatcaagcccgaaattcagaacaaccagaagaataaggagatgtccaaaattgaggaaaagaaggctttagaggcagagaagtatggtttccagaaggatggtcaggatcggccgctaacaaaaattaattctgtcaaactcaatagcttaccctccgagtacgagagcggcagtgcctgccctgcgcaaacggtacattatcggcctattaacctgagcagcagcgagaacaaaatagttaacgtcagtttagccgatctgcgcggaggcaacagaccgaatactggaccgctttataccgaagcagacagagtgatacagcgcaccaattcaatgcaacaactggagcagtggatcaaaatccagaagggccgcggccatgaggaggaaaccaggggtgtgattagttatcagacattacctaggaacatgccttcccaccgggcacagattatggcccggtaccctgaaggctataggacactaccccgcaatagcaagactagacccgaatctatctgtagtgtgacgccctccacccatgacaagacgctagggcctggagcggaagagaagcgaaggtcgatgcgggatgacacaatgtggcagttatatgagtggcagcagcgacagttctataataagcagagcaccctaccccggcatagcaccctttcatcccccaagactatggttaatatctccgatcaaactatgcactccattcccacctctccttcacacggctcgatagccgcatatcagggctactcacctcagagaacatacaggtcagaagtaagctccccaatccagcgaggagatgtgaccattgatcggaggcaccgggctcatcacccgaaacacgtctacgtcccagataggagaagcgtacctgcaggactgacactccagtcagtttcacctcagagtttacaggggaagacatggggccgcgagaaggtggccacagccacaggcgcagcagaggctgtggccagcgatacccacctgccaagaacgggcagtagttcacccagcttactgtgcgtgtag

SEQ ID NO: 200953 - DNA, 3183 bp, Artificial Sequence
  derived and/or modified sequence
atggcagccgatttgaacctagaatggatctctcttcctaggtcctggacgtatggaataactagaggcggccgggtgttcttcattaatgaggaagcgaaatcaacaacttggttgcacccagtcacaggagaagccgtagttaccgggcatcgcagacagagcaccgacctgcctacggggtgggaggaggcctacacctttgaaggggcgcgctattacatcaatcacaatgagcgcaaggtgacatgcaagcacccagtaactggacagccctctcaggataactgtatctttgtcgtaaatgagcaaaccgtggctaccatgacaagcgaagaaaaaaaggaaagaccaatatctatgatcaacgaagcgagcaattataatgtcacctccgactacgctgtgcaccctatgagtcctgtgggtagaacatctcgcgcctccaaaaaggtgcacaacttcgggaagcggtcaaatagcatcaagcggaatccaaatgcacctgtggtgagacggggttggctgtacaaacaagactctacaggaatgaagttatggaaaaagcggtggtttgtgctgagtgacctgtgtcttttctactatcgggatgagaaggaggaaggaattctgggaagtattctcctgccaagcttccagatcgctctcctaacatcggaggaccacatcaataggaaatacgccttcaaggctgctcacccaaacatgcggacgtactacttctgcacagacactgggaaggaaatggagttatggatgaaggccatgcttgacgccgccctggtgcagaccgaacccgtgaaaagagtggataagatcaccagcgagaacgcacctactaaagaaactaataacatcccgaatcatagagtgctcatcaagcccgagatccaaaacaatcagaagaataaggagatgagcaagattgaggagaagaaagctctggaggccgagaagtacggtttccagaaagacggtcaggaccggccattgaccaagattaatagcgtcaagttgaactctctcccatcagagtatgaatcgggctcagcttgtccagcacagaccgtgcactatcgccccatcaacctgagcagctctgagaacaaaattgtcaatgtatctctggccgaccttagaggcggcaaccgtcctaatactgggcctctgtatactgaagccgacagagtgatccaaaggacaaacagcatgcagcagttagagcagtggatcaaaatccagaaggggaggggccatgaggaagaaacaaggggagtcatatcctaccagacacttcctaggaatatgccctcacaccgggcccagataatggcacgctatccagaggggtatcgtactctgccacgcaacagtaaaacgcgccctgagagtatttgcagcgtcaccccttcgacgcacgacaagacattaggcccaggggcagaggagaaaagaaggtcaatgcgggacgatactatgtggcaactctacgaatggcagcaacggcagttctacaacaagcagagcacgcttccaagacattctaccctctcaagtcctaaaacgatggtcaatatatccgatcaaaccatgcattccattcccacttcaccatcacacggaagcatagcagcataccaggggtacagcccccagcggacataccggagtgaagtgtccagcccgattcagagaggggacgtgaccatcgaccggcgccatagggctcatcacccgaaacatgtctacgtacctgaccgaaggtcagttcccgccggactcacactgcagtctgtgagcccccagtcactgcagggaaagactctttcccaggatgaaggccgggggacattgtacaaatacaggcccgaggaagtagatatcgacgcaaaattgtccaggctgtgtgaacaggacaaagtcgtacacgccctggaagagaagctacagcaactgcacaaggagaagtatacactggaacaggccctgctgtccgcctcccaggagatcgagatgcacgcagacaatccagccgctatccagacggtcgtgctgcagcgcgatgatttgcaaaatgggctcttgagtacatgcagggagctttcacgagctaccgccgagttagagcgtgcctggcgggaatacgataagctggagtacgacgtgaccgttaccaggaatcagatgcaggagcaactggaccaccttggcgaggtgcagaccgagtcagccggaattcagagggcccagatccagaaggaactctggcgtattcaagacgtgatggaaggcctgtctaaacacaagcagcagagaggcacgactgaaatcggttctcattttccggtgggagtggtccccccaagagccaaaagtcccactcccgagtcctccaccatcgcgagctacgtcacacttcgaaaaactaaaaagatgatggatctccggactgagcggcccagatctgctgtggagcaactctgcctcgctgagagtactcgaccaaggatgacagtcgaggaacagatggagcgcatcagaaggcaccagcaagcatgtctacgcgagaagaaaaaaggattaaatgtcatcggcgcatctgaccagtctcctctgcagtcccctagtaatctacgcgataaccccttccgtaccacacagacacgccggcgagacgacaaagagctggataccgcaatcagggagaatgacgtgaaacctgaccacgagacgcctgctaccgaaatcgttcagctgaaggaaaccgagccccagaatgtagattttagcaaagagctgaagaagacagaaaatatctcctatgaaatgctgtttgaacccgaacccaatggcgtaaactccgttgagatgatggataaggagcggaataaggataaaatgccagaggacgtaaccttctccccgcaagacgaaacccagaccgctaatcataagcccgaggaacatcccgaagaaaatacaaaaaattctgtcgatgaacaggaagagaccgtcatctcctacgagtctacacctgaagtaagccgcggaaaccaaacaatggcggtgaagtctctctcaccgtccccagaaagttcagccagtcccgtgccttctactcagccccagttaacagaaggtagccacttcatgtgtgtgtag

SEQ ID NO: 200954 - DNA, 963 bp, Artificial Sequence
  derived and/or modified sequence
atggctgcggatttgaacttggaatggatcagtttgccccgttcttggacatacgggatcacccgcgggggtcgcgtgttcttcattaatgaagaagcgaagtccactacatggctgcaccccgtcacaggtgaggccgttgtcaccgggcacagacgccagagcactgacctgccaaccgggtgggaagaagcctataccttcgagggcgctcgctactacattaaccacaacgagcgaaaagtgacttgtaagcatccggtgactggtcaaccgtcccaggataattgcatctttgtagttaacgaacagactgtggcaaccatgacgtccgaggaaaagaaagagagaccaatatccatgatcaatgaggccagcaactataacgtcacaagcgattatgcagtccatccaatgagccctgtcggaagaacttcacgagcttctaagaaagtgcacaacttcggcaaacgctcaaactcaataaagcggaatcctaacgctcctgtggtgcgtcgggggtggctctacaaacaggatagcaccggcatgaaactctggaagaagcgttggttcgtgctctccgacttatgtctcttttattatagagatgagaaggaggaaggcattttgggaagcatcctcctgccctctttccagattgcgctgctcacctccgaggaccacattaaccggaaatacgcatttaaggcagctcatcccaatatgagaacatactatttctgcaccgacaccggcaaggagatggaactctggatgaaggcaatgcttgatgctgcactggtgcagaccgaaccagtgaagcgcgtggacaagataacatcagagaacgctcctactaaagagaccaacaatatcccaaatcatagagtgctgattaaacccgaaattcaaaataatcagaagaataaagagaaaaaaaagaaaaaaaagaaaaagtag

SEQ ID NO: 200955 - DNA, 1194 bp, Artificial Sequence
  derived and/or modified sequence
tatacactcgaacaagccctcctgagcgcaagtcaggagattgaaatgcatgccgacaatccagccgctattcagaccgtcgtgctccagcgcgatgacctccagaatgggcttctgagtacgtgtcgcgaactgagtagggccactgccgagttggagcgagcctggcgtgaatatgacaagctggaatacgacgtcactgtgacacgtaaccagatgcaggaacagctcgaccacctgggggaggttcagaccgaaagcgccgggatacagagagctcagatccagaaggagctgtggcgcattcaggatgtgatggagggactgtctaagcacaagcagcaaaggggtactactgaaattggcagtcacttccccgtaggcgtggtgccaccaagggcaaagtctcccactcccgaatcctccacgatagctagctacgtgactctgcgaaaaacaaagaagatgatggacctccggacagaacgccctaggagcgcagtggaacaactctgtctagcggaatcaacacgtcccaggatgaccgtggaggaacaaatggagcgcatcagacgacaccagcaagcctgccttcgcgagaaaaaaaaaggactcaacgtgattggagcttctgaccagtctcctcttcagtccccctctaatctgcgggacaacccattccgcactacgcagacgcgaaggagggatgacaaagaactggatacagccataagagagaatgatgtcaaacccgaccatgaaacacctgctaccgaaatcgtgcagcttaaagagacagaacctcagaacgtggacttcagtaaagaactcaagaagacagagaatatcagttacgagatgctgtttgaaccagagcccaatggcgtcaacagcgtggaaatgatggataaggagaggaacaaggacaagatgccagaagacgtcacattttcaccacaggatgagacacaaacagcaaaccataagccggaagaacacccagaagaaaataccaagaattcggtcgacgagcaggaggagaccgtcattagttatgagtccacaccagaagttagccgggggaatcaaactatggccgttaaatctctttccccatcgccagagagtagcgcatcgccagttccgagtacccagccacagctcactgaagggtctcatttcatgtgcgtgtag

SEQ ID NO: 200956 - DNA, 2625 bp, Artificial Sequence
  derived and/or modified sequence
atgagaacctattatttctgtactgacaccgggaaggaaatggagctctggatgaaggctatgctagacgctgcccttgtccagaccgaaccagttaagagggtggacaagataacgagcgagaacgccccaactaaagagacgaataatattccgaaccatcgggtcctcattaaacctgagattcagaacaatcagaaaaataaggaaatgtccaagatcgaagaaaagaaagctctggaggccgagaaatatggtttccagaaggacggccaggatcggccacttacaaaaatcaattctgtgaagctgaacagtctaccgagcgagtacgagtcaggaagcgcatgtcctgcgcaaactgtgcattacaggcccatcaatctgtcttcttccgaaaataaaattgttaacgtttctctggcagacctcagagggggtaataggcctaacacaggacccctgtatacagaggccgaccgagtcatccagcggacaaattccatgcagcagctagaacagtggatcaagatacagaaaggacgtggccacgaggaagagacacgcggagtgataagctatcaaactctgccaaggaacatgcccagccaccgagctcagatcatggctaggtatcccgaaggctacaggaccctgcccagaaacagtaaaacacgcccagagagcatttgttcggtcaccccttcaactcacgataaaaccctgggccccggggcagaggaaaaacgccgctcaatgagagacgataccatgtggcagttgtacgaatggcagcaacggcagttttacaacaagcaatctaccctgccccggcatagcacactgtccagcccaaagactatggtgaacatatcggatcagactatgcatagcattcctacctcaccaagccacgggagtattgccgcctaccagggatattcccctcagaggacataccgaagcgaagtcagctccccaatccagcggggggacgtgacaattgaccgccgccatagagcccaccacccaaaacatgtatacgtgcctgaccggcgcagcgtgcccgccggactgacactccagtccgtgtctcctcagtccctgcaaggaaaaaccctgagtcaagacgagggcagaggtacactgtacaaataccggccagaggaagtggatatcgacgccaagctatcgcggctgtgtgaacaagacaaggttgtgcacgccctggaggagaaactgcagcaactgcacaaggaaaagtataccctcgagcaggcactgctcagcgcttctcaggaaatagagatgcatgcagataaccccgccgccatccagactgtcgtgctgcagcgcgatgatctgcagaacggtctcctctcaacttgccgcgagttgtcacgtgcaaccgccgagttagagcgcgcctggagggagtacgataaacttgaatatgacgtaaccgtaacacgcaatcagatgcaggagcaacttgatcatttgggcgaggtccagacagaatctgccgggatacaacgagcccagatacagaaggagctctggcggatccaggatgtcatggagggccttagtaagcacaagcagcagcggggaaccacggagattggaatgattggttccaagccattttctacagtgaaatataagaatgaggggccagattacagactgtacaagtcggaaccagaattaactactgtggctgaagtggacgagtcaaatggggaggagaagagcgagcccgtctctgagatcgagacctcagttgtgaaagggtctcacttccccgtcggcgtggtcccccctcgcgcaaagtcacccacccccgagagttccacaatcgccagctatgtcacactgagaaaaacaaaaaagatgatggacctgcgcacagagagaccacgtagtgcggtagaacagttatgtctggcggagagcacgcgaccgcgcatgaccgtagaggaacagatggagcgaattcggagacaccagcaggcttgcttgagggagaaaaagaagggtctcaatgttattggagcatctgaccagtccccattgcagtcaccatccaacttgagggacaacccgttccgaaccacccaaactaggcgcagagacgataaggagttagataccgccattagggagaacgatgtcaagccagaccacgagacaccagccacagagatagttcagttgaaggagacagagccacaaaacgtggactttagcaaagagctgaagaagactgagaatatcagctatgaaatgctttttgagccagagcccaacggtgtcaactccgttgaaatgatggataaggagcggaacaaggataagatgcccgaggacgttaccttttctccccaggatgaaacccagaccgcgaatcacaagccggaagagcaccccgaggaaaacactaaaaactctgtagatgagcaggaggagaccgtgatctcctatgagtctacgccagaggtgtcccggggcaatcaaaccatggcagtcaaatccctctctccttctccagaaagtagcgcatccccagtgcccagcactcagccgcagctcacagaggggagccacttcatgtgtgtgtag

SEQ ID NO: 200957 - DNA, 3351 bp, Artificial Sequence
  derived and/or modified sequence
atggctgctgacctgaacctggagtggatcagcctgcccaggtcctggacctacggcatcacccggggcggccgggtcttcttcatcaatgaggaggccaagagcaccacctggctgcaccctgtgactggagaggccgtggtgacaggccaccggcggcagagcacagacctgcccaccggctgggaggaggcctacacctttgagggcgcccgctactacatcaaccacaatgaaaggaaggtgacctgcaagcaccctgtgacaggccagcccagccaggacaactgcatctttgtggtgaatgagcagacagtggccaccatgaccagcgaggagaagaaggagcggcccatctccatgatcaatgaggccagcaactacaacgtgaccagtgactatgctgtgcaccccatgagccctgtgggccgcaccagccgggccagcaagaaggtgcacaactttgggaagaggagcaacagcatcaagaggaaccccaatgcccctgtggtgcggcggggctggctgtacaagcaggacagcacaggcatgaagctgtggaagaagcgctggtttgtgctgagtgacctgtgcctcttctactacagagatgagaaggaggagggcatcctgggcagcatcctgctgcccagcttccagatcgccctgctgaccagcgaggaccacatcaacagaaaatatgccttcaaggccgcccaccccaacatgaggacctactacttctgcacagacaccgggaaggagatggagctgtggatgaaggccatgctggatgctgccctggtgcagacagagcctgtgaagagggtggacaagatcaccagtgaaaatgcccccaccaaggagaccaacaacatccccaaccaccgggtgctgatcaagccagagatccagaacaaccagaagaacaaggagatgagcaagattgaggagaagaaggccctggaggccgagaagtatggcttccagaaggatggccaggaccggcccctgaccaagatcaacagcgtgaagctgaacagcctgcccagtgaatatgaaagtggcagcgcctgcccagcccagacagtgcactaccggcccatcaacctgagcagcagcgagaacaagatcgtgaatgtgtccctggccgacctgcggggcggcaaccggcccaacacaggccccctgtacacagaagctgacagagtcatccagaggaccaacagcatgcagcagctggagcagtggatcaagatccagaagggccggggccacgaggaggagacccggggcgtcatctcctaccagaccctgcccaggaacatgcccagccaccgggcccagatcatggcccgctacccagagggctaccgcaccctgcccaggaacagcaagaccaggcctgagagcatctgcagcgtgacccccagcacccatgacaagaccctgggccctggagctgaggagaagaggaggtccatgagagatgacaccatgtggcagctgtatgagtggcagcagaggcagttctacaacaagcagagcaccctgcccaggcacagcaccctgagcagccccaagaccatggtgaacatcagtgaccagaccatgcacagcatccccaccagccccagccacggcagcattgctgcctaccagggctacagcccccagaggacctacagaagtgaggtgagcagccccatccagagaggagatgtgaccatcgacagaagacaccgggcccaccaccccaagcacgtgtatgtgcctgaccggcgctctgtgcctgctggcctgaccctgcagagcgtgagcccccagagcctgcagggcaagaccctgagccaggatgagggccggggcaccctgtacaagtacagacctgaggaggtggacattgatgccaagctgagccggctgtgtgagcaggacaaggtggtgcacgccctggaggagaagctgcagcagctgcacaaggagaagtacaccctggagcaggccctgctgagcgccagccaggagattgagatgcatgctgacaacccagctgccatccagacagtggtgctgcagagagatgacctgcagaatggcctgctgagcacctgccgggagctgagccgggccacagctgagctggagcgggcctggagagaatatgacaagctggagtatgatgtgacagtgaccaggaaccagatgcaggagcagctggaccacctgggggaggtgcagacagagagcgctggcatccagagggcccagatccagaaggagctgtggaggatccaggatgtgatggagggcctgagcaagcacaagcagcagaggggcaccacagagatcggcatgattggcagcaagcccttcagcacagtgaagtacaagaatgaaggaccagactaccgcctgtacaagtctgagcctgagctgaccaccgtggccgaggtggatgagagcaatggagaggagaagtctgagcctgtgtctgaaattgagacctctgtggtgaagggcagccacttccctgtgggcgtggtgcccccccgggccaagagccccaccccagagagcagcaccatcgccagctatgtgaccctgaggaagaccaagaagatgatggacctgaggacagagcggcccaggtctgctgtggagcagctgtgcctggccgagagcacccggcccaggatgacagtggaggagcagatggagcgcatccgccgccaccagcaggcctgcctgcgggagaagaagaagggcctgaatgtgattggagccagtgaccagagccccctgcagagccccagcaacctgcgggacaaccccttccgcaccacccagaccaggagaagagatgacaaggagctggacacagccatcagagaaaatgatgtgaagccagaccacgagaccccagccacagaaattgtgcagctgaaggagacagagccccagaatgtggacttcagcaaggagctgaagaagacagagaacatctcctatgagatgctgtttgagcctgagcccaatggagtgaacagcgtggagatgatggacaaggagaggaacaaggacaagatgccagaagatgtgaccttcagcccccaggatgagacccagacagccaaccacaagccagaggagcaccctgaggagaacaccaagaacagcgtggatgagcaggaggagaccgtcatctcctatgagagcaccccagaggtgtcccggggcaaccagaccatggctgtgaagagcctgagccccagccctgagagcagcgccagccctgtgcccagcacccagccccagctgacagagggcagccacttcatgtgtgtgtag

SEQ ID NO: 200958 - DNA, 1953 bp, Artificial Sequence
  derived and/or modified sequence
atggctgctgacctgaacctggagtggatcagcctgcccaggtcctggacctacggcatcacccggggcggccgggtcttcttcatcaatgaggaggccaagagcaccacctggctgcaccctgtgactggagaggccgtggtgacaggccaccggcggcagagcacagacctgcccaccggctgggaggaggcctacacctttgagggcgcccgctactacatcaaccacaatgaaaggaaggtgacctgcaagcaccctgtgacaggccagcccagccaggacaactgcatctttgtggtgaatgagcagacagtggccaccatgaccagcgaggagaagaaggagcggcccatctccatgatcaatgaggccagcaactacaacgtgaccagtgactatgctgtgcaccccatgagccctgtgggccgcaccagccgggccagcaagaaggtgcacaactttgggaagaggagcaacagcatcaagaggaaccccaatgcccctgtggtgcggcggggctggctgtacaagcaggacagcacaggcatgaagctgtggaagaagcgctggtttgtgctgagtgacctgtgcctcttctactacagagatgagaaggaggagggcatcctgggcagcatcctgctgcccagcttccagatcgccctgctgaccagcgaggaccacatcaacagaaaatatgccttcaaggccgcccaccccaacatgaggacctactacttctgcacagacaccgggaaggagatggagctgtggatgaaggccatgctggatgctgccctggtgcagacagagcctgtgaagagggtggacaagatcaccagtgaaaatgcccccaccaaggagaccaacaacatccccaaccaccgggtgctgatcaagccagagatccagaacaaccagaagaacaaggagatgagcaagattgaggagaagaaggccctggaggccgagaagtatggcttccagaaggatggccaggaccggcccctgaccaagatcaacagcgtgaagctgaacagcctgcccagtgaatatgaaagtggcagcgcctgcccagcccagacagtgcactaccggcccatcaacctgagcagcagcgagaacaagatcgtgaatgtgtccctggccgacctgcggggcggcaaccggcccaacacaggccccctgtacacagaagctgacagagtcatccagaggaccaacagcatgcagcagctggagcagtggatcaagatccagaagggccggggccacgaggaggagacccggggcgtcatctcctaccagaccctgcccaggaacatgcccagccaccgggcccagatcatggcccgctacccagagggctaccgcaccctgcccaggaacagcaagaccaggcctgagagcatctgcagcgtgacccccagcacccatgacaagaccctgggccctggagctgaggagaagaggaggtccatgagagatgacaccatgtggcagctgtatgagtggcagcagaggcagttctacaacaagcagagcaccctgcccaggcacagcaccctgagcagccccaagaccatggtgaacatcagtgaccagaccatgcacagcatccccaccagccccagccacggcagcattgctgcctaccagggctacagcccccagaggacctacagaagtgaggtgagcagccccatccagagaggagatgtgaccatcgacagaagacaccgggcccaccaccccaagcacgtgtatgtgcctgaccggcgctctgtgcctgctggcctgaccctgcagagcgtgagcccccagagcctgcagggcaagacctggggccgggagaaggtggccacagccactggagctgctgaggccgtggccagtgacacccacctgcccaggacaggcagcagcagccccagcctgctgtgtgtgtag

SEQ ID NO: 200959 - DNA, 3183 bp, Artificial Sequence
  derived and/or modified sequence
atggctgctgacctgaacctggagtggatcagcctgcccaggtcctggacctacggcatcacccggggcggccgggtcttcttcatcaatgaggaggccaagagcaccacctggctgcaccctgtgactggagaggccgtggtgacaggccaccggcggcagagcacagacctgcccaccggctgggaggaggcctacacctttgagggcgcccgctactacatcaaccacaatgaaaggaaggtgacctgcaagcaccctgtgacaggccagcccagccaggacaactgcatctttgtggtgaatgagcagacagtggccaccatgaccagcgaggagaagaaggagcggcccatctccatgatcaatgaggccagcaactacaacgtgaccagtgactatgctgtgcaccccatgagccctgtgggccgcaccagccgggccagcaagaaggtgcacaactttgggaagaggagcaacagcatcaagaggaaccccaatgcccctgtggtgcggcggggctggctgtacaagcaggacagcacaggcatgaagctgtggaagaagcgctggtttgtgctgagtgacctgtgcctcttctactacagagatgagaaggaggagggcatcctgggcagcatcctgctgcccagcttccagatcgccctgctgaccagcgaggaccacatcaacagaaaatatgccttcaaggccgcccaccccaacatgaggacctactacttctgcacagacaccgggaaggagatggagctgtggatgaaggccatgctggatgctgccctggtgcagacagagcctgtgaagagggtggacaagatcaccagtgaaaatgcccccaccaaggagaccaacaacatccccaaccaccgggtgctgatcaagccagagatccagaacaaccagaagaacaaggagatgagcaagattgaggagaagaaggccctggaggccgagaagtatggcttccagaaggatggccaggaccggcccctgaccaagatcaacagcgtgaagctgaacagcctgcccagtgaatatgaaagtggcagcgcctgcccagcccagacagtgcactaccggcccatcaacctgagcagcagcgagaacaagatcgtgaatgtgtccctggccgacctgcggggcggcaaccggcccaacacaggccccctgtacacagaagctgacagagtcatccagaggaccaacagcatgcagcagctggagcagtggatcaagatccagaagggccggggccacgaggaggagacccggggcgtcatctcctaccagaccctgcccaggaacatgcccagccaccgggcccagatcatggcccgctacccagagggctaccgcaccctgcccaggaacagcaagaccaggcctgagagcatctgcagcgtgacccccagcacccatgacaagaccctgggccctggagctgaggagaagaggaggtccatgagagatgacaccatgtggcagctgtatgagtggcagcagaggcagttctacaacaagcagagcaccctgcccaggcacagcaccctgagcagccccaagaccatggtgaacatcagtgaccagaccatgcacagcatccccaccagccccagccacggcagcattgctgcctaccagggctacagcccccagaggacctacagaagtgaggtgagcagccccatccagagaggagatgtgaccatcgacagaagacaccgggcccaccaccccaagcacgtgtatgtgcctgaccggcgctctgtgcctgctggcctgaccctgcagagcgtgagcccccagagcctgcagggcaagaccctgagccaggatgagggccggggcaccctgtacaagtacagacctgaggaggtggacattgatgccaagctgagccggctgtgtgagcaggacaaggtggtgcacgccctggaggagaagctgcagcagctgcacaaggagaagtacaccctggagcaggccctgctgagcgccagccaggagattgagatgcatgctgacaacccagctgccatccagacagtggtgctgcagagagatgacctgcagaatggcctgctgagcacctgccgggagctgagccgggccacagctgagctggagcgggcctggagagaatatgacaagctggagtatgatgtgacagtgaccaggaaccagatgcaggagcagctggaccacctgggggaggtgcagacagagagcgctggcatccagagggcccagatccagaaggagctgtggaggatccaggatgtgatggagggcctgagcaagcacaagcagcagaggggcaccacagagatcggcagccacttccctgtgggcgtggtgcccccccgggccaagagccccaccccagagagcagcaccatcgccagctatgtgaccctgaggaagaccaagaagatgatggacctgaggacagagcggcccaggtctgctgtggagcagctgtgcctggccgagagcacccggcccaggatgacagtggaggagcagatggagcgcatccgccgccaccagcaggcctgcctgcgggagaagaagaagggcctgaatgtgattggagccagtgaccagagccccctgcagagccccagcaacctgcgggacaaccccttccgcaccacccagaccaggagaagagatgacaaggagctggacacagccatcagagaaaatgatgtgaagccagaccacgagaccccagccacagaaattgtgcagctgaaggagacagagccccagaatgtggacttcagcaaggagctgaagaagacagagaacatctcctatgagatgctgtttgagcctgagcccaatggagtgaacagcgtggagatgatggacaaggagaggaacaaggacaagatgccagaagatgtgaccttcagcccccaggatgagacccagacagccaaccacaagccagaggagcaccctgaggagaacaccaagaacagcgtggatgagcaggaggagaccgtcatctcctatgagagcaccccagaggtgtcccggggcaaccagaccatggctgtgaagagcctgagccccagccctgagagcagcgccagccctgtgcccagcacccagccccagctgacagagggcagccacttcatgtgtgtgtag

SEQ ID NO: 200960 - DNA, 963 bp, Artificial Sequence
  derived and/or modified sequence
atggctgctgacctgaacctggagtggatcagcctgcccaggtcctggacctacggcatcacccggggcggccgggtcttcttcatcaatgaggaggccaagagcaccacctggctgcaccctgtgactggagaggccgtggtgacaggccaccggcggcagagcacagacctgcccaccggctgggaggaggcctacacctttgagggcgcccgctactacatcaaccacaatgaaaggaaggtgacctgcaagcaccctgtgacaggccagcccagccaggacaactgcatctttgtggtgaatgagcagacagtggccaccatgaccagcgaggagaagaaggagcggcccatctccatgatcaatgaggccagcaactacaacgtgaccagtgactatgctgtgcaccccatgagccctgtgggccgcaccagccgggccagcaagaaggtgcacaactttgggaagaggagcaacagcatcaagaggaaccccaatgcccctgtggtgcggcggggctggctgtacaagcaggacagcacaggcatgaagctgtggaagaagcgctggtttgtgctgagtgacctgtgcctcttctactacagagatgagaaggaggagggcatcctgggcagcatcctgctgcccagcttccagatcgccctgctgaccagcgaggaccacatcaacagaaaatatgccttcaaggccgcccaccccaacatgaggacctactacttctgcacagacaccgggaaggagatggagctgtggatgaaggccatgctggatgctgccctggtgcagacagagcctgtgaagagggtggacaagatcaccagtgaaaatgcccccaccaaggagaccaacaacatccccaaccaccgggtgctgatcaagccagagatccagaacaaccagaagaacaaggagaagaagaagaagaagaagaagaagtag

SEQ ID NO: 200961 - DNA, 1194 bp, Artificial Sequence
  derived and/or modified sequence
tacaccctggagcaggccctgctgagcgccagccaggagattgagatgcacgccgacaacccagctgccatccagacagtggtgctgcagagagatgacctgcagaatggcctgctgagcacctgccgggagctgagccgggccacagctgagctggagcgggcctggagagaatatgacaagctggagtatgatgtgacagtgaccaggaaccagatgcaggagcagctggaccacctgggggaggtgcagacagaatctgctggcatccagagggcccagatccagaaggagctgtggaggatccaggatgtgatggagggcctgagcaagcacaagcagcagaggggcaccacagaaattggcagccacttccctgtgggcgtggtgcccccccgggccaagagccccaccccagagagcagcaccatcgccagctatgtgaccctgaggaagaccaagaagatgatggacctgaggacagagcggcccaggtctgctgtggagcagctgtgcctggccgagagcacccggcccaggatgacagtggaggagcagatggagcgcatcagaagacaccagcaggcctgcctgcgggagaagaagaagggcctgaatgtcatcggggccagtgaccagagccccctgcagagccccagcaacctgcgggacaaccccttccgcaccacccagaccaggagaagagatgacaaggagctggacacagccatccgggagaatgatgtgaagccagaccacgagaccccagccacagagatcgtgcagctgaaggagacagagccccagaatgtggacttcagcaaggagctgaagaagacagagaacatctcctatgagatgctgtttgagcctgagcccaacggggtgaacagcgtggagatgatggacaaggagaggaacaaggacaagatgccagaagatgtgaccttcagcccccaggatgagacccagacagccaaccacaagccagaggagcaccctgaggagaacaccaagaacagcgtggatgagcaggaggagaccgtcatctcctatgagagcaccccagaggtgtcccggggcaaccagaccatggctgtgaagagcctgagccccagccctgagagcagcgccagccctgtgcccagcacccagccccagctgacagagggcagccacttcatgtgtgtgtag

SEQ ID NO: 200962 - DNA, 2625 bp, Artificial Sequence
  derived and/or modified sequence
atgaggacctactacttctgcacagacaccgggaaggagatggagctgtggatgaaggccatgctggatgctgccctggtgcagacagagcctgtgaagagggtggacaagatcaccagtgaaaatgcccccaccaaggagaccaacaacatccccaaccaccgggtgctgatcaagccagagatccagaacaaccagaagaacaaggagatgagcaagattgaggagaagaaggccctggaggccgagaagtatggcttccagaaggatggccaggaccggcccctgaccaagatcaacagcgtgaagctgaacagcctgcccagtgaatatgaaagtggcagcgcctgcccagcccagacagtgcactaccggcccatcaacctgagcagcagcgagaacaagatcgtgaatgtgtccctggccgacctgcggggcggcaaccggcccaacacaggccccctgtacacagaagctgacagagtcatccagaggaccaacagcatgcagcagctggagcagtggatcaagatccagaagggccggggccacgaggaggagacccggggcgtcatctcctaccagaccctgcccaggaacatgcccagccaccgggcccagatcatggcccgctacccagagggctaccgcaccctgcccaggaacagcaagaccaggcctgagagcatctgcagcgtgacccccagcacccatgacaagaccctgggccctggagctgaggagaagaggaggtccatgagagatgacaccatgtggcagctgtatgagtggcagcagaggcagttctacaacaagcagagcaccctgcccaggcacagcaccctgagcagccccaagaccatggtgaacatcagtgaccagaccatgcacagcatccccaccagccccagccacggcagcattgctgcctaccagggctacagcccccagaggacctacagaagtgaggtgagcagccccatccagagaggagatgtgaccatcgacagaagacaccgggcccaccaccccaagcacgtgtatgtgcctgaccggcgctctgtgcctgctggcctgaccctgcagagcgtgagcccccagagcctgcagggcaagaccctgagccaggatgagggccggggcaccctgtacaagtacagacctgaggaggtggacattgatgccaagctgagccggctgtgtgagcaggacaaggtggtgcacgccctggaggagaagctgcagcagctgcacaaggagaagtacaccctggagcaggccctgctgagcgccagccaggagattgagatgcatgctgacaacccagctgccatccagacagtggtgctgcagagagatgacctgcagaatggcctgctgagcacctgccgggagctgagccgggccacagctgagctggagcgggcctggagagaatatgacaagctggagtatgatgtgacagtgaccaggaaccagatgcaggagcagctggaccacctgggggaggtgcagacagagagcgctggcatccagagggcccagatccagaaggagctgtggaggatccaggatgtgatggagggcctgagcaagcacaagcagcagaggggcaccacagagatcggcatgattggcagcaagcccttcagcacagtgaagtacaagaatgaaggaccagactaccgcctgtacaagtctgagcctgagctgaccaccgtggccgaggtggatgagagcaatggagaggagaagtctgagcctgtgtctgaaattgagacctctgtggtgaagggcagccacttccctgtgggcgtggtgcccccccgggccaagagccccaccccagagagcagcaccatcgccagctatgtgaccctgaggaagaccaagaagatgatggacctgaggacagagcggcccaggtctgctgtggagcagctgtgcctggccgagagcacccggcccaggatgacagtggaggagcagatggagcgcatccgccgccaccagcaggcctgcctgcgggagaagaagaagggcctgaatgtgattggagccagtgaccagagccccctgcagagccccagcaacctgcgggacaaccccttccgcaccacccagaccaggagaagagatgacaaggagctggacacagccatcagagaaaatgatgtgaagccagaccacgagaccccagccacagaaattgtgcagctgaaggagacagagccccagaatgtggacttcagcaaggagctgaagaagacagagaacatctcctatgagatgctgtttgagcctgagcccaatggagtgaacagcgtggagatgatggacaaggagaggaacaaggacaagatgccagaagatgtgaccttcagcccccaggatgagacccagacagccaaccacaagccagaggagcaccctgaggagaacaccaagaacagcgtggatgagcaggaggagaccgtcatctcctatgagagcaccccagaggtgtcccggggcaaccagaccatggctgtgaagagcctgagccccagccctgagagcagcgccagccctgtgcccagcacccagccccagctgacagagggcagccacttcatgtgtgtgtag

SEQ ID NO: 200963 - DNA, 3351 bp, Artificial Sequence
  derived and/or modified sequence
atggccgccgacctgaacctggagtggatcagcctgccccggagctggacctatgggatcactagggggggacgggtattcttcattaatgaggaggccaagagcactacttggctccaccctgttactggcgaggctgtcgttacgggccatcggcgacagagcaccgatctcccaacaggttgggaagaggcgtacacgtttgagggcgcacggtattatattaatcacaatgaaaggaaggtgacctgcaaacatcctgtgaccgggcagccatcccaggataactgcatttttgtggttaatgaacagacagtggctaccatgacatctgaggagaaaaaagagaggcctatctctatgattaacgaggccagcaattataatgtcaccagcgactacgcggtgcatcctatgtcgcctgtcgggcgcacgtctagggcatcgaagaaggtgcataatttcgggaagcgcagtaacagcatcaaacgcaacccaaacgcacctgtagttcgccggggttggctttacaagcaggacagcaccggcatgaaactctggaagaaaaggtggttcgtgctgtccgatctctgccttttctactaccgcgacgagaaggaggagggaattctcggaagcattctgctcccctcatttcagatcgcccttctgacgtcagaggatcatataaaccggaaatacgccttcaaggccgcccatccaaacatgcgcacgtattacttctgtactgatacagggaaagagatggagctgtggatgaaagctatgctcgatgcagccctggtacagaccgaaccggttaagagagtcgacaagataaccagcgaaaacgctcctacaaaggagacgaacaatatacctaaccacagggttttaatcaaacccgagattcagaacaaccagaaaaataaagaaatgtcaaaaatagaagaaaaaaaagccttagaagccgaaaaatatggtttccaaaaggacggtcaggacaggcccctcacaaaaataaacagcgtgaagctgaatagcctgccaagcgaatacgagtcgggttctgcttgccctgcacaaaccgtgcactataggcctatcaacctcagctcaagtgaaaataaaattgtgaacgtgagtctggcagatctcaggggtggtaatcgtccaaacactggccccctttatacggaagcagacagggttatccagagaactaacagtatgcaacagcttgagcagtggatcaagatccagaaggggcgcgggcatgaagaagagacgcgcggtgtcatatcttaccaaaccctgccccggaacatgccatcccacagggcacagattatggcccgttatcccgaaggttatcgtacgcttccacggaattcgaaaacacgtcccgaatctatctgctcggtaacgcctagcactcatgacaagacactcggacctggggccgaggaaaagagaagaagcatgagggacgatactatgtggcagctgtacgagtggcaacagcggcagttctataataaacaaagcaccctcccccggcactctaccctgtcctccccgaagaccatggtgaacatcagcgatcagactatgcactctatccctacctccccctctcacggaagcatcgctgcttatcagggttattccccccagaggacgtaccgctccgaggtgagcagccccatccaaaggggcgatgtcacaatcgaccgtaggcatagggcccaccacccaaagcatgtatatgtgccagatagaaggtctgtgcccgccgggctgactttacagagcgtttcacctcagagcttgcagggcaagacattatctcaggatgagggtaggggaacactttacaaatatagacctgaggaggtggacatagacgcaaagctgtcccgattatgcgagcaggacaaggttgttcacgccctggaggaaaaactgcagcaactgcacaaggagaagtataccttggaacaggcactcctgtctgcgtcccaggagatagaaatgcacgcggacaaccccgcggctattcaaaccgtagtgttacagcgcgacgacctacagaacggtctcctgagtacgtgccgcgagctgtctagggctaccgctgaactagagcgggcctggcgggaatacgataagctcgagtatgacgtaacagtgaccagaaaccagatgcaagagcagctcgatcatctgggagaagtgcagacggaatccgctgggattcagagagcccaaattcagaaggagctttggcggatacaggacgtgatggagggtttatctaaacacaagcagcagagaggcaccactgaaattggaatgatcggttccaagccgttttccactgtaaagtacaaaaacgaggggcccgactacaggctttataaatccgagcccgagctgacaacagtggcagaagtcgatgagagtaatggcgaggaaaagagtgaacccgtgagcgaaattgagacctctgttgtgaaaggatcccatttcccagtgggcgttgtacctccaagggccaaaagtcctacccctgagtcttccacaattgcttcctacgttaccttgaggaagactaagaagatgatggatctgaggacagaaaggccgcggtcagcagttgaacagctgtgcctggctgagtccaccagacctaggatgactgtggaagagcagatggaacgcattcgacgacaccagcaggcctgtctgcgtgaaaagaagaagggacttaacgtaattggcgccagcgaccaatcacctctccagtcccctagcaatttgagagacaacccatttagaacaacacagacaaggcgccgcgacgacaaggaactggacactgcaattcgtgagaacgatgttaagcctgaccacgaaacacctgctacggagattgtgcagctcaaagagactgagccacagaacgtggatttttctaaggagttgaagaaaacagagaacatcagctatgagatgctgttcgaaccagagcccaatggagtcaatagcgtcgagatgatggacaaggagcggaacaaggataaaatgccagaagatgtgaccttctctccgcaagacgaaacacaaaccgctaatcacaagccagaagagcacccagaggagaatactaaaaactctgtggacgagcaggaagagacagtgatctcatacgagtctactcctgaagtttctcgcggaaaccaaaccatggccgtcaagtccctctctccatcgccggagagtagcgcatcccctgtgccttcaacgcaaccccagcttaccgaagggtcccatttcatgtgtgtttag

SEQ ID NO: 200964 - DNA, 1953 bp, Artificial Sequence
  derived and/or modified sequence
atggccgccgacctgaacctggagtggatcagcctgccccggagctggacgtacggcatcactagaggcggtagggtttttttcattaacgaggaagccaaatctaccacatggttacatcctgtcacaggagaggcggtggtcactggccaccggagacagtccactgatttgccgacgggatgggaggaggcttatacctttgagggcgctcgctattacattaaccataacgagcggaaggtcacctgcaaacatcctgtgactgggcagccgagccaggacaattgcatttttgtggtgaatgaacagaccgtagcaacaatgacctctgaagagaaaaaggaacgacctatttcaatgatcaacgaagcctccaattacaatgtaacatcagattatgcagtgcatcccatgtcacccgtaggtcggacctcgcgcgcatcaaaaaaagtccacaatttcggcaagagatcaaatagcattaaacgcaatccaaatgcacctgtggtgcgccgaggctggttgtataaacaggactctacaggcatgaagctatggaagaagcggtggttcgtgctatccgacctttgcttattttactaccgagacgagaaggaagaaggaattcttggatccatcctgctgccctccttccaaattgcactcctgacaagtgaagaccacatcaatcgcaagtatgcatttaaggccgctcatcccaacatgagaacctactacttttgcaccgatacaggaaaggaaatggaactctggatgaaggccatgttagatgccgcgctcgtccagacggagcccgtgaagcgtgtggacaagattacaagcgagaacgctcccacgaaggaaaccaataacataccgaaccatcgcgtgctaatcaagccagaaattcagaacaatcaaaagaataaggaaatgtcaaaaatcgaagagaagaaggctctcgaggcagagaaatacgggttccagaaagatgggcaggatagacccctgaccaagatcaatagcgtgaaactgaacagcctgccctctgaatacgagagcgggtcagcatgtccagcgcagacagtgcattaccgccctatcaatcttagtagtagtgaaaacaagatagtaaacgtttccctggccgatctccgcggaggtaataggcccaacaccgggcccctgtataccgaagcagaccgggtaattcagcgcaccaattcaatgcagcagcttgagcagtggataaaaatccagaaagggcgcggccatgaggaggagaccagaggggtgatctcctatcagacccttccccggaacatgccgagtcaccgcgcccaaattatggccagatatcctgagggataccgaacgttaccccggaattccaagactcggcccgagtcaatctgctccgtgaccccaagtacccatgataagactctaggcccgggcgccgaggaaaaacgccggtccatgagggacgatacgatgtggcagctgtacgaatggcaacagcggcagttctataacaagcagtctacactcccccgtcactctacactgtcgagtcctaagaccatggtgaacatatctgatcagaccatgcactcgatacccacttcaccatcccacggatccatagcagcataccaggggtatagcccccagcgcacttaccgcagtgaagtgtcttcacctattcaaaggggggatgtcacaattgatcgccggcatagagcccaccatcccaagcacgtgtatgtgcccgaccgaagatcggttcccgccggccttactctgcagtcggtttctccccagagcctgcagggtaagacgtggggacgagaaaaagttgcaacagccaccggggccgctgaagcagtggcatccgatacccacctgcccagaactggatcgtcaagccccagtcttctgtgtgtctag

SEQ ID NO: 200965 - DNA, 3183 bp, Artificial Sequence
  derived and/or modified sequence
atggccgccgacctgaacctggagtggatcagcctgccccggagctggacctacggaatcaccagggggggaagggtctttttcattaacgaagaggctaaatcaacaacatggctccatcctgtcactggcgaggcggtggtcactggacatcgcaggcagagcaccgacctgccaaccgggtgggaagaagcttacacttttgaaggcgccagatactatataaaccataacgagagaaaggtgacatgcaaacaccccgttacaggccagcccagccaggacaactgcatatttgtcgtgaatgaacagacagtagctaccatgacaagcgaggaaaagaaggagagacctatctctatgattaatgaagccagcaactataatgtcacgagcgattacgctgtgcacccaatgtcaccagtgggccggacgtcaagagcctcaaagaaagtacacaacttcggtaaacgatctaactcaatcaagaggaaccccaacgcccctgtagtccgacgaggatggctgtacaaacaggactcaacgggcatgaaactgtggaagaagcgctggttcgtgctttcggatctgtgtctgttttactaccgcgatgaaaaagaggaaggtatccttggctccattctcttgccgtctttccagatcgccttgttaacttcagaagaccacatcaaccgcaagtatgccttcaaagctgcacacccgaatatgagaacctactacttttgcactgatactggaaaggagatggagctgtggatgaaggctatgctagatgccgctctggttcagactgagcccgtaaagcgggtcgacaagatcacctctgaaaacgcccccactaaagagactaacaacattccaaatcaccgtgtgctgattaaacctgaaattcaaaataatcagaaaaataaagagatgtcaaagattgaggaaaaaaaagccctcgaagccgaaaagtacgggttccagaaggatgggcaggacagacctttaacaaaaatcaatagtgtgaagctaaatagcctgccatcggaatatgagtctggatccgcctgtccagcacagaccgttcactatcgccctattaacctatcgagtagtgagaacaagatagtgaacgtatcacttgctgatttacgggggggcaatcgtcctaatacaggccccttatacaccgaggctgacagggtcattcaaagaaccaacagtatgcagcagctggagcagtggatcaaaatacagaaaggcagggggcacgaggaagaaactcgcggggtgatcagctatcagacgctccctcgaaatatgccctcacaccgggcacaaataatggctcgttaccccgagggatatcggactctcccacgcaattctaagacacggcccgaaagtatctgtagcgtgacccctagcacgcatgacaagaccctgggcccaggggctgaagagaaacggcgatcaatgcgagatgataccatgtggcagctctacgagtggcagcagaggcagttttataataagcagtcaactttacccaggcactctaccctcagttcccccaaaaccatggtaaacatttccgatcagaccatgcactcaattcccaccagcccatctcacggctccatcgctgcttaccagggatattccccccagagaacctaccgaagtgaagtttcctctcctattcagagaggagacgttactatagacagaagacatcgggcccaccatcccaagcacgtgtacgtgcccgacagaaggtccgtcccggccggcctgaccttacaatccgtgagcccgcaaagcctgcaaggcaaaacattgtcccaggacgaaggacgcggcaccctatacaaataccgcccggaggaggtggacatagatgcaaaactctcacgcctgtgtgaacaggacaaagttgtgcatgcactggaggagaaattacaacaactgcataaagaaaaatacacacttgagcaggctctgctgagtgcttcgcaggagatcgaaatgcacgcagataatccagcagccatccagaccgtcgtacttcagagggatgacttgcagaacggcctgctctctacatgccgggagctctcccgcgcgaccgctgaactcgaaagagcctggcgcgaatacgacaaattggaatatgatgtaacagttactcgcaatcaaatgcaggaacagctggaccatctgggcgaggtacagacagaatcagccggaattcagagggcacaaattcagaaggaactgtggaggatccaagacgtgatggaagggcttagtaagcacaagcagcagcggggaactaccgagattggctcccactttccagtcggagtggtgccccctagggcaaagagtccaactcccgagagcagcaccattgcaagctacgtaaccctaagaaaaacgaagaaaatgatggacctgagaaccgaacgtccgaggtccgctgtggagcagttgtgtctggcagaatctactcgtcctaggatgacggtagaggagcagatggagcgaattcgtagacaccagcaagcttgtctccgtgagaaaaagaaagggctgaacgtgatcggagcatcagaccagtcccctctccagtcaccaagcaatctccgcgacaaccctttccggactacccagacccgccggcgggacgataaagagctggacaccgccattagggagaatgatgtgaaaccagaccacgaaacccctgcaaccgagattgtacaactgaaggagacagaacctcagaatgtcgatttttccaaagagcttaagaagaccgaaaacatttcatatgaaatgctcttcgagccagagccaaacggggtgaattccgtggaaatgatggacaaagagcgcaataaagacaagatgcctgaagatgtgactttttcgccccaggatgaaacacaaacagccaatcataaaccggaagaacatcctgaagaaaacactaaaaactcagtcgacgagcaagaggaaaccgtcatttcctatgaaagtacccctgaggtgtcccgcgggaaccaaaccatggcagtaaaatcactatcacccagtccagagagttcggcatcgccggtgccctctacccagccccagctgacagagggaagtcacttcatgtgtgtgtag

SEQ ID NO: 200966 - DNA, 963 bp, Artificial Sequence
  derived and/or modified sequence
atggccgccgacctgaacctggagtggatcagcctgccccggagctggacctacggcattacaagggggggacgtgttttttttattaacgaagaggccaagagcaccacctggttgcacccagtaactggggaggccgtagtaactggtcatcggaggcagtcaacggacttgcctactggatgggaggaagcctacacattcgagggagcccgatactacattaaccacaatgagagaaaagtcacatgcaaacaccccgtgactggccagcctagccaggacaattgcatcttcgtggtgaatgagcagaccgtcgcaacaatgacttccgaagaaaaaaaagagcgccccatttctatgatcaacgaagcctctaattacaacgtcaccagcgactatgcagttcatccaatgagtcccgtggggagaacctcaagagcgtctaagaaggtgcacaactttggcaaacgctctaactcaatcaagaggaaccccaatgcgcccgtcgtcaggcgcggctggctttataagcaggactccacagggatgaaactttggaaaaagcgttggttcgttctgtctgacctatgtctcttctactatcgagatgaaaaggaggaggggatactcggatctatcctgttgccatcatttcagatagccctactgacctcagaagaccatatcaaccgcaagtatgcctttaaggccgctcatcctaacatgcggacatattacttctgcaccgacactggcaaggaaatggagctctggatgaaagctatgttggatgcagctctggtgcaaaccgaacctgtcaagagggtcgacaaaataacgagcgaaaacgccccaaccaaagaaaccaacaacatacccaatcatagagtgctgatcaaacctgaaatccagaacaatcagaaaaacaaggagaaaaagaaaaaaaaaaagaaaaagtag

SEQ ID NO: 200967 - DNA, 1194 bp, Artificial Sequence
  derived and/or modified sequence
tacaccctggagcaggccctgctgagcgccagccaggagatcgagatgcacgccgataatcccgcagctattcagaccgtcgttcttcaaagggacgacctccagaacggcctactgagcacatgtcgagagctgtccagagctacagccgagctggagcgagcatggagagagtatgacaagttggaatacgatgttaccgtcaccaggaatcaaatgcaggagcagttggaccacctgggcgaggtgcaaacagagtcggcagggatccagcgcgcccagattcagaaggagctttggagaatccaggacgtgatggaaggcctaagtaaacataagcagcaaaggggtaccacagagattggctcccattttccggtcggagtagtacctcctcgcgcgaagagtcctactcctgagtcctcaaccattgcatcatacgtgactctgcggaagaccaagaaaatgatggatttgagaacggaaaggccacggtccgcagtggagcaactctgcctggcagagagcacgaggcctaggatgaccgtcgaggagcagatggagcggattcgccgccaccaacaggcctgtctccgcgagaaaaaaaaaggtttaaacgtgattggcgcaagtgatcagtcacctttacagagcccgagcaatctgcgcgacaatccttttcgtaccactcaaacccgtagaagagacgataaagagcttgacactgctatccgcgaaaacgatgtcaagcccgatcacgaaacacccgccacagaaattgtgcagcttaaggaaaccgaacctcagaatgtggatttctctaaggaactaaaaaagacagaaaacatctcctatgaaatgctttttgagccggagccgaacggtgtgaatagcgtggaaatgatggacaaagagagaaataaggataaaatgccggaggacgtcaccttcagcccccaggatgagacccagaccgcaaatcataaacctgaagaacatcccgaagagaataccaagaatagcgtggatgagcaggaagagacggtaatatcttacgaatcgactcccgaagtgagtcgcggaaaccagaccatggccgtgaaaagccttagcccctcacccgagagttccgcgagccccgtcccctcgacccagcctcagctcaccgagggcagccattttatgtgtgtgtag

SEQ ID NO: 200968 - DNA, 2625 bp, Artificial Sequence
  derived and/or modified sequence
atgcggacctactacttctgcaccgacaccggcaaggagatggagctctggatgaaggccatgctcgatgccgccctcgttcaaactgagccagtcaaaagggtggacaagataacgtctgagaacgcccccactaaagaaaccaataacatccctaaccaccgcgtactcatcaagccggagatccagaacaaccagaaaaataaggaaatgagcaagatagaagaaaaaaaagcccttgaagcagagaaatacggatttcagaaggacggccaggatcgtcccctgactaagatcaatagcgtgaaattgaattctttaccaagtgagtacgaatccggatcggcttgtccagcccaaacagtgcactatcggccaatcaacttgagcagctccgaaaacaagatcgtaaacgtgtccctagctgatctgagaggaggcaaccggcctaacactgggcccctttacaccgaagcggaccgagtgattcagagaacaaactctatgcagcagttggagcagtggattaaaatccagaagggccgtggccacgaggaggaaaccagaggcgtaatctcataccagaccttgccccggaacatgcctagtcatcgggctcagattatggcgcggtatccagagggctacagaaccctgccccgcaactcaaaaacccgaccagagagtatatgcagcgtgacacccagtacacacgacaaaaccctggggcccggggccgaggagaaacgtagatccatgagggacgatactatgtggcaattatacgaatggcagcaacggcagttctacaataagcaaagtactctgcctcggcacagcactttgtcaagccctaagacaatggtcaatatctccgatcagactatgcactcaattccaacatctccatctcatgggtcaattgccgcctaccagggatattctccccagcggacctacaggagtgaggtcagctccccaattcagagaggggatgtgacaattgatcgaaggcatcgcgcccatcaccccaagcacgtgtacgtcccggatcgacgctccgttccagccgggttaaccctccaatctgtgtcacctcagtctctccagggcaaaactctcagccaagacgaggggagaggtacactctataagtataggcctgaggaagtagatattgatgctaaactttctcggttatgcgagcaggataaggtggtgcacgccctggaagagaaactacagcagctgcataaggagaagtacactctcgagcaagctctactatctgcgtcacaggaaatcgaaatgcacgccgataatcccgccgcaattcagacagttgtgcttcagcgtgacgatctgcagaacggcctactgagcacatgccgcgagctgagccgggccacagctgagcttgaacgggcctggagggaatatgacaagttggagtacgacgtgactgttacgagaaatcagatgcaagagcagctcgaccatcttggagaagttcagaccgaatccgctggtattcagagagctcaaatccagaaggaactgtggcgcattcaagatgtgatggagggactcagcaaacacaaacagcaaaggggcacgaccgagattggaatgattggcagcaagccttttagtacagtaaagtacaaaaacgagggccccgattaccgcctgtacaagtcagagcctgaactcacaacggtcgctgaggtggacgagtcgaacggggaggagaaatcagaacccgtgtccgaaatagagaccagcgtggtgaaaggatcccatttccctgtgggggttgtcccgccaagggccaagagccccacaccagaatcaagtacaattgcttcatatgtcacactgaggaaaacaaagaagatgatggatcttagaaccgagcggcctcggtctgcagtggagcagctgtgtctggcagaaagcacccgccccaggatgaccgtggaggagcagatggagaggataagacggcatcagcaggcatgtttgcgcgaaaagaagaaaggactgaacgtgatcggagcttccgatcaaagtccattgcaaagtccaagtaatctccgcgataatccttttcggaccacgcaaactaggcgccgggatgacaaggaactggacacggcaattagggagaatgatgtgaagccagatcatgagacccctgcaacagaaatagtgcagctgaaagaaaccgagcctcagaacgtggactttagcaaggaactgaagaaaacagagaatatctcatatgagatgcttttcgaacctgaacctaacggcgttaactcagtcgaaatgatggataaggagcgcaacaaggataagatgccagaggacgtaacattcagcccgcaggatgagacacagaccgccaaccacaaacccgaggaacaccccgaggagaacacgaaaaacagtgttgatgagcaagaggagactgtgatctcctacgagtcaactccagaggtttctcgtgggaatcaaaccatggccgtgaagagtctgtccccctctcccgagtcctctgcctcacctgtgccatcaacgcagccacaattgactgaaggctcgcattttatgtgtgtatag

SEQ ID NO: 200969 - DNA, 4238 bp, Artificial Sequence
  derived and/or modified sequence
tcagacatggcggcggatctgaacctggagtggatctccctgccccggtcctggacttacgggatcaccaggggcggccgagtcttcttcatcaacgaggaggccaagagcaccacctggctgcaccccgtcaccggcgaggcggtggtcaccggacaccggcggcagagcacagatttgcctactggctgggaagaagcatatacttttgaaggtgcaagatactatataaaccataatgaaaggaaagtgacctgcaaacatccagtcacaggacaaccatcacaggacaattgtatttttgtagtgaatgaacagactgttgcaaccatgacatctgaagaaaagaaggaacggccaataagtatgataaatgaagcttctaactataacgtgacttcagattatgcagtgcatccaatgagccctgtaggcagaacttcacgagcttcaaaaaaagttcataattttggaaagaggtcaaattcaattaaaaggaatcctaatgcaccggttgtcagacgaggttggctttataaacaggacagtactggcatgaaattgtggaagaaacgctggtttgtgctttctgacctttgcctcttttattatagagatgagaaagaagagggtatcctgggaagcatactgttacctagttttcagatagctttgcttacctctgaagatcacattaatcgcaaatatgcttttaaggcagcccatccaaacatgcggacctattatttctgcactgatacaggaaaggaaatggagttgtggatgaaagccatgttagatgctgccctagtacagacagaacctgtgaaaagagtggacaagattacatctgaaaatgcaccaactaaagaaaccaataacattcccaaccatagagtgctaattaaaccagagatccaaaacaatcaaaaaaacaaggaaatgagcaaaattgaagaaaaaaaggcattagaagctgaaaaatatggatttcagaaggatggtcaagatagacccttaacaaaaattaatagtgtaaagctgaattctctgccatctgaatatgagagtgggtcagcatgccctgctcagactgtgcactacagaccaatcaacttgagcagttcagagaacaaaatagtcaatgttagcctggcagatcttagaggtggaaatcgccccaatacagggcccttatacacagaggccgatcgagtcatacagagaacaaattcaatgcagcagttggaacagtggattaaaatccagaaggggaggggtcatgaagaagaaaccaggggagtaatttcttaccaaacattaccaagaaatatgccaagtcacagagcccagattatggcccgctaccctgaaggttatagaacactcccaagaaacagcaagacaaggcctgaaagtatctgcagtgtaaccccttccactcatgacaagacattaggacccggagcggaggagaaacggaggtccatgagagatgacacaatgtggcagctctacgaatggcagcagcgtcagttttataacaaacagagcaccctccctcgacacagtactttgagtagtcccaaaaccatggtaaatatttctgaccagacaatgcactctattcccacatcaccttcccacgggtcaatagctgcttatcagggatactcccctcaacgaacttacagatcggaagtgtcttcaccaattcagagaggagatgtgacaatagaccgcagacacagggcccatcaccctaagcatgtctatgtgcctgacagaaggtcagtgccagctggcctgactttacagtctgttagtccccagagcctccaagggaaaacgctgtcacaagatgaaggtagaggcacattatacaaatacagacctgaagaagtagatattgatgccaagttaagccgattatgtgaacaagataaagtggtgcatgctctggaagagaaacttcagcaactccacaaggagaaatacacgcttgagcaagctttgctatcagccagccaagagatagaaatgcatgcagataacccagcagccattcagacagtggtgttacaaagggatgatttacaaaatggactgcttagtacgtgtcgagaactttctcgagccactgccgaattggaacgagcatggagagaatatgataagttagaatacgatgtaactgttaccaggaaccagatgcaagagcagctggatcaccttggtgaagttcagacggaatcagcaggaattcagcgtgcacagattcagaaagaactttggcgaattcaggatgtcatggaagggctgagtaaacataagcagcaaagaggtactacagaaataggtatgataggatcaaagcctttctcaacagttaagtacaaaaatgagggtccagattatagactctacaagagtgaaccagagttaacaacagtggcagaagttgatgaatctaatggagaagaaaaatcagaacctgtttcagagatagaaacttcagttgttaaaggttcccactttcctgttggagtagtccctccaagagcaaaatcaccaacacccgaatcttcgacaatagcttcctatgtaaccttgaggaaaactaagaagatgatggatctaagaacggaaagaccaagaagtgcagtggaacagctctgtttggctgaaagtactcgaccaaggatgactgtggaagagcaaatggaaagaataagaagacatcaacaagcgtgcctgagggagaagaaaaaagggttaaatgttatcggtgcttcagaccagtcacccttacaaagcccttcaaatttaagggataatccatttaggactactcagactcgaaggagggatgataaggaactggacactgccattagagaaaatgatgtaaagccagaccatgaaactcctgcaacagaaattgttcaactaaaagaaaccgaaccccaaaatgtggacttcagcaaagagttaaaaaaaactgaaaacatttcatatgaaatgctttttgaacctgagccaaatggagtaaattctgtggaaatgatggataaagaaagaaacaaagacaaaatgcctgaggatgttacattcagccctcaagatgaaacacagaccgcaaatcataaaccagaagagcatcctgaagaaaatacaaagaacagtgttgacgaacaggaagaaactgttatttcttacgaatcaactcctgaggtttctagaggaaatcaaacaatggcagtgaaaagtctgtccccatctcctgagtcctcggcatcgccagttccatccactcagccgcagctcacagaaggatcacatttcatgtgtgtgtagtcttagaagaactatactgacttctgttgaaaccattcaaagctaaagacatggaccttcagcagtgtaagaagatattgtacagtatattttaaatctatgaaattcatagttctgatgcttttggtcacagagcatcattttatcacttctggaaaatgtttattccaaaacagctttaatggcccatatgtacacttcgtaatctcaaggttattattctgacaccagcttgctgctatgatttcagagcacataagtaaaggtgctttttaatgtgcagtctatttccagagcttacttagttgctgatttccagatttcgatgtttcttaagtctaggtgaatttatatatatatttttttgcttttcattttctaaagttagttattatttccattgaagcttgttttcttttttttcttcccattttagctactgcagtgcttttgtttcacacttgatttgtaaaaattttatatatatgtatttaaaatgtgccattttattgctaagtgaagtatgtcctgttttctgctataattctttctcggtcagattgcaatgtcagcagttactgccacactcctgtcagcttaaacacaaatgttactgcttatcttttcttaaaaaaaaaaaaaacaaagtgtaggtattttgaagtactgggcttatatttcattggaatacatgtgtacagcaataagcaggtttccaaatccggtacttagtttgtgtacaaatgtaattatgttcattgtgtatatattatacaatgagcacatgtaatgtattaaaggctacttactattgtttaaatgcaaatgttcatatctcatttctttttttatcatgttaaataaatgttgatgttcttaaa

SEQ ID NO: 200970 - DNA, 2039 bp, Artificial Sequence
  derived and/or modified sequence
gcgctcccttcgctcgctcgttccctcctccctcggcagccgcggcggcagcaggagaaggcggcggcggcggctagggatcagacatggcggcggatctgaacctggagtggatctccctgccccggtcctggacttacgggatcaccaggggcggccgagtcttcttcatcaacgaggaggccaagagcaccacctggctgcaccccgtcaccggcgaggcggtggtcaccggacaccggcggcagagcacagatttgcctactggctgggaagaagcatatacttttgaaggtgcaagatactatataaaccataatgaaaggaaagtgacctgcaaacatccagtcacaggacaaccatcacaggacaattgtatttttgtagtgaatgaacagactgttgcaaccatgacatctgaagaaaagaaggaacggccaataagtatgataaatgaagcttctaactataacgtgacttcagattatgcagtgcatccaatgagccctgtaggcagaacttcacgagcttcaaaaaaagttcataattttggaaagaggtcaaattcaattaaaaggaatcctaatgcaccggttgtcagacgaggttggctttataaacaggacagtactggcatgaaattgtggaagaaacgctggtttgtgctttctgacctttgcctcttttattatagagatgagaaagaagagggtatcctgggaagcatactgttacctagttttcagatagctttgcttacctctgaagatcacattaatcgcaaatatgcttttaaggcagcccatccaaacatgcggacctattatttctgcactgatacaggaaaggaaatggagttgtggatgaaagccatgttagatgctgccctagtacagacagaacctgtgaaaagagtggacaagattacatctgaaaatgcaccaactaaagaaaccaataacattcccaaccatagagtgctaattaaaccagagatccaaaacaatcaaaaaaacaaggaaatgagcaaaattgaagaaaaaaaggcattagaagctgaaaaatatggatttcagaaggatggtcaagatagacccttaacaaaaattaatagtgtaaagctgaattctctgccatctgaatatgagagtgggtcagcatgccctgctcagactgtgcactacagaccaatcaacttgagcagttcagagaacaaaatagtcaatgttagcctggcagatcttagaggtggaaatcgccccaatacagggcccttatacacagaggccgatcgagtcatacagagaacaaattcaatgcagcagttggaacagtggattaaaatccagaaggggaggggtcatgaagaagaaaccaggggagtaatttcttaccaaacattaccaagaaatatgccaagtcacagagcccagattatggcccgctaccctgaaggttatagaacactcccaagaaacagcaagacaaggcctgaaagtatctgcagtgtaaccccttccactcatgacaagacattaggacccggagcggaggagaaacggaggtccatgagagatgacacaatgtggcagctctacgaatggcagcagcgtcagttttataacaaacagagcaccctccctcgacacagtactttgagtagtcccaaaaccatggtaaatatttctgaccagacaatgcactctattcccacatcaccttcccacgggtcaatagctgcttatcagggatactcccctcaacgaacttacagatcggaagtgtcttcaccaattcagagaggagatgtgacaatagaccgcagacacagggcccatcaccctaagcatgtctatgtgcctgacagaaggtcagtgccagctggcctgactttacagtctgttagtccccagagcctccaagggaaaacgtggggtagagaaaaggtggcgacggcgactggagcagcagaggctgtagcatcggatacccacctcccacgaaccggttcctcttccccctccttgctgtgtgtttga

SEQ ID NO: 200971 - DNA, 4147 bp, Artificial Sequence
  derived and/or modified sequence
gcgctcccttcgctcgctcgttccctcctccctcggcagccgcggcggcagcaggagaaggcggcggcggcggctagggatcagacatggcggcggatctgaacctggagtggatctccctgccccggtcctggacttacgggatcaccaggggcggccgagtcttcttcatcaacgaggaggccaagagcaccacctggctgcaccccgtcaccggcgaggcggtggtcaccggacaccggcggcagagcacagatttgcctactggctgggaagaagcatatacttttgaaggtgcaagatactatataaaccataatgaaaggaaagtgacctgcaaacatccagtcacaggacaaccatcacaggacaattgtatttttgtagtgaatgaacagactgttgcaaccatgacatctgaagaaaagaaggaacggccaataagtatgataaatgaagcttctaactataacgtgacttcagattatgcagtgcatccaatgagccctgtaggcagaacttcacgagcttcaaaaaaagttcataattttggaaagaggtcaaattcaattaaaaggaatcctaatgcaccggttgtcagacgaggttggctttataaacaggacagtactggcatgaaattgtggaagaaacgctggtttgtgctttctgacctttgcctcttttattatagagatgagaaagaagagggtatcctgggaagcatactgttacctagttttcagatagctttgcttacctctgaagatcacattaatcgcaaatatgcttttaaggcagcccatccaaacatgcggacctattatttctgcactgatacaggaaaggaaatggagttgtggatgaaagccatgttagatgctgccctagtacagacagaacctgtgaaaagagtggacaagattacatctgaaaatgcaccaactaaagaaaccaataacattcccaaccatagagtgctaattaaaccagagatccaaaacaatcaaaaaaacaaggaaatgagcaaaattgaagaaaaaaaggcattagaagctgaaaaatatggatttcagaaggatggtcaagatagacccttaacaaaaattaatagtgtaaagctgaattctctgccatctgaatatgagagtgggtcagcatgccctgctcagactgtgcactacagaccaatcaacttgagcagttcagagaacaaaatagtcaatgttagcctggcagatcttagaggtggaaatcgccccaatacagggcccttatacacagaggccgatcgagtcatacagagaacaaattcaatgcagcagttggaacagtggattaaaatccagaaggggaggggtcatgaagaagaaaccaggggagtaatttcttaccaaacattaccaagaaatatgccaagtcacagagcccagattatggcccgctaccctgaaggttatagaacactcccaagaaacagcaagacaaggcctgaaagtatctgcagtgtaaccccttccactcatgacaagacattaggacccggagcggaggagaaacggaggtccatgagagatgacacaatgtggcagctctacgaatggcagcagcgtcagttttataacaaacagagcaccctccctcgacacagtactttgagtagtcccaaaaccatggtaaatatttctgaccagacaatgcactctattcccacatcaccttcccacgggtcaatagctgcttatcagggatactcccctcaacgaacttacagatcggaagtgtcttcaccaattcagagaggagatgtgacaatagaccgcagacacagggcccatcaccctaagcatgtctatgtgcctgacagaaggtcagtgccagctggcctgactttacagtctgttagtccccagagcctccaagggaaaacgctgtcacaagatgaaggtagaggcacattatacaaatacagacctgaagaagtagatattgatgccaagttaagccgattatgtgaacaagataaagtggtgcatgctctggaagagaaacttcagcaactccacaaggagaaatacacgcttgagcaagctttgctatcagccagccaagagatagaaatgcatgcagataacccagcagccattcagacagtggtgttacaaagggatgatttacaaaatggactgcttagtacgtgtcgagaactttctcgagccactgccgaattggaacgagcatggagagaatatgataagttagaatacgatgtaactgttaccaggaaccagatgcaagagcagctggatcaccttggtgaagttcagacggaatcagcaggaattcagcgtgcacagattcagaaagaactttggcgaattcaggatgtcatggaagggctgagtaaacataagcagcaaagaggtactacagaaataggttcccactttcctgttggagtagtccctccaagagcaaaatcaccaacacccgaatcttcgacaatagcttcctatgtaaccttgaggaaaactaagaagatgatggatctaagaacggaaagaccaagaagtgcagtggaacagctctgtttggctgaaagtactcgaccaaggatgactgtggaagagcaaatggaaagaataagaagacatcaacaagcgtgcctgagggagaagaaaaaagggttaaatgttatcggtgcttcagaccagtcacccttacaaagcccttcaaatttaagggataatccatttaggactactcagactcgaaggagggatgataaggaactggacactgccattagagaaaatgatgtaaagccagaccatgaaactcctgcaacagaaattgttcaactaaaagaaaccgaaccccaaaatgtggacttcagcaaagagttaaaaaaaactgaaaacatttcatatgaaatgctttttgaacctgagccaaatggagtaaattctgtggaaatgatggataaagaaagaaacaaagacaaaatgcctgaggatgttacattcagccctcaagatgaaacacagaccgcaaatcataaaccagaagagcatcctgaagaaaatacaaagaacagtgttgacgaacaggaagaaactgttatttcttacgaatcaactcctgaggtttctagaggaaatcaaacaatggcagtgaaaagtctgtccccatctcctgagtcctcggcatcgccagttccatccactcagccgcagctcacagaaggatcacatttcatgtgtgtgtagtcttagaagaactatactgacttctgttgaaaccattcaaagctaaagacatggaccttcagcagtgtaagaagatattgtacagtatattttaaatctatgaaattcatagttctgatgcttttggtcacagagcatcattttatcacttctggaaaatgtttattccaaaacagctttaatggcccatatgtacacttcgtaatctcaaggttattattctgacaccagcttgctgctatgatttcagagcacataagtaaaggtgctttttaatgtgcagtctatttccagagcttacttagttgctgatttccagatttcgatgtttcttaagtctaggtgaatttatatatatatttttttgcttttcattttctaaagttagttattatttccattgaagcttgttttcttttttttcttcccattttagctactgcagtgcttttgtttcacacttgatttgtaaaaattttatatatatgtatttaaaatgtgccattttattgctaagtgaagtatgtcctgttttctgctataattctttctcggtcagattgcaatgtcagcagttactgccacactcctgtcagcttaaacacaaatgttactgcttatcttttcttaaaaaaaaaaaaaacaaagtgtaggtattttgaagtactgggcttatatttcattggaatacatgtgtacagcaataagcaggtttccaaatccggtacttagtttgtgtacaaatgtaattatgttcattgtgtatatattatacaatgagcacatgtaatgtattaaaggctacttactattgtttaaatgcaaatgttcatatctcatttctttttttatcatgttaaataaatgttgatgttctt

SEQ ID NO: 200972 - DNA, 1046 bp, Artificial Sequence
  derived and/or modified sequence
gcgctcccttcgctcgctcgttccctcctccctcggcagccgcggcggcagcaggagaaggcggcggcggcggctagggatcagacatggcggcggatctgaacctggagtggatctccctgccccggtcctggacttacgggatcaccaggggcggccgagtcttcttcatcaacgaggaggccaagagcaccacctggctgcaccccgtcaccggcgaggcggtggtcaccggacaccggcggcagagcacagatttgcctactggctgggaagaagcatatacttttgaaggtgcaagatactatataaaccataatgaaaggaaagtgacctgcaaacatccagtcacaggacaaccatcacaggacaattgtatttttgtagtgaatgaacagactgttgcaaccatgacatctgaagaaaagaaggaacggccaataagtatgataaatgaagcttctaactataacgtgacttcagattatgcagtgcatccaatgagccctgtaggcagaacttcacgagcttcaaaaaaagttcataattttggaaagaggtcaaattcaattaaaaggaatcctaatgcaccggttgtcagacgaggttggctttataaacaggacagtactggcatgaaattgtggaagaaacgctggtttgtgctttctgacctttgcctcttttattatagagatgagaaagaagagggtatcctgggaagcatactgttacctagttttcagatagctttgcttacctctgaagatcacattaatcgcaaatatgcttttaaggcagcccatccaaacatgcggacctattatttctgcactgatacaggaaaggaaatggagttgtggatgaaagccatgttagatgctgccctagtacagacagaacctgtgaaaagagtggacaagattacatctgaaaatgcaccaactaaagaaaccaataacattcccaaccatagagtgctaattaaaccagagatccaaaacaatcaaaaaaacaaggaaaaaaaaaaaaaaaaaaaaaagaaa

SEQ ID NO: 200973 - DNA, 2072 bp, Artificial Sequence
  derived and/or modified sequence
tacacgcttgagcaagctttgctatcagccagccaagagatagaaatgcatgcagataacccagcagccattcagacagtggtgttacaaagggatgatttacaaaatggactgcttagtacgtgtcgagaactttctcgagccactgccgaattggaacgagcatggagagaatatgataagttagaatacgatgtaactgttaccaggaaccagatgcaagagcagctggatcaccttggtgaagttcagacggaatcagcaggaattcagcgtgcacagattcagaaagaactttggcgaattcaggatgtcatggaagggctgagtaaacataagcagcaaagaggtactacagaaataggttcccactttcctgttggagtagtccctccaagagcaaaatcaccaacacccgaatcttcgacaatagcttcctatgtaaccttgaggaaaactaagaagatgatggatctaagaacggaaagaccaagaagtgcagtggaacagctctgtttggctgaaagtactcgaccaaggatgactgtggaagagcaaatggaaagaataagaagacatcaacaagcgtgcctgagggagaagaaaaaagggttaaatgttatcggtgcttcagaccagtcacccttacaaagcccttcaaatttaagggataatccatttaggactactcagactcgaaggagggatgataaggaactggacactgccattagagaaaatgatgtaaagccagaccatgaaactcctgcaacagaaattgttcaactaaaagaaaccgaaccccaaaatgtggacttcagcaaagagttaaaaaaaactgaaaacatttcatatgaaatgctttttgaacctgagccaaatggagtaaattctgtggaaatgatggataaagaaagaaacaaagacaaaatgcctgaggatgttacattcagccctcaagatgaaacacagaccgcaaatcataaaccagaagagcatcctgaagaaaatacaaagaacagtgttgacgaacaggaagaaactgttatttcttacgaatcaactcctgaggtttctagaggaaatcaaacaatggcagtgaaaagtctgtccccatctcctgagtcctcggcatcgccagttccatccactcagccgcagctcacagaaggatcacatttcatgtgtgtgtagtcttagaagaactatactgacttctgttgaaaccattcaaagctaaagacatggaccttcagcagtgtaagaagatattgtacagtatattttaaatctatgaaattcatagttctgatgcttttggtcacagagcatcattttatcacttctggaaaatgtttattccaaaacagctttaatggcccatatgtacacttcgtaatctcaaggttattattctgacaccagcttgctgctatgatttcagagcacataagtaaaggtgctttttaatgtgcagtctatttccagagcttacttagttgctgatttccagatttcgatgtttcttaagtctaggtgaatttatatatatatttttttgcttttcattttctaaagttagttattatttccattgaagcttgttttcttttttttcttcccattttagctactgcagtgcttttgtttcacacttgatttgtaaaaattttatatatatgtatttaaaatgtgccattttattgctaagtgaagtatgtcctgttttctgctataattctttctcggtcagattgcaatgtcagcagttactgccacactcctgtcagcttaaacacaaatgttactgcttatcttttcttaaaaaaaaaaaaaacaaagtgtaggtattttgaagtactgggcttatatttcattggaatacatgtgtacagcaataagcaggtttccaaatccggtacttagtttgtgtacaaatgtaattatgttcattgtgtatatattatacaatgagcacatgtaatgtattaaaggctacttactattgtttaaatgcaaatgttcatatctcatttctttttttatcatgttaaataaatgttgatgttctt

SEQ ID NO: 200974 - DNA, 3357 bp, Artificial Sequence
  derived and/or modified sequence
tcagacatggcggcggatctgaacctggagtggatctccctgccccggtcctggacttacgggatcaccaggggcggccgagtcttcttcatcaacgaggaggccaagagcaccacctggctgcaccccgtcaccggcgaggcggtggtcaccggacaccggcggcagagcacagatttgcctactggctgggaagaagcatatacttttgaaggtgcaagatactatataaaccataatgaaaggaaagtgacctgcaaacatccagtcacaggacaaccatcacaggacaattgtatttttgtagtgaatgaacagactgttgcaaccatgacatctgaagaaaagaaggaacggccaataagtatgataaatgaagcttctaactataacgtgacttcagattatgcagtgcatccaatgagccctgtaggcagaacttcacgagcttcaaaaaaagttcataattttggaaagaggtcaaattcaattaaaaggaatcctaatgcaccggttgtcagacgaggttggctttataaacagatgagaaagaagagggtatcctgggaagcatactgttacctagttttcagatagctttgcttacctctgaagatcacattaatcgcaaatatgcttttaaggcagcccatccaaacatgcggacctattatttctgcactgatacaggaaaggaaatggagttgtggatgaaagccatgttagatgctgccctagtacagacagaacctgtgaaaagagtggacaagattacatctgaaaatgcaccaactaaagaaaccaataacattcccaaccatagagtgctaattaaaccagagatccaaaacaatcaaaaaaacaaggaaatgagcaaaattgaagaaaaaaaggcattagaagctgaaaaatatggatttcagaaggatggtcaagatagacccttaacaaaaattaatagtgtaaagctgaattctctgccatctgaatatgagagtgggtcagcatgccctgctcagactgtgcactacagaccaatcaacttgagcagttcagagaacaaaatagtcaatgttagcctggcagatcttagaggtggaaatcgccccaatacagggcccttatacacagaggccgatcgagtcatacagagaacaaattcaatgcagcagttggaacagtggattaaaatccagaaggggaggggtcatgaagaagaaaccaggggagtaatttcttaccaaacattaccaagaaatatgccaagtcacagagcccagattatggcccgctaccctgaaggttatagaacactcccaagaaacagcaagacaaggcctgaaagtatctgcagtgtaaccccttccactcatgacaagacattaggacccggagcggaggagaaacggaggtccatgagagatgacacaatgtggcagctctacgaatggcagcagcgtcagttttataacaaacagagcaccctccctcgacacagtactttgagtagtcccaaaaccatggtaaatatttctgaccagacaatgcactctattcccacatcaccttcccacgggtcaatagctgcttatcagggatactcccctcaacgaacttacagatcggaagtgtcttcaccaattcagagaggagatgtgacaatagaccgcagacacagggcccatcaccctaagcatgtctatgtgcctgacagaaggtcagtgccagctggcctgactttacagtctgttagtccccagagcctccaagggaaaacgctgtcacaagatgaaggtagaggcacattatacaaatacagacctgaagaagtagatattgatgccaagttaagccgattatgtgaacaagataaagtggtgcatgctctggaagagaaacttcagcaactccacaaggagaaatacacgcttgagcaagctttgctatcagccagccaagagatagaaatgcatgcagataacccagcagccattcagacagtggtgttacaaagggatgatttacaaaatggactgcttagtacgtgtcgagaactttctcgagccactgccgaattggaacgagcatggagagaatatgataagttagaatacgatgtaactgttaccaggaaccagatgcaagagcagctggatcaccttggtgaagttcagacggaatcagcaggaattcagcgtgcacagattcagaaagaactttggcgaattcaggatgtcatggaagggctgagtaaacataagcagcaaagaggtactacagaaataggtatgataggatcaaagcctttctcaacagttaagtacaaaaatgagggtccagattatagactctacaagagtgaaccagagttaacaacagtggcagaagttgatgaatctaatggagaagaaaaatcagaacctgtttcagagatagaaacttcagttgttaaaggttcccactttcctgttggagtagtccctccaagagcaaaatcaccaacacccgaatcttcgacaatagcttcctatgtaaccttgaggaaaactaagaagatgatggatctaagaacggaaagaccaagaagtgcagtggaacagctctgtttggctgaaagtactcgaccaaggatgactgtggaagagcaaatggaaagaataagaagacatcaacaagcgtgcctgagggagaagaaaaaagggttaaatgttatcggtgcttcagaccagtcacccttacaaagcccttcaaatttaagggataatccatttaggactactcagactcgaaggagggatgataaggaactggacactgccattagagaaaatgatgtaaagccagaccatgaaactcctgcaacagaaattgttcaactaaaagaaaccgaaccccaaaatgtggacttcagcaaagagttaaaaaaaactgaaaacatttcatatgaaatgctttttgaacctgagccaaatggagtaaattctgtggaaatgatggataaagaaagaaacaaagacaaaatgcctgaggatgttacattcagccctcaagatgaaacacagaccgcaaatcataaaccagaagagcatcctgaagaaaatacaaagaacagtgttgacgaacaggaagaaactgttatttcttacgaatcaactcctgaggtttctagaggaaatcaaacaatggcagtgaaaagtctgtccccatctcctgagtcctcggcatcgccagttccatccactcagccgcagctcacagaaggatcacatttcatgtgtgtgtagtcttagaagaactatactgacttctgttgaaaccattcaaagctaaagacatggaccttcagcagtgtaagaa

SEQ ID NO: 200975 - DNA, 3351 bp, Artificial Sequence
  derived and/or modified sequence
atggctgctgacctcaacctggagtggatatccttgcctcggagctggacctacggtataacgcggggtggcagagtgttttttatcaacgaagaagccaagtcaaccacctggctgcaccccgttaccggagaggctgtcgttaccgggcaccgacggcagtcaactgacctgcctactggatgggaagaggcgtatacctttgagggcgcaagatattatattaaccataacgagaggaaggttacatgtaagcatccggtgaccggccagccttctcaggacaattgtatatttgtggtgaacgagcagaccgttgctacaatgacttccgaagagaaaaaggaaaggcccatatctatgatcaatgaggcttccaattataatgtcaccagcgactatgccgtgcaccccatgtctccagtcggcaggacttctcgggcttctaagaaggtgcataacttcggaaagcgatccaattcaatcaagagaaatccgaatgcccctgtagttcgtagaggatggctttataaacaggattctactggcatgaagctgtggaaaaaacggtggttcgtgctgagtgacctatgtctattctattatagggatgagaaggaggaaggcatcctgggtagtatactactgccttcgtttcaaatcgcgctgctgacctctgaggatcatattaatcggaagtacgcttttaaggcagcgcaccccaatatgcgaacctattatttctgtacagacaccggtaaggagatggagctgtggatgaaggccatgctggatgcagccctagtgcagaccgaacccgtgaagagagtggataaaataaccagcgagaatgcccctacaaaggagaccaacaatattcccaaccaccgtgtgttaatcaagcccgaaattcaaaacaatcaaaaaaataaggaaatgtctaagattgaagagaagaaagcactcgaggctgaaaaatatgggtttcaaaaggatgggcaggacaggcctttgactaaaataaacagcgtgaagcttaattcattaccatcggagtatgagtctgggtccgcttgccctgctcagacggtccactatcgacctatcaacctgtccagcagcgaaaataaaattgtgaacgtctccctggctgacttacgcggaggtaaccgtcccaacaccggacccctatataccgaggccgacagagtgatccagcgtacgaatagcatgcagcagttggagcagtggataaagattcagaagggaaggggacatgaggaggagactcgcggagttatcagttatcaaacattaccaagaaatatgccctcgcacagagcacaaattatggcccgttatccagaggggtacagaacactccccaggaactctaagaccaggcctgaaagcatctgcagcgtgacaccctccacacatgacaagactttgggtcctggagcagaagaaaagcggaggtcaatgcgcgacgacactatgtggcaactctacgagtggcagcagcgccagttctataacaagcagagtaccctgccgcgtcattcgaccctttcatcacctaagaccatggtgaatatctctgatcagacaatgcacagcatccccaccagccctagccacggcagcatagctgcctatcagggatatagcccccagcgcacgtatcgcagcgaagtgagcagtcccattcagcgcggtgacgtgacgatagatcggaggcatagggctcatcacccgaagcacgtatacgtgcctgaccgtcggagtgtgccagccggattgacgctgcaaagcgtgtcaccccagtctctccaggggaaaaccctatcacaggacgaggggagaggaacgctctacaaatatagaccagaagaggttgacatcgacgcgaagctgtcaaggttgtgcgaacaagacaaggtggtgcatgctctcgaagagaagcttcagcagctacacaaggagaagtacacactcgaacaagccctcttgtccgcctcccaggaaatcgagatgcatgccgataaccctgcagcaattcaaacagtggtgctacagagggacgacttacagaacggtctgctgtcaacatgccgcgaactttccagagcaaccgccgagctcgagagagcctggagggagtacgataagctcgagtacgacgtaacagtgactaggaaccagatgcaggaacaactagatcacctaggcgaggtgcagactgaatctgctgggatacagcgggcacagattcagaaagagctctggcggattcaggacgtgatggagggccttagcaaacacaagcaacaacgcggtaccaccgagatcgggatgattgggagtaagccgttttccaccgtcaagtacaagaatgaaggcccagattaccgcctctacaaatcagagccagagctaacaactgttgctgaggttgacgagtccaacggggaggagaagtccgaacccgtaagtgagatcgagacatccgttgtaaaagggtctcatttccccgttggagttgtgccaccacgagccaaatcgcccaccccagagagcagcacaatcgcttcgtacgtgacgctgcgcaaaactaaaaagatgatggacctccgcaccgaaaggcctcggagtgccgtcgagcagctttgtctggctgagtcaaccaggccccgtatgactgtcgaggagcagatggagcgcatccgccgacaccagcaggcctgcttgagagagaaaaagaaaggcctgaacgttataggggctagtgatcagtctcctttacagtctccatcaaacctccgggacaacccttttcgaaccacacagacaaggagacgtgatgataaagagctggacacagccattcgcgagaatgacgtaaaaccagatcacgagactccagctaccgagatcgtgcagctcaaagaaaccgagccccagaacgtcgacttttctaaggaactgaagaaaaccgagaatatatcctacgagatgctgtttgaacctgagccaaatggcgtcaattccgtggaaatgatggacaaagagcgaaacaaagataagatgccagaggacgttactttctctcctcaggatgagactcagactgccaatcataagccagaggagcatccagaagagaatacgaagaattccgttgacgagcaggaggagactgtcatttcgtacgaatccactcccgaggtgtctcggggaaaccagactatggcagtcaagtccctcagcccgagccccgaatccagcgcctccccggtgcctagcacccagccccagctgaccgaaggttcccacttcatgtgtgtgtag

SEQ ID NO: 200976 - DNA, 1953 bp, Artificial Sequence
  derived and/or modified sequence
atggctgccgacctgaacttggaatggatttctctgccaagatcatggacatacgggatcacaagagggggtcgggtatttttcattaatgaggaggctaagtccacgacctggctccacccagtaaccggagaggctgtggtgactggtcataggaggcagtcaaccgacttgccaacgggatgggaagaggcgtatactttcgagggcgctcgctactacatcaatcataatgagcggaaggttacatgtaaacatccagtgacggggcagccttcccaggacaactgcattttcgtggtcaacgagcagaccgtggcgaccatgaccagcgaagaaaagaaggagcggccaatctccatgattaatgaggcttcaaactacaatgttacttcggattacgctgtgcaccctatgtccccagtgggtaggacctcgcgcgcttctaagaaggtgcacaacttcggtaagcggtctaatagcataaagagaaaccccaacgctccggtagttagaaggggatggctctataagcaggactctaccgggatgaaactgtggaaaaaaaggtggtttgtcctgagtgatctgtgtctgttctactatcgcgatgagaaggaagaaggaattctgggctcaattcttctgcctagcttccagattgccctcctgaccagcgaagaccacataaatagaaaatatgctttcaaggccgcacaccccaacatgcgcacgtactatttctgtacagacactgggaaagagatggaactgtggatgaaagctatgctggacgccgctctggttcagacagaaccagtcaaacgcgtggataaaattaccagtgagaatgcccctacaaaggagacaaacaatattcccaaccaccgcgttctcatcaagcctgagatccagaataaccaaaagaataaggagatgtctaaaattgaagaaaaaaaggccctcgaagccgagaaatatggcttccaaaaggacggacaggacaggccattaactaagattaatagcgtgaaactgaatagcctcccctccgaatacgaaagtggaagtgcatgccctgcacagaccgtccactatcggcctattaacctctcttcatctgaaaataaaatagtgaacgtgtccctcgctgacttacggggaggaaaccgccctaatactgggcctttatacacggaagcagatcgtgtgatccagaggaccaattccatgcagcaactggaacagtggattaagattcagaaagggaggggacacgaagaggagactcgcggtgttattagctaccagaccctgccaaggaacatgccttcacacagagctcagatcatggcacgttaccctgaagggtatcggaccctgccccgtaattcgaaaactcggccagagagtatctgttccgttaccccgtcaacccacgacaaaacactaggcccaggggcagaagagaagcgccgtagtatgagggacgatacaatgtggcaactgtacgagtggcaacagcggcagttttataataagcaatcaaccctgcctcgacacagtactctttcatcccctaagaccatggtgaatattagcgaccagactatgcacagtattcccaccagtcccagccacggatctattgccgcttaccaaggatatagtcctcagcgtacataccgctcggaggtttcctcacccattcagcgaggcgacgtcaccatcgacagacgccatagggcccaccatcctaaacacgtgtatgttcccgatcggagaagcgtcccagccggactcactttgcagtccgtcagccctcagagcttgcaggggaagacctgggggcgagagaaggtggctacggccactggcgctgctgaggcagtcgctagcgacacccatctcccaagaactggaagctcttctccatctcttttgtgcgtgtag

SEQ ID NO: 200977 - DNA, 3183 bp, Artificial Sequence
  derived and/or modified sequence
atggcggctgacctgaaccttgagtggatctctctgccaagatcttggacctacggcatcacgagaggtggacgcgtcttcttcatcaacgaagaggccaaaagtacaacatggctccaccctgtgaccggtgaggcagtcgttacgggccatagaaggcagtcaacggacctgcctaccgggtgggaggaagcctacacatttgaaggggcacgctactacatcaatcacaatgagcggaaggttacatgcaagcacccagtcaccggtcagcccagtcaagataactgcatctttgtggtgaatgagcagactgttgccacaatgactagcgaggagaagaaggaacgtccgataagcatgattaacgaggcgtctaattacaatgtcacgagtgactatgccgttcaccctatgagccctgttggcaggacctctcgggcaagtaaaaaagtccataactttggcaaacgcagcaacagcatcaagagaaaccctaatgctcctgtggtgcggcgtggctggctttataagcaggactccactgggatgaagttgtggaagaagcgctggttcgtgctcagcgacttgtgtcttttctattaccgggacgagaaggaggaaggcatactgggtagcattctgctgcctagctttcagatagcgcttttgacatctgaggatcacattaatcggaaatacgcatttaaggctgcccaccccaatatgaggacgtactacttttgtacagacactggtaaagaaatggagttatggatgaaagctatgctagacgcagcactggtacaaaccgaacccgttaagcgcgtggataaaattacatccgagaatgcaccaaccaaggaaaccaacaacattcctaaccatcgcgtactaattaaacctgaaatccaaaacaatcagaagaataaggagatgtctaaaatcgaagaaaaaaaagccctggaggccgagaaatatggcttccagaaagacggacaggaccgtccactcaccaagatcaattccgtgaaacttaactctctgccaagcgaatacgaatcaggctcagcgtgccccgctcaaaccgttcactatcggccaattaacctttcgtcttcagaaaataagattgtaaacgtgtccctggccgacctacgcggaggaaatcgtccgaacacaggcccactatacacggaagctgatcgcgtcatccaacgaaccaactccatgcagcagctcgagcaatggattaaaatccagaaaggcagagggcatgaagaggagacccggggagtaatctcataccaaactctgccaagaaatatgccgtcccatagggcccagataatggcgagatacccagaagggtaccgcaccctgccaagaaattctaagactaggccagagagcatttgcagcgtgacaccttccactcatgacaagacgctgggacccggagcagaagaaaagcgacgcagcatgagagatgatactatgtggcagctctatgaatggcagcaaaggcagttctacaataaacagtctaccctgcccagacatagcacgcttagcagtccgaaaactatggttaatatctcggaccagacaatgcacagcatacccacatccccatcacacggctccatagccgcataccaaggctactctccccagaggacatacagatccgaggtctcatcccccattcaacggggagacgtgactatagatcggaggcaccgagcccaccatccaaagcatgtgtatgtgcccgatagacggtctgtgccagctggactgactttgcagagtgtaagccctcaatcactccaaggcaagactttgtcccaggacgagggacgaggaaccctttataagtacaggccagaagaggtggatatagatgccaaacttagtcgattgtgtgaacaggacaaggtcgtgcacgccctcgaggagaagctgcagcaactgcacaaggagaagtacactctcgaacaggccttattgtcggctagccaggagatcgagatgcatgccgacaaccccgcagccattcagacagtggtgttgcagagggacgatctccagaatggactgctcagcacctgtagggaactgtctagagctacagccgagctggagcgcgcatggcgagagtacgacaaacttgagtacgacgtcaccgtgactaggaatcagatgcaggaacagctggaccatttaggagaggtgcaaactgaaagcgctggcattcagcgggcacaaatccagaaggaactgtggcgcatacaagatgtcatggagggtctcagcaagcataagcagcagagagggacgaccgagattggaagtcatttccccgtgggagtggttccaccgagagcaaagagtcccacacccgaatcttccactatagctagctacgtgaccctaaggaaaacaaaaaagatgatggatcttcgcacagagaggcccaggagtgccgtggaacagttgtgccttgcagaatcaacccgacctcgaatgacagtggaagagcaaatggaacggattagaagacaccaacaggcctgtctccgggagaagaagaaggggctgaatgtaatcggcgcttcagaccaatcaccgctgcagtccccttccaaccttagggacaaccccttccgcaccactcagactcggaggcgagatgataaggagctcgacacggcaattagagaaaacgacgtgaagcccgatcacgaaacaccggctaccgaaattgtacagctgaaggaaaccgagccccagaatgtggacttttcaaaggaactgaaaaaaactgagaatattagctatgagatgttattcgaacccgaacctaacggcgtgaatagcgtagagatgatggacaaagagcgcaacaaggataagatgccagaggatgtcaccttttccccacaagatgagacccagactgccaatcataagcccgaggagcacccggaggagaacaccaagaattccgtggatgaacaagaagaaacagtaatctcctatgagagcacgcccgaagtatccagagggaaccagacaatggctgtgaagtctctgtcaccctcgccagagagtagtgcctcccccgtgcctagcactcagccccagctgaccgaaggcagccacttcatgtgcgtctag

SEQ ID NO: 200978 - DNA, 963 bp, Artificial Sequence
  derived and/or modified sequence
atggccgctgacttaaatctcgaatggatctctttgccaaggtcttggacctacggcattacaaggggaggacgggtcttcttcataaacgaggaagccaagagtaccacttggcttcaccctgtgaccggagaggcagtggtcacagggcatcgtcgacaatctacggatctccccacaggttgggaagaagcctatacctttgagggtgcaaggtattacattaaccataatgagcgcaaggttacttgtaagcatcctgttactggtcagccatctcaggacaattgtatattcgtggtgaatgagcagacagtggcaacaatgacttctgaggagaagaaggaacgccctatttccatgatcaacgaagcctctaactacaacgtgacctccgattacgcggtacatccaatgagccccgtagggaggaccagccgggcatcaaagaaggttcataacttcggaaaaagatcaaattccatcaagaggaaccctaacgcacctgttgttaggagagggtggctctataagcaggattcaaccgggatgaaattgtggaagaaaagatggtttgttttgtccgacctatgcttgttctactacagggacgagaaggaagaaggtatactggggtcgatcttactccccagctttcagatcgccttgctgacttctgaagatcatataaaccgcaagtacgctttcaaagcagcgcatcccaacatgagaacctattacttttgtactgatactggcaaagaaatggaactgtggatgaaagctatgctggacgccgcattggtccagacagagcctgtcaaaagagtggataagatcacttccgagaatgcacccactaaagaaaccaataatattccgaatcatcgagtcctgataaaaccggaaattcagaacaatcagaaaaataaggagaaaaaaaagaagaagaagaaaaagtag

SEQ ID NO: 200979 - DNA, 1194 bp, Artificial Sequence
  derived and/or modified sequence
tatacactagagcaagcattgcttagcgcttcacaggagattgagatgcatgccgataaccctgccgcaatccaaaccgtcgtgttacagcgggacgatttacagaacggattgctgtcaacttgccgcgaactgtctcgtgctacagccgagttagagcgtgcatggcgggaatacgataaacttgaatatgacgtcaccgtgaccagaaaccaaatgcaggaacagttggatcatttgggtgaagtgcagacagaatctgctggtatccagcgcgcacagattcaaaaggaactctggcgcattcaggatgttatggaggggctgagcaagcacaaacagcagcggggaaccacagaaataggatctcattttcccgtaggagtcgttcccccacgtgccaagagccctactcccgaatccagtactattgcttcctatgttacactgaggaagacaaagaagatgatggatctacgcacggagaggcctaggagtgcagtcgaacagctttgcctcgccgaaagcaccaggccacgcatgacagtcgaggagcagatggagcgcatcaggcgacaccaacaggcatgtttgagggagaaaaagaaagggctcaacgtcatcggtgcctccgaccagagtccactgcagagcccaagtaatctgcgagacaatccttttcggactacacagactcgcagacgggatgacaaagaattagacaccgccatccgagaaaacgacgtaaaacctgaccacgaaacacctgccactgaaattgtgcagcttaaggaaaccgagccgcagaatgtcgatttcagcaaagagctcaaaaagaccgagaatataagctatgagatgctgttcgagccggagccgaacggcgttaactcagtcgagatgatggacaaagagcggaataaagacaagatgcctgaggacgtgactttttccccacaggacgaaactcagaccgccaatcataaacctgaggaacacccagaggagaataccaagaacagtgtcgatgaacaggaggagactgttatctcctacgagtctaccccagaagtgtcccgcggtaatcaaacgatggcagttaaatctttgagtccctcaccagaaagtagcgctagtccggtcccaagtactcagccccaactaactgaaggtagtcacttcatgtgtgtatag

SEQ ID NO: 200980 - DNA, 2625 bp, Artificial Sequence
  derived and/or modified sequence
atgcgcacgtactacttttgcaccgataccgggaaggaaatggaactttggatgaaggctatgttggatgctgcactcgtgcagacagaacctgtgaagcgcgtcgataaaattacttctgagaacgcccctacaaaggaaactaataatatcccaaatcatcgagtactgatcaagcctgaaatccagaacaaccagaagaacaaagagatgagtaagattgaggaaaaaaaagccctcgaggccgagaaatatgggtttcagaaagatgggcaggaccggccattgactaagatcaattccgtcaaactcaatagcctgccttccgagtatgaatctgggtccgcatgccccgcacagaccgtacattatagaccaatcaacctctcctcctccgagaataagatcgtaaacgtttccctagccgatttaagaggcggaaatcgaccaaataccggacctctctatacagaagccgatcgcgtgatccaaagaactaattctatgcaacagctcgaacagtggatcaagattcagaaaggacgagggcatgaggaagagactagaggcgtcataagttatcagacactccctagaaacatgccttcccatagagcgcagattatggcccgttatcccgaagggtatcgcactttgccacgtaacagtaagactcggcctgagagcatctgcagcgtgaccccatctacacacgataagacactgggacctggagccgaggaaaagcggaggtctatgcgcgatgatacgatgtggcagctgtatgaatggcaacagcgacagttctacaataagcagagcaccctccccaggcactctaccctgtctagtccaaaaactatggtcaacatctctgaccaaaccatgcacagtatccctaccagtccatctcatggctccatagctgcttatcagggatattctccacagcgtacttataggtccgaagtgtcgtctcccatccagaggggagatgtcaccatcgataggagacatcgagcccaccacccaaaacacgtgtacgtgcctgaccgacggtctgtgcccgcaggcctgaccctgcagtctgtctccccacagtctttgcaggggaagactttgtcacaggacgaaggtcgtggaacattgtacaagtatcggcctgaggaagtggatatagacgcaaagctctcgcgtctttgcgagcaggacaaagtcgttcatgccctggaggaaaagctacaacagctgcacaaggagaaatataccctcgaacaggcgctgttgtctgcctctcaggagattgaaatgcacgccgacaaccccgcagccatccagaccgtggtgctccaacgggacgacctgcagaatggcctcttgagtacatgccgggaactgtcaagggcgaccgcagagctggagagagcgtggcgcgagtacgacaagctggaatatgatgtgaccgttacgcggaatcagatgcaggaacaactggatcacctcggcgaagtgcagaccgaaagcgcgggaatccagcgggcacaaattcaaaaagagctgtggaggatccaggacgtgatggagggcctgagtaaacacaagcagcaacgcggtaccacggaaatcggtatgatcggcagtaaacctttttccaccgtaaaatataaaaatgagggtcccgactacaggctttacaagagcgagcccgaactgactaccgttgcggaggtggacgagtccaatggggaggagaaatctgagcctgtctccgaaattgaaacatccgtggtgaagggctcccacttccccgtcggagtggtgccgcctcgcgcaaaatccccaacacctgaatcatccacaatcgcgtcttatgtgacattacgcaaaacaaagaaaatgatggatttgcgaacggagcgtcctcgatccgctgttgaacagctttgtctggccgaatccacacggccacggatgaccgtagaggaacaaatggaaagaatccggcgacaccagcaggcctgcctgagggaaaagaaaaagggcttaaacgttatcggggcttctgaccaaagccccctgcaatccccctctaatctgcgggataatcctttccgtaccactcagaccagacgcagagatgacaaggagctcgatacggcaatcagagaaaacgatgtcaaaccggaccatgagacccctgccactgagatcgtgcagctgaaggaaactgaaccccagaatgtagattttagcaaggaattgaagaagactgaaaacatttcttatgagatgctgtttgagcctgaacctaacggagtgaactctgtggaaatgatggacaaagaaaggaataaggacaagatgcccgaagatgtgaccttttcaccacaagacgagacacagacagccaaccacaaacccgaggaacaccccgaggaaaacacaaaaaacagcgtggatgaacaggaagagaccgtgatcagctacgaatctactcctgaggtctcacgcggtaatcagacgatggctgtcaaaagtctatctccctcaccagagtctagcgcctctcccgtccctagcactcaacctcaattgaccgaaggatctcacttcatgtgtgtgtag

SEQ ID NO: 200981 - protein, 238 aa, Artificial Sequence
  derived and/or modified sequence
MASRWQNMGTSVRRRSLQHQEQLEDSKELQPVVSHQETSVGALGSLCRQFQRRLPLRAVNLNLRAGPSWKRLETPEPGQQGLQAAARSAKSALGAVSQRIQESCQSGTKWLVETQVKARRRKRGAQKGSGSPTHSLSQKSTRLSGAAPAHSAADPWEKEHHRLSVRMGSHAHPLRRSRREAAFRSPYSSTEPLCSPSESDSDLEPVGAGIQHLQKLSQELDEAIMAEESGDIVSLIHD

SEQ ID NO: 200982 - DNA, 717 bp, Artificial Sequence
  derived and/or modified sequence
atggcatctaggtggcagaacatgggaacatccgtgcgccggcggagtctccaacaccaagagcagctggaggattccaaggaacttcagccagtggtttcccaccaagagacaagtgtgggggcgcttggatctttgtgtagacaatttcaacgccgcttgccattacgggccgtgaatcttaatctgagggctggcccctcatggaaaaggttggaaacccctgagcctgggcagcagggcctccaggctgctgcaaggtcagccaagtctgctctgggtgcggttagccagaggattcaggagagttgccagtccggaacaaaatggctagttgagactcaagttaaggctagacgccggaaacgtggcgcacagaagggctctggctcacccacacacagcctgtcacagaaatccactcgcctaagcggtgctgcacccgcacacagtgccgccgacccatgggagaaggagcaccaccggctctccgttcgcatggggagccatgcgcaccctctgaggcggagtagacgggaggcagcctttcgttctccatatagctccactgaacccctgtgttcccccagtgaaagcgatagtgatctggaacccgttggtgctggcatccagcacctgcaaaagctgtcacaagagctggacgaggccattatggccgaggagtcaggagatattgtttcactaatccatgactag

SEQ ID NO: 200983 - DNA, 717 bp, Artificial Sequence
  derived and/or modified sequence
atggccagccggtggcagaacatgggcacctctgtcaggcgacggagcctgcagcaccaagagcaactcgaagactcaaaggaactgcagcctgtagtttctcatcaagagacgagtgtgggtgctttaggctcactatgccggcagttccagcggagactccctctgcgggcagtcaatctcaacctccgggccggcccttcttggaaacgtcttgagacacccgagccaggccagcaaggactgcaggcggccgcccggagcgccaaaagcgctcttggggccgtcagtcagcgcattcaggaatcatgccaatccggtaccaagtggctcgtggagacccaagttaaggcacgccgacgaaaaaggggggcccagaaaggttctgggagtccaactcacagtcttagtcaaaaaagtacaaggttgtccggcgctgcaccagcacactctgctgccgacccatgggagaaggagcaccatcggttgtccgtgcgcatgggcagccacgctcaccctctccgccgctcacgaagagaggccgctttcaggtctccatacagctcaaccgaacctttatgtagcccatccgagagcgacagtgatctggaaccggtgggtgcagggattcagcacctgcagaagttgtctcaggagctggacgaggcgattatggctgaggagagtggagatatagtatccctcattcacgattag

SEQ ID NO: 200984 - DNA, 717 bp, Artificial Sequence
  derived and/or modified sequence
atggccagccgctggcagaacatgggcacctctgtgagaagaagaagcctgcagcaccaggagcagctggaggacagcaaggagctgcagcctgtggtgagccaccaggagacctctgtgggcgccctgggcagcctgtgccggcagttccagaggcggctgcccctgcgggctgtgaacctgaacctgcgggccggccccagctggaagaggctggagaccccagagcccggccagcagggcctgcaggccgccgcccggagcgccaagagcgccctgggcgctgtgtcccagaggatccaggagagctgccagagcggcaccaagtggctggtggagacccaggtgaaggcccggcggaggaagagaggagcccagaagggcagcggcagccccacccacagcctgagccagaagagcacccggctgagcggggccgccccagcccacagcgctgctgacccctgggagaaggagcaccaccggctgtctgtgaggatgggcagccacgcccaccccctgcggcgcagccggcgggaggccgccttccgcagcccctacagcagcacagagcccctgtgcagccccagcgagagtgacagcgacctggagcctgtgggcgccggcatccagcacctgcagaagctgagccaggagctggatgaggccatcatggccgaggagagcggggacatcgtgtccctcatccatgactag

SEQ ID NO: 200985 - DNA, 717 bp, Artificial Sequence
  derived and/or modified sequence
atggccagccggtggcagaacatgggcaccagcgtgcggcggcggagcctccagcatcaggagcagttggaggattctaaggagctgcagcctgtcgtatcacatcaggagacttcggttggggccctggggtcgctgtgtagacagtttcagagacgcctacctctccgcgctgtgaatcttaacctgagagctgggccttcgtggaaaaggctcgaaacgcccgagcccggacaacaaggactgcaggctgctgcgcgaagcgccaagagtgccttgggcgctgtcagtcaacgcatacaggaatcatgtcagtccggcacgaaatggttagtggagacacaggtcaaggccaggcgccggaagagaggcgcacagaaaggatctggttctcccacccactcactgagccagaagtctacccggctcagtggagcggctcctgcacattctgccgccgatccctgggagaaggagcaccatagattgagtgtgcgcatggggtcccatgcccatcctctgcgtcgtagcagacgcgaggccgcgttcagatctccctactcaagtactgagccactgtgtagtccttcagagtccgattccgaccttgaacccgtaggggctggcatccagcatctccagaagctatcacaggaattagatgaggccattatggcagaggaatccggtgatattgtctctctgattcacgactag

SEQ ID NO: 200986 - DNA, 717 bp, Artificial Sequence
  derived and/or modified sequence
atggccagccggtggcagaacatgggcaccagcgtgcggcggcggtccctgcagcaccaggaacagctggaggattctaaggaactacagcccgttgtgtcgcatcaggagactagtgtgggagccctagggtcactgtgtagacagttccagaggcgtcttccactacgggccgtgaacctgaacctgagagccggcccaagttggaagcgactcgagactcctgaacccggtcaacaggggctccaggccgccgccagaagcgctaagtcggccctaggagcagtatcccagagaatacaggagagctgccagtctgggacaaaatggctggtggagacccaggtcaaggcccgtcgacggaagcggggagcacagaagggatccggaagccccactcatagcctgagtcaaaagtctacccggttatcaggagctgctcccgcacactccgcggctgatccctgggaaaaagaacatcatagattgtcagtgcgtatgggctcccatgcccatccgttacgacggagcagaagagaggcagctttccgcagtccatactctagcactgagcctctgtgctccccctcagaaagcgactcagacttagagcccgttggcgccggtatccagcatctgcaaaagctgtcacaggagttggacgaggctattatggctgaagagtccggcgacattgtaagccttatccacgattag

SEQ ID NO: 200987 - DNA, 717 bp, Artificial Sequence
  derived and/or modified sequence
atggcgtcccgatggcagaacatgggtaccagcgtgcgacgtcggagcctgcaacatcaagaacaacttgaggacagtaaagagctccagccggtcgtgtcgcaccaggagactagtgtcggcgctctcggatcactgtgccgccagtttcaaaggcggttgcctctcagagcagtcaatcttaacttgcgggcaggtccgtcctggaagagactggaaaccccagaacccggtcagcagggccttcaggccgcagccagatccgctaagagcgccctgggcgcagtgagccaaaggatccaggagtcatgccagtccgggactaaatggcttgtggagacacaagtgaaggccaggaggcgaaagcgcggtgcacaaaagggcagcggctccccaacacacagcttgtctcagaaatctacacggctttcaggagccgctccagctcactcagccgctgatccttgggagaaggagcatcaccgcctctccgtacggatggggagccacgcccatcccttacgtagaagcaggcgcgaggcagccttccgctctccctacagctcgacagaaccattgtgctcccctagcgagagtgattctgacttagaacccgttggggctgggattcagcatctgcagaagttgtcgcaggaactcgatgaagctattatggcggaggaatccggtgacattgtgagtttaatccacgattag

SEQ ID NO: 200988 - DNA, 717 bp, Artificial Sequence
  derived and/or modified sequence
atggcgtctaggtggcagaacatgggcacaagtgtgagacgacgctcactccagcatcaggagcaacttgaagatagcaaggaactgcagcccgttgtatctcaccaggagactagcgtcggggcacttggcagtctgtgtaggcagttccagcgtcggctcccgcttcgcgctgttaatctgaatctgcgggcaggaccctcgtggaaaaggctggaaacccccgagcctggccagcagggattgcaggctgccgctcgatctgccaaaagtgcacttggggctgtctcacagcgaattcaggagtcctgccagtccggcacaaagtggctggtggagactcaggtcaaagccaggaggcggaagcggggagcccagaaaggtagcggctcgcccacgcatagtctgagccaaaagagcactcgtctcagtggagctgcccctgcccacagcgctgccgatccttgggagaaggaacatcaccgtttgtcagtgagaatggggagccatgcacatcccttacggcgatcccggagggaagccgcatttcgatctccctactcctctaccgagccactctgctctccttctgaatccgattcagacctcgagccagttggggctggtatccagcacctccagaaactatcccaagagttagatgaggctattatggccgaagaatcaggagatattgtgtcactgatccacgattag

SEQ ID NO: 200989 - DNA, 717 bp, Artificial Sequence
  derived and/or modified sequence
atggccagcagatggcagaacatgggcaccagcgtgagaagaagaagcctgcagcaccaggagcagctggaggacagcaaggagctgcagcccgtggtgagccaccaggagaccagcgtgggcgccctgggcagcctgtgcagacagttccagagaagactgcccctgagagccgtgaacctgaacctgagagccggccccagctggaagagactggagacccccgagcccggccagcagggcctgcaggccgccgccagaagcgccaagagcgccctgggcgccgtgagccagagaatccaggagagctgccagagcggcaccaagtggctggtggagacccaggtgaaggccagaagaagaaagagaggcgcccagaagggcagcggcagccccacccacagcctgagccagaagagcaccagactgagcggcgccgcccccgcccacagcgccgccgacccctgggagaaggagcaccacagactgagcgtgagaatgggcagccacgcccaccccctgagaagaagcagaagagaggccgccttcagaagcccctacagcagcaccgagcccctgtgcagccccagcgagagcgacagcgacctggagcccgtgggcgccggcatccagcacctgcagaagctgagccaggagctggacgaggccatcatggccgaggagagcggcgacatcgtgagcctgatccacgactag

SEQ ID NO: 200990 - protein, 128 aa, Artificial Sequence
  derived and/or modified sequence
MDPGSRWRNLPSGPSLKHLTDPSYGIPREQQKAALQELTRAHVESFNYAVHEGLGLAVQAIPPFEFAFKDERISFTILDAVISPPTVPKGTICKEANVYPAECRGRRSTYRGKLTADINWAVNGISKG

SEQ ID NO: 200991 - DNA, 3408 bp, Artificial Sequence
  derived and/or modified sequence
atggacccaggctctcgatggcgaaaccttcccagtggcccttcgctcaagcacctgactgatcccagctatggtattcctagagaacagcaaaaggctgcgctgcaggaacttacgagagcacatgtcgagagttttaactacgctgtgcatgagggattaggactcgccgtgcaggccatccctccttttgaattcgcatttaaggacgaaaggatctcctttactatcctggatgccgtcatctcacctcccacggtgccgaaaggcaccatctgcaaagaggccaacgtttatcctgccgagtgcagaggcaggcgcagtacatatagggggaagctgacagctgatatcaattgggccgtcaacggcatttcaaaaggaattattaaacaattcctggggtacgttccaataatggtcaagagcaaactgtgtaatctgcggaaccttccaccacaggccctgatcgagcatcatgaggaggcagaggagatggggggctactttattatcaatgggattgagaaagtgatccggatgctcattatgcctcggaggaattttccaatcgccatgatccggcctaaatggaaaacgcgtggccccgggtatacccagtatggagtcagtatgcactgtgttcgcgaagagcattccgcagtcaacatgaatctgcactatctagagaacgggacagtcatgctcaattttatttatagaaaggaactgttcttccttcccttgggtttcgccttgaaagcattggtgagcttcagtgattaccagatctttcaggagctgataaagggaaaggaggacgattccttcctgcgaaatagcgtgtctcaaatgcttcggatcgtgatggaggaggggtgttcgacccagaaacaggtgctaaactatctcggagaatgtttcagagtcaaactcaatgtgcctgactggtatccgaacgaacaggcagccgagtttctctttaaccagtgcatctgtatccatctgaaatcgaacactgagaagttctacatgctttgccttatgacgagaaagctcttcgccctggctaagggggaatgcatggaagacaatcccgacagcttggtcaaccaggaagtactcacccccggccagctctttctaatgttcctgaaggagaaactggaaggctggctggtctctattaagatagcgtttgacaagaaggcacagaagacatccgtcagcatgaacactgacaatttgatgaggatcttcactatgggaattgatcttacaaaaccatttgaatacctgtttgccaccggaaatctgcggagcaagacaggactgggcctccttcaggacagtgggctatgcgtcgtggctgataaacttaactttatccgctacctatcacacttcagatgtgtacatcgcggagctgacttcgcgaagatgaggaccacaacagtgaggcgactactgcctgaatcgtgggggtttctctgtccagtccatacacccgatggagaaccatgcggtctgatgaatcatctgactgcagtgtgcgaggttgtgacgcagtttgtgtacaccgcctctatccccgccttgctgtgtaatttgggtgtgactccaattgatggggctcctcacagatcctattccgagtgctacccggtcttgctggacggagttatggtcggatgggtggacaaggaccttgcccccggcatcgctgacagtctgcggcatttcaaagtgcttcgagaaaagcgcattcccccatggatggaggttgtgctgattcccatgacagggaagccctccctttacccaggactctttttgttcactaccccctgtcgactcgtccggccggttcagaacctcgcacttggcaaggaggagttgatcggtaccatggagcagattttcatgaatgttgccatatttgaggatgaagtctttgccggcgtgacaacccatcaggaactgttcccccactccctcctgagtgttatcgccaactttattcccttcagcgatcacaaccagagtccaaggaatatgtaccagtgccagatggggaaacagactatgggcttcccattgctgacataccaggaccggagcgacaataaactgtatcggctccagacaccacagtcccctcttgtgcgcccctcaatgtatgattattacgacatggataactatccaataggtaccaacgccatcgtggccgtgataagctacactggatatgatatggaggatgccatgatcgttaacaaggcatcttgggagcgtggtttcgctcatggaagcgtatataaatcagaatttatagatctctctgaaaaaataaagcaaggagatagctcactcgtctttggaatcaagcctggcgacccccgggtgttgcagaagcttgatgacgatggtcttccttttattggggctaagcttcagtacggcgacccctactactcttacctcaacttgaatacaggcgaaagctttgtaatgtattacaaaagtaaagaaaattgtgtggtcgataacatcaaggtgtgtagcaatgacaccgggtctggcaagtttaagtgcgtgtgtattaccatgcgggtccctaggaaccctaccattggggacaagtttgcctctcgccacggtcagaaaggcatcttatcccgcctgtggccagccgaggacatgccgtttacagagagtggcatggtaccggatatcctcttcaatcctcacggatttccatctaggatgaccattgggatgctgatagagtcgatggccggtaaatcagcagccctgcacgggctctgtcacgacgccacccccttcatcttctcagaagaaaactctgccctggagtatttcggcgaaatgttgaaggcagctggctacaacttctatggcacagagcggttgtactctggaatctccggactggagctggaggccgatatcttcattggagtggtctattatcagcgcctgaggcatatggtctccgacaaattccaggtgagaacgaccggggccagggaccgcgtgacgaaccagcctataggtgggcggaatgtgcaaggcggaatacgatttggggagatggagagggacgctctgctggcccacggtacgtctttcctgctgcacgacaggctgtttaactgttccgatcggtctgtggctcacgtctgtgtgaaatgcggttcactgttatctcctctgctggagaagccacccccctcgtggagcgctatgaggaatcgcaagtacaattgcactctttgctctcgcagcgatacaattgacactgtatcggtgccttatgtgttcagatattttgtcgccgaacttgcggctatgaatattaaagtgaaactcgacgttgtgtag

SEQ ID NO: 200992 - DNA, 2775 bp, Artificial Sequence
  derived and/or modified sequence
atgcactgcgttcgggaggagcactccgccgtcaacatgaatctgcactacctcgaaaacggaaccgtgatgctgaatttcatttaccggaaagagctgttctttctgccactcgggtttgctttaaaagccctggtgagcttttctgattaccagattttccaggagctcattaagggcaaggaagatgactcttttctaaggaatagcgtctcacaaatgcttagaattgtcatggaggagggatgttcaacacagaagcaggtcctgaactatctgggggaatgctttagggtgaagctgaacgttccagactggtatcccaatgagcaggcagctgagttcctttttaatcagtgtatctgcattcatcttaagagcaacacagagaagttttacatgctatgtctcatgacacgcaagctgtttgccctggcaaagggcgagtgtatggaagacaatcccgatagtctggtcaatcaggaggtgctaacaccaggccaactgttccttatgtttctgaaagaaaaattagaagggtggctcgtgagtataaaaatcgcattcgacaaaaaagcacaaaagacttctgtgagcatgaatacggacaatctgatgcgtatctttactatgggtattgatcttaccaagccgttcgaataccttttcgcgaccggtaatctgagaagcaagaccggactgggcctgttgcaggattctggtctatgtgtggttgctgacaaactgaattttatacgctacctttcgcatttcaggtgcgtgcaccgcggtgccgatttcgctaaaatgcggactactacggtgagacgcttgctacccgagagctggggtttcctgtgccccgtgcacactcctgacggagagccttgtgggttaatgaaccacctcacagcagtctgcgaagtggtcacgcagttcgtttacaccgcgagcatacctgccctgctttgtaaccttggcgtcacacccatcgacggcgccccgcacagatcctatagcgaatgttatccggttttgctggacggtgtaatggtgggctgggttgataaagacttggcaccgggtatagcagatagtttgcgtcacttcaaggtcctgcgggaaaaacgcatccccccttggatggaggtggtgctgattccaatgaccggcaaaccctctctgtatccagggctgttcctcttcacaacaccttgtcggctggtaagacctgttcagaatctggcgttaggaaaagaggaactaatcgggactatggagcagatatttatgaacgtcgccatcttcgaagatgaagtgttcgccggcgtgacaacccatcaggagctctttccccacagcctgttgtctgtcattgcaaattttattccattcagcgatcataaccagagccctcggaatatgtatcagtgtcaaatggggaagcagaccatgggctttccattgctcacctaccaggataggagtgacaacaaactttaccggttgcagacaccgcaaagccccctggttaggccttccatgtatgattattacgatatggacaactaccctattggcaccaatgccattgtggcagtcattagttatacggggtatgatatggaagacgctatgatcgtgaataaagcctcatgggagagaggctttgctcacggatctgtctataagtccgaattcatagacctttccgagaagattaaacagggagacagttctctggtcttcgggatcaagcctggggatccaagggtgctccaaaagctcgacgatgacgggctcccattcatcggggctaagctccaatacggcgatccctactacagctatctgaacttgaataccggcgagtctttcgtcatgtattataaatctaaagagaactgcgtggtggacaacatcaaagtgtgctccaacgataccggatccggaaagttcaagtgtgtctgcatcactatgcgagtaccccgtaacccgactatcggagacaagtttgccagcaggcatggccagaagggcattctgtctcgcttgtggccagctgaagacatgcccttcacggaatctgggatggtgcctgacatcctttttaacccccacgggttcccatccaggatgacaattggaatgctgattgagagcatggcgggtaagagtgccgcgctccacggcctttgccatgacgcaacacctttcatcttcagtgaggagaactccgcccttgaatattttggcgaaatgctcaaagccgcaggctacaatttctatggcaccgagcgcctctactccggaataagtggactcgagctagaggcggacatctttattggggtggtgtattatcagagactccgccatatggtttcggacaagttccaagtgaggaccaccggcgccagggaccgtgtcaccaaccagcctataggaggcaggaatgtgcagggggggatccggttcggggagatggaaagggatgcgctgttggcacacggcacaagctttctgttacacgaccgtctgttcaattgctccgaccgaagtgtggcccatgtctgtgtcaagtgtggctccctcctgagccctctgctggagaaaccccctccttcttggtccgccatgagaaaccgcaagtataactgtacactgtgctctcgaagcgatactattgataccgtgagtgtcccctacgtctttagatactttgttgcggaattggccgctatgaacatcaaggtgaagctcgatgttgtgtag

SEQ ID NO: 200993 - DNA, 3408 bp, Artificial Sequence
  derived and/or modified sequence
atggaccccggcagccgctggaggaacctgcccagcggccccagcctgaagcacctgacagaccccagctatggcatcccccgggagcagcagaaggccgccctgcaggagctgacccgggcccacgtggagagcttcaactatgctgtgcatgagggcctgggcctggccgtgcaggccatccccccatttgaatttgccttcaaggatgagcgcatctccttcaccatcctggatgctgtgatcagcccccccaccgtgcccaagggcaccatctgcaaggaggccaacgtgtacccagctgagtgccggggccgccgcagcacctaccggggcaagctgacagctgacatcaactgggccgtgaatggcatcagcaagggcatcatcaagcagttcctgggctacgtgcccatcatggtgaagagcaagctgtgcaacctgaggaacctgcccccccaggccctgattgagcaccacgaggaggccgaggagatgggcggctacttcatcatcaatggaattgagaaggtgatccgcatgctgatcatgcccaggaggaacttccccatcgccatgatccggcccaagtggaagacccggggccctggctacacccagtatggagtgtccatgcactgtgtgcgggaggagcacagcgctgtgaacatgaacctgcactacctggagaatggaacagtgatgctgaacttcatctacaggaaggagctgttcttcctgcccctgggctttgccctgaaggccctggtgtccttcagtgactaccagatcttccaggagctgatcaagggcaaggaggatgacagcttcctgagaaattctgtgtcccagatgctgcgcatcgtgatggaggagggctgcagcacccagaagcaggtgctgaactacctgggggagtgcttccgggtgaagctgaatgtgcctgactggtacccaaatgagcaggccgctgagttcctgttcaaccagtgcatctgcatccacctgaagagcaacacagagaagttctacatgctgtgcctgatgaccaggaagctgtttgccctggccaagggggagtgcatggaggacaacccagacagcctggtgaaccaggaggtgctgaccccaggccagctgttcctgatgttcctgaaggagaagctggagggctggctggtgtccatcaagatcgcctttgacaagaaggcccagaagacctctgtgtccatgaacacagacaacctgatgaggatcttcaccatgggcatcgacctgaccaagccctttgagtacctgtttgccaccggcaacctgcggagcaagacaggcctgggcctgctgcaggacagcggcctgtgtgtggtggccgacaagctgaacttcatccgctacctgagccacttccgctgtgtgcacagaggagctgactttgccaagatgaggaccaccaccgtgcggcggctgctgcctgagagctggggcttcctgtgccctgtgcacaccccagatggagagccctgtggcctgatgaaccacctgacagctgtgtgtgaggtggtgacccagtttgtgtacacagccagcatcccagccctgctgtgcaacctgggcgtgacccccattgatggagccccccacaggagctacagcgagtgctaccctgtgctgctggatggagtgatggtgggctgggtggacaaggacctggcccctggcattgctgacagcctgcggcacttcaaggtgctgcgggagaagaggatccccccctggatggaggtggtgctgatccccatgaccgggaagcccagcctgtacccaggcctcttcctgttcaccaccccctgccgcctggtgcggcctgtgcagaacctggccctgggcaaggaggagctgattggcaccatggagcagatcttcatgaatgtggccatctttgaagatgaggtgtttgctggggtgaccacccaccaggagctgttcccccacagcctgctgagcgtcatcgccaacttcatccccttcagtgaccacaaccagagccccaggaacatgtaccagtgccagatgggcaagcagaccatgggcttccccctgctgacctaccaggacagaagtgacaacaagctgtaccgcctgcagaccccccagagccccctggtgcggcccagcatgtatgactactatgacatggacaactaccccatcggcaccaatgccatcgtggccgtcatctcctacacaggctatgacatggaggatgccatgattgtgaacaaggcctcctgggagcggggctttgcccacggctctgtgtacaagtctgagttcatcgacctgtctgagaagatcaagcagggcgacagcagcctggtgtttggcatcaagccaggggacccccgggtgctgcagaagctggatgatgatggcctgcccttcatcggggccaagctgcagtatggagacccctactacagctacctgaacctgaacacaggagagagctttgtgatgtactacaagagcaaagaaaactgtgtggtggacaacatcaaggtgtgcagcaatgacaccggcagcggcaagttcaagtgtgtgtgcatcaccatgagggtgcccaggaaccccaccatcggggacaagtttgccagcagacatggccagaagggcatcctgagccggctgtggccagctgaggacatgcccttcacagaaagtggcatggtgcctgacatcctcttcaacccccacggcttccccagcaggatgaccatcggcatgctgattgagagcatggccggcaagtctgctgccctgcacggcctgtgccatgatgccacccccttcatcttctctgaagaaaattctgccctggagtactttggagagatgctgaaggctgctggctacaacttctacggcacagagcggctgtacagcggcatcagcggcctggagctggaggccgacatcttcatcggcgtggtgtactaccagaggctgcggcacatggtgtctgacaagttccaggtgaggaccactggagcccgggacagagtgaccaaccagcccatcggcggcagaaatgtgcagggcggcatccgctttggagagatggagagagatgccctgctggcccacggcaccagcttcctgctgcatgacaggctcttcaactgcagcgacagatctgtggcccacgtgtgtgtgaagtgtggcagcctgctgagccccctgctggagaagcccccacccagctggagcgccatgaggaacaggaagtacaactgcaccctgtgcagcagaagtgacaccatcgacacagtgtctgtgccctacgtgttccgctactttgtggccgagctggccgccatgaacatcaaggtgaagctggatgtggtgtag

SEQ ID NO: 200994 - DNA, 2775 bp, Artificial Sequence
  derived and/or modified sequence
atgcactgtgtgcgggaggagcacagcgctgtgaacatgaacctgcactacctggagaatggcaccgtgatgctgaacttcatctacaggaaggagctgttcttcctgcccctgggctttgccctgaaggccctggtgtccttcagtgactaccagatcttccaggagctgatcaagggcaaggaggatgacagcttcctgaggaacagcgtgtcccagatgctgagaattgtgatggaggagggctgcagcacccagaagcaggtgctgaactacctgggggagtgcttccgggtgaagctgaatgtgcctgactggtacccaaatgagcaggccgctgagttcctgttcaaccagtgcatctgcatccacctgaagagcaacacagagaagttctacatgctgtgcctgatgaccaggaagctgtttgccctggccaagggggagtgcatggaggacaacccagacagcctggtgaaccaggaggtgctgaccccaggccagctgttcctgatgttcctgaaggagaagctggagggctggctggtgtccatcaagatcgcctttgacaagaaggcccagaagacctctgtgtccatgaacacagacaacctgatgaggatcttcaccatgggcatcgacctgaccaagccctttgagtacctgtttgccactggaaacctgcggagcaagacaggcctgggcctgctgcaggacagcggcctgtgtgtggtggccgacaagctgaacttcatccgctacctgagccacttccgctgtgtgcacagaggagctgactttgccaagatgaggaccaccaccgtgcggcggctgctgcctgagagctggggcttcctgtgccctgtgcacaccccagatggagagccctgtggcctgatgaaccacctgacagctgtgtgtgaggtggtgacccagtttgtgtacacagccagcatcccagccctgctgtgcaacctgggcgtgacccccattgatggagccccccacaggagctacagcgagtgctaccctgtgctgctggatggagtgatggtgggctgggtggacaaggacctggcccctggcattgctgacagcctgcggcacttcaaggtgctgcgggagaagagaattcctccctggatggaggtggtgctgatccccatgaccgggaagcccagcctgtacccaggcctcttcctgttcaccaccccctgccgcctggtgcggcctgtgcagaacctggccctgggcaaggaggagctgattggcaccatggagcagatcttcatgaatgtggccatctttgaagatgaggtgtttgctggggtgaccacccaccaggagctgttcccccacagcctgctgtctgtgattgccaacttcatccccttcagtgaccacaaccagagccccaggaacatgtaccagtgccagatgggcaagcagaccatgggcttccccctgctgacctaccaggacagaagtgacaacaagctgtaccgcctgcagaccccccagagccccctggtgcggcccagcatgtatgactactatgacatggacaactaccccatcggcaccaatgccatcgtggccgtcatctcctacacaggctatgacatggaggatgccatgattgtgaacaaggcctcctgggagcggggctttgcccacggctctgtgtacaagtctgagttcatcgacctgtctgagaagatcaagcagggcgacagcagcctggtgtttggcatcaagccaggggacccccgggtgctgcagaagctggatgatgatggcctgcccttcatcggggccaagctgcagtacggggacccctactacagctacctgaacctgaacacaggagagagctttgtgatgtactacaagagcaaggagaactgtgtggtggacaacatcaaggtgtgcagcaatgacaccggcagcggcaagttcaagtgtgtgtgcatcaccatgagggtgcccaggaaccccaccatcggggacaagtttgccagccgccacggccagaagggcatcctgagccggctgtggccagctgaggacatgcccttcacagagagcggcatggtgcctgacatcctcttcaacccccacggcttccccagcaggatgaccatcggcatgctgattgaatccatggccggcaagtctgctgccctgcacggcctgtgccatgatgccacccccttcatcttcagcgaggagaacagcgccctggagtactttggagagatgctgaaggccgccggctacaacttctatggaacagagcggctgtacagcggcatcagcggcctggagctggaggccgacatcttcatcggcgtggtgtactaccagaggctgcggcacatggtgtctgacaagttccaggtgaggaccaccggggcccgggacagagtgaccaaccagcccatcggcggcagaaatgtgcagggcggcatccgctttggagagatggagagagatgccctgctggcccacggcaccagcttcctgctgcatgacaggctcttcaactgcagcgacagatctgtggcccacgtgtgtgtgaagtgtggcagcctgctgagccccctgctggagaagcccccacccagctggagcgccatgaggaacaggaagtacaactgcaccctgtgcagcagaagtgacaccatcgacacagtgtctgtgccctacgtgttccgctactttgtggccgagctggccgccatgaacatcaaggtgaagctggatgtggtgtag

SEQ ID NO: 200995 - DNA, 3143 bp, Artificial Sequence
  derived and/or modified sequence
actggcgtccggcgtgtaccgagagactggcgtccggtgtgcaggtggccacatggatcctggcagccggtggcggaacctgcccagcgggcctagcctaaagcacttgactgacccctcttatggaatcccgcgggaacagcaaaaggcagcgttgcaggagctgacgcgggcgcacgtggagtccttcaactacgctgtgcacgagggtctcggcctcgcggtgcaggagtttcaatgcactgtgtgagggaagaacattccgctgtcaatatgaacctccactacttggaaaatggcactgttatgttgaactttatttaccgaaaagaactgttctttcttcctttgggatttgcacttaaggcacttgtcagcttttctgattatcagatctttcaggagctcatcaaaggaaaagaggatgattctttccttaggaactctgtttctcagatgttaaggattgtaatggaagagggttgttcgacacaaaaacaggtccttaactacctaggtgaatgcttcagagtaaaactcaatgttcctgactggtacccaaatgagcaagctgcggagttcctgtttaaccagtgcatctgtatccacttgaaatccaatactgaaaagttttatatgctttgtctcatgacgcgaaagctctttgctttagccaaaggagagtgcatggaggacaatcctgatagtttggtgaaccaggaagtcctcacaccgggtcagctcttccttatgttcctgaaggaaaaactggaaggttggttagtgtctattaaaatagcttttgataagaaggctcagaagaccagtgtttccatgaacactgacaatttgatgaggatttttacaatgggcatagaccttacaaaaccatttgaatacctttttgctactgggaatctgcgttctaaaacaggtcttggcctcctacaagattctggactttgtgttgtggctgacaagctgaacttcatacgctacctctcccatttccgctgcgtgcacagaggggctgattttgccaagatgaggaccaccacagtacgcaggctgctgccagagtcctggggcttcctttgtcccgtgcataccccagacggggagccctgtggcctgatgaaccacctaactgccgtatgtgaggttgtcacacagtttgtgtatacggcatctattccagctttactgtgcaacttgggggtcactcccattgatggagctccccaccgatcatacagtgagtgctaccctgtcctgctggacggtgtcatggttggctgggtggataaggatcttgctccaggcatcgcagattctcttcgtcattttaaggtgttgagagagaaaagaattcctccctggatggaagtggtccttatacccatgacaggaaaaccaagtctgtacccaggattgttcctttttaccactccttgtagactggtacggcctgtgcagaacttagcattgggcaaagaagagctaattggaactatggaacagatcttcatgaatgtcgctatctttgaggatgaagtttttgctggagttaccacacaccaggaactctttccacacagcctgctgagtgtgattgccaacttcatccctttctctgatcacaaccagagtccacggaacatgtaccaatgccagatgggtaagcaaactatgggctttccacttctcacttatcaagaccgatcggataacaaactgtatcgtcttcagactcctcagagtcccttggtgagaccctccatgtatgattattatgacatggataactatccaattgggaccaatgccatcgttgctgtgatttcttacactggctatgatatggaagatgccatgattgtgaataaggcctcttgggaacgaggctttgcccatggaagtgtctacaagtctgagttcatagacctctctgaaaaaattaaacaaggagatagtagcctggtgtttggcatcaaacctggtgacccacgcgttctgcagaagttagatgacgatggattgccgtttataggagcaaaactgcagtacggagatccgtattacagctacctcaacctcaacaccggggaaagttttgtgatgtactataagagtaaagaaaattgtgttgtggataacatcaaagtgtgcagtaatgacactgggagtggaaaattcaagtgtgtttgcatcactatgagagtgcctcggaacccaactatcggagataaatttgccagtcgccatgggcagaagggcattttaagcagattgtggccggctgaggacatgccttttactgagagtgggatggtcccagacattctgttcaatccccatggttttccatcccgcatgaccattgggatgttaattgagagtatggccgggaagtctgcagctttgcatggtctctgccatgatgctacacccttcatcttctcagaggagaactcggccttagaatactttggtgagatgttaaaggctgctggctacaatttctatggcaccgagaggttatatagtggcatcagtgggctagaactggaagcagacatcttcataggagtggtttattatcagcgcttacgccatatggtctcagacaaatttcaagtaaggacaactggagcccgagacagagtcaccaaccagcctattgggggaagaaatgtccagggtggaatccgttttggggagatggaacgggatgcgcttttagctcatggtacatcttttctccttcatgaccgcctcttcaactgctcagatcggtcggtagcccatgtgtgtgtgaagtgtggcagtttactctctccactgttggagaagccacccccttcttggtctgccatgcgcaacagaaaatacaactgtactctgtgtagtcgcagtgacactatcgatactgtttctgtgccttatgtttttcggtattttgtagctgaactggcagctatgaacatcaaagtgaaactggatgttgtttaacttgatgttgaccttttggattaagaggactatcagattaaagcaaaatgtaattttaattcaatgaagatatcattaccaggttactcttgagatttttcaacggtgttagaactctcaaccaagacctg

SEQ ID NO: 200996 - DNA, 3408 bp, Artificial Sequence
  derived and/or modified sequence
atggaccccggcagccggtggcggaacctgcccagcggccccagcttaaagcatctgaccgaccctagctacggaatcccacgggaacagcaaaaggctgccctgcaggagttgactcgagcacacgttgaaagcttcaattacgccgtgcatgagggcctcggcttggcagtgcaggccatccctcctttcgagttcgcattcaaagacgagaggatctccttcactatcctggatgccgttatctctcctcctacggtacctaaaggtaccatctgcaaagaggccaatgtctacccagcagaatgccgcggccggcgctcgacctacagaggaaagctcactgccgatattaactgggcagtgaatggaatttcaaagggaataatcaaacagtttctcggctacgttccaatcatggttaaatccaagctttgcaacctgcgcaatcttcccccgcaggccttgattgaacaccatgaggaggcagaggaaatgggaggctatttcatcataaacggaatcgagaaagtgataaggatgctgatcatgccccgccggaattttcctattgccatgattcggccgaaatggaaaactcgggggcccgggtatacccagtatggcgtttccatgcactgcgtccgagaggagcacagcgccgtgaatatgaacttgcactacctcgagaacggcaccgtaatgctgaatttcatctacagaaaggagctgttttttctgcccctgggattcgcgctgaaggctttagtctcgttcagtgactaccagatttttcaggagctcattaaggggaaggaggacgacagtttcttacggaactctgtttcccaaatgctgcgcatagtcatggaagagggctgtagcacccaaaaacaggtcctcaattacttgggggagtgttttagagtgaagttgaacgtgcctgattggtatccaaacgagcaggccgcagagttcctatttaatcaatgcatatgcatacatctgaaaagcaacaccgaaaaattttatatgttgtgcctgatgacacgtaaactctttgctttagcaaagggcgagtgtatggaagacaatccggatagcttggtgaaccaggaagtcttgactcctgggcaattatttctgatgttcttgaaggagaagctggagggctggctggtgagtatcaaaatcgcttttgacaagaaagcacagaaaacctctgttagcatgaacaccgacaacctaatgagaatcttcaccatgggtatcgacctcaccaagccgttcgagtatctgtttgcaaccggaaatctccgctccaagaccgggctcggactgctacaggactctgggctctgcgtggtcgctgacaagttgaatttcataagatacctgtcacatttccggtgcgttcatcggggtgctgattttgctaaaatgcgcacaactacagttagaagactgttgccagaaagctggggatttctttgtcctgtgcatacccccgacggcgaaccatgcgggctaatgaatcatcttacggctgtatgtgaagtggtcacccagttcgtctatacagctagcatccccgcgttgctctgtaatctcggggtcacacccattgacggagccccccacaggtcctactccgagtgctatccagtgctgttagacggggttatggttggctgggtggacaaggatttggcccccggcattgccgattctctgaggcactttaaagtgttaagagagaaacgcatcccgccatggatggaggtcgtcctgattcccatgacaggaaagccatctttataccctggcctgtttctgttcacgaccccttgcagacttgtcagacccgtgcaaaatcttgcccttgggaaggaggaactaatcggcacaatggagcagatcttcatgaatgtagcgatttttgaggatgaggtatttgcaggagtgacaacacatcaggagttgttcccgcattcactgctgtctgtaatcgcaaacttcatacccttttctgatcacaaccagagtccacgtaacatgtatcagtgccagatggggaagcagaccatgggctttccactgctgacttatcaggatcggagcgataataaactgtatcgattgcagacccctcagagtccgttggtgaggccctccatgtacgactactatgatatggataattacccgattgggaccaatgcaatcgtcgctgttatcagctacacaggttacgatatggaagacgctatgattgtcaacaaagctagctgggagcggggattcgctcacggttcagtttacaagtctgaattcatagatctgagtgagaaaatcaaacagggggacagttccctcgtttttggaataaaacctggagacccgagggtgttacaaaaacttgacgatgatgggttgcccttcatcggcgccaagttgcagtacggagacccatattactcttatctcaatttgaacacaggggagagcttcgtcatgtattataaatcgaaggaaaattgcgtggtggataacatcaaagtatgcagcaatgacacgggaagtggaaagtttaaatgcgtttgcattaccatgagggtgccaaggaatcccacaatcggagataagtttgccagccgccacggtcaaaaagggatactctctagactgtggcccgccgaggatatgccatttactgaatcgggcatggtccctgacatcctcttcaatcctcacggctttccctctcgcatgacaatcgggatgcttattgagtcaatggccggcaaaagcgccgctctacacggactgtgccacgatgccactccattcattttctccgaagagaacagtgccttagaatactttggggagatgttgaaggctgcaggctacaatttctacggtacagagcgcctgtactccggaatttccggactcgaactggaggccgacatcttcatcggtgttgtttactatcaacggctgagacacatggtctccgataagttccaggtgcggactactggtgccagagacagggtgaccaaccagcctatcggggggaggaatgtacagggcgggattaggttcggcgagatggagcgggacgcattactggcccacggcacatcgtttctgctccatgatagactcttcaattgctcagatcgatccgtggcccacgtgtgcgtgaaatgtggaagtctgctcagcccattacttgagaagccgcctccgagttggtccgctatgagaaatcgtaagtataattgcactctgtgcagtcggagtgacactattgacactgtctctgttccttacgtcttccgatattttgtggcagagcttgcggccatgaatatcaaggtgaaactggacgtggtctag

SEQ ID NO: 200997 - DNA, 2775 bp, Artificial Sequence
  derived and/or modified sequence
atgcactgcgtgcgggaggagcacagcgccgtgaacatgaacctgcactacctggagaacggcaccgtaatgttgaactttatataccgcaaggagctgttcttcctacccctcggattcgcactcaaggctctggtttcatttagtgactaccaaatctttcaggagctgattaaaggaaaagaggatgacagctttcttaggaactcagtttcacagatgctgcgcatcgtgatggaagaagggtgttcaacccagaaacaggtattgaactacttgggggagtgctttcgagttaagctgaatgtgcccgactggtacccaaatgagcaggctgccgagtttctgttcaaccaatgtatttgcattcatcttaagagtaacactgaaaaattctacatgctctgcctaatgactcgtaagctgtttgcccttgcaaagggagagtgtatggaggacaacccagactctctggtgaaccaggaagtcctcactcctggtcaactgttcctaatgttcttgaaggagaagctggaggggtggctagtctcaatcaagatcgcgttcgacaaaaaggcacagaagaccagcgtgtccatgaacaccgataatctcatgaggattttcacaatgggtatcgatctcaccaagcccttcgaatatctgtttgccaccggcaatcttcgctctaaaaccggattggggctgctccaggactccggactgtgtgtggtcgcggacaagttaaatttcattcgctacctgtcacacttccgctgcgtccatcgcggtgcagattttgccaagatgaggacaaccaccgtgcgacggctgctgcccgaatcctggggattcttgtgtcctgtacatacccctgatggagagccttgtgggctgatgaatcatttaacagccgtctgcgaggttgtaacacagtttgtatacaccgcttctataccagccctcctgtgcaacctgggagttactcccattgatggcgcgcctcaccgaagttacagtgagtgttatccagtgctgttggatggcgtgatggttggctgggtggacaaagacctggcacctggcattgccgacagcctgcggcacttcaaggtgttgagggagaaacgcattcccccctggatggaagtggtgttgatccccatgactggaaagccttctctttaccctggactgtttctgttcaccacaccctgccgactggtgcgcccagtgcaaaatttggctttggggaaggaggagttaatcggcacgatggagcagatctttatgaatgttgctattttcgaggacgaggtgttcgccggtgtgacaacacaccaggagctgtttccccactccctgctctcagtgattgccaatttcattcctttctcagaccacaatcagtctccccgcaatatgtatcaatgccagatggggaagcagactatggggtttcctctgttgacataccaggacaggtcagacaacaagctgtacagactgcagaccccgcagagtcccctggtaagacctagtatgtacgactactacgatatggacaattatcccatcggcaccaacgccattgtggccgtcatctcttatactggatatgatatggaagacgccatgatcgttaataaggcatcatgggaacgcgggttcgctcacggatccgtgtacaaatctgagtttattgatctatctgaaaagatcaagcagggagactcttcgctggtgtttggaataaaaccaggggaccccagggttctgcagaaactagatgacgatggcctccctttcatcggcgctaaactccagtacggcgacccctactatagctatctgaacctcaataccggagagtcctttgtaatgtattacaaaagcaaggagaactgtgttgtcgataatatcaaagtctgcagcaatgataccgggtctgggaagttcaagtgcgtgtgcatcacaatgagagtacccagaaatccaacaattggtgataagtttgctagccgccacgggcaaaagggcattctttccagattatggccagctgaagacatgcctttcacagagagcggcatggttccagatattctctttaatccacacgggtttccctccagaatgaccataggaatgctcattgagtcgatggctggaaagtccgccgcattacacggactttgtcatgatgccaccccttttatcttttctgaggaaaattcagctctagagtactttggagaaatgttaaaagctgccggctacaatttctacggaactgaaagactctactcaggtatcagtggcctggagcttgaagcagatatattcattggggtagtgtactatcagagactgcgccatatggtaagtgataagtttcaggtaaggacaacaggagcacgcgacagggttaccaaccagcctatagggggccgtaacgtgcagggcgggattcgatttggagagatggagcgggatgccctcctggctcatggtacttccttcctgctccatgataggctctttaactgctcagaccgcagtgtggcacatgtgtgcgtcaaatgcgggtcccttcttagccctctgctggagaaacccccgccatcctggagcgccatgcggaatcggaagtataactgtacattgtgcagtagatcagacacaattgatacagtttctgtgccatacgtgtttaggtattttgtggccgagctcgcagccatgaatattaaggtaaaactggatgttgtatag

SEQ ID NO: 200998 - DNA, 3408 bp, Artificial Sequence
  derived and/or modified sequence
atggatcctggctcccgctggcggaacctcccgagtggcccatccttaaaacacctgactgatccctcctacggcattccgagagagcaacaaaaagcagccctccaggagctcactcgggctcacgtcgagagctttaactatgccgtgcatgaaggcctgggcctggctgtacaggccattccaccattcgagttcgcgttcaaagacgaacggatcagcttcacaatacttgacgctgtgatctccccacctaccgttcccaaaggcacaatttgcaaggaggctaacgtctaccctgcggagtgccgcggtaggagatccacctacaggggaaaactcaccgccgacatcaattgggctgtgaatggcattagtaaggggatcatcaaacaattcctcggttatgtccccatcatggtgaagagcaagctctgtaatctccgcaacttgcctcctcaagctttaattgaacatcatgaagaggcggaggagatggggggttacttcattattaatggtattgaaaaagtaattcggatgctgataatgccccgacgtaacttccctattgccatgatccgccctaagtggaagacgcgtgggccaggatacacacagtacggcgtgagcatgcactgtgtgcgagaagagcatagcgctgtgaatatgaacttgcactacttggagaatggaaccgtgatgttgaacttcatatacagaaaagaactcttctttctgcccttgggttttgctctgaaagccctcgtgtcttttagcgactatcaaatctttcaagagctgatcaaaggaaaggaggacgattcgttcttgcgcaactcagttagccagatgctccgcatcgtcatggaggaaggatgttcaacccagaaacaggtactgaattacttgggagaatgtttcagggtgaagctgaacgtgcctgactggtacccgaacgaacaggctgctgagttcctattcaatcagtgcatctgcattcacctaaagagcaataccgaaaaattctacatgctgtgcctcatgacacgcaaactattcgctctcgccaagggtgaatgtatggaggacaatccggatagcctcgttaatcaagaagtcctgaccccagggcagctctttctgatgttcctcaaggaaaaacttgaggggtggttagtgtccattaagattgcctttgacaagaaggcccagaaaacttctgtgtcaatgaataccgacaatctcatgcggatttttaccatggggatcgacctcacaaagccattcgaatatctctttgccacaggtaacctcagaagtaaaaccggtctggggcttttacaggatagtgggttgtgtgtggttgccgacaagctgaatttcatccgttacctgagtcacttcagatgcgtccatagaggagctgactttgcgaagatgaggaccacaactgtgcgtcggcttttacctgaatcttggggttttctttgtccagtgcatacccctgatggagagccctgtgggttaatgaatcatctgacggcagtttgtgaagtggttacccagttcgtgtacacagcttctatacctgcacttttgtgcaacctaggagttacacccatcgatggcgcaccacatcgcagttattctgaatgttacccagtcctgctagacggggtgatggtggggtgggtggacaaggatttggcaccaggaatcgcagacagtctccgccacttcaaggtattaagggagaagaggatcccgccttggatggaggtagttctaattccaatgacggggaaaccttcgttatatcccggactgttcctgttcactactccttgtcggctagtacgccctgtgcagaacctggcgctgggaaaagaagagctgattgggactatggagcagatctttatgaacgtcgcaattttcgaggacgaagtgtttgctggtgttacaacacaccaggaactgttcccacactccctgcttagtgtgatcgccaactttatccccttttcagatcacaatcagtcgcccaggaatatgtaccagtgccaaatgggaaagcagacaatggggttcccattgctgacctatcaggacaggtccgacaacaaactttaccggctgcagactcctcagtcaccactggtcagacccagcatgtacgactactacgatatggataactatccaatcgggacaaacgctatcgtcgcagtcatatcttatacaggttacgacatggaggatgctatgattgttaacaaagcctcatgggaacgtggatttgctcacgggtcagtttataagtcagagttcattgacctgtccgagaagatcaaacagggcgactctagcctggtgtttggaattaaacccggagatccacgagtcctgcaaaagctggatgacgacggcctgcctttcatcggcgcaaagctgcaatatggagacccctattattcgtatctgaaccttaatactggcgaatcctttgtgatgtactacaagagcaaggaaaactgcgtagttgataatattaaagtgtgttccaacgacacggggtctgggaagtttaaatgcgtctgcattacgatgagagtgccccgaaatccaaccattggtgacaagttcgcctcaagacatgggcagaaagggatactgtcccgactgtggcctgcagaggacatgccttttacagagtcaggtatggtgcccgacatattgttcaacccgcacggattccctagccggatgaccataggaatgctgatcgaaagtatggcagggaagagcgctgcacttcacggtttgtgtcatgacgccacacctttcatcttctctgaggaaaattcagccctggaatatttcggggagatgctcaaagcagcgggatataatttttatggcacagagcgcctttacagcggcatcagcggattggagctcgaggccgacatcttcatcggagtggtgtactaccagagactgcggcacatggtgagtgataaattccaggtgaggacgactggggcaagggatcgtgtgacaaatcagcctatcggtggtagaaatgtacagggagggattagatttggcgaaatggagagagatgctctgctcgcccacggcacgagtttcctgctgcacgataggctttttaactgctccgaccgttccgtggcccatgtttgtgtgaaatgtggctcattgctctctcccctcctagaaaaaccgcctccgtcttggagcgccatgaggaataggaagtataactgtacgctctgttctagaagcgacacaatagacacagtatcggtgccctacgtgtttcgctacttcgttgccgagctcgctgcaatgaacataaaggtgaagcttgatgtagtatag

SEQ ID NO: 200999 - DNA, 2775 bp, Artificial Sequence
  derived and/or modified sequence
atgcattgtgtgcgtgaagaacacagcgctgtcaatatgaatctccattacctggaaaatggaaccgtgatgctgaatttcatttaccggaaagaactcttcttcctaccactcgggtttgctctgaaggccttggtctccttttctgattaccaaatattccaagagctcatcaagggaaaggaggacgattcatttttgaggaacagcgtcagccagatgctgagaattgtaatggaggaagggtgttctacccagaagcaagtcctgaactatctaggtgagtgtttccgagtaaaactgaacgtcccagattggtatccaaacgaacaggctgcagagtttttgttcaatcaatgtatctgtatccacctgaagtcaaacacagagaaattctatatgctttgccttatgacacggaaactgttcgccttggcgaaaggcgagtgtatggaggacaacccagactctctggtgaaccaagaggtcctgacccctggtcagctctttctgatgttcctcaaggagaaactcgaaggctggctcgtgtcaatcaagatcgcctttgacaagaaggcacagaagacctcagtctcaatgaatactgacaaccttatgagaatctttacaatgggcattgacctgacgaaaccgttcgagtatctgtttgctaccggaaaccttagatccaagacgggccttggactgcttcaggacagcggcttatgtgtcgtagctgataagctgaatttcatcaggtaccttagccacttcaggtgtgtgcatagaggagcggacttcgccaaaatgcggaccactactgtgcgtaggctgctgcccgaaagctggggcttcctctgccctgtccacaccccggacggagaaccatgtggccttatgaaccatctgacagctgtttgtgaggtggtgacacagttcgtgtacacagcttctatcccggcactgctgtgcaatttaggtgtgacaccaatcgatggtgcccctcacagaagctattccgagtgctatcccgtgctgcttgacggcgttatggtcggctgggtggataaggatctggctccaggaattgcggactccctgaggcacttcaaagtgctacgcgaaaaacggatcccaccctggatggaagttgtgttgatacccatgacaggaaagccctctctgtaccccggactattcctgtttactacaccgtgcagactggtccggccagtccagaatcttgctctgggtaaggaagagctaatagggactatggagcaaatatttatgaatgtggctattttcgaagatgaggtattcgcaggtgttactacacatcaggagttgtttccacattcactacttagtgtgattgccaacttcatcccattttccgatcacaaccaatccccgaggaacatgtaccagtgtcagatgggaaagcagactatgggcttccctctcctgacctaccaggacaggtctgataacaagctgtacaggctacagactccacagtcacctctagtccggccaagcatgtatgactattacgatatggataactaccccatcgggactaacgccatcgtcgccgtaattagctacacaggctatgacatggaagatgccatgattgtgaacaaagctagttgggaaagaggctttgcccacggaagcgtctacaaatcagagttcattgacctatccgagaaaattaaacagggggattcttcactggtgtttggaattaagcctggggacccccgagtgctgcaaaaactcgatgacgacggccttccttttattggagccaagcttcagtacggagatccatactattcttaccttaatctgaatacaggcgagtcctttgttatgtactacaagtccaaagagaattgcgtggtggataatatcaaggtttgtagcaacgacactggtagcgggaagttcaaatgtgtttgcattaccatgcgggtaccaaggaatcccacgattggggacaagtttgcctcccggcacggacagaagggcattctgagccgactgtggccagcagaggacatgccatttacggagtccggcatggtcccagatatccttttcaacccccacggtttcccctccaggatgaccattggcatgttaatcgagtccatggcaggcaaatcagctgcactacacggtctctgccacgatgccacaccgtttatattctccgaggagaatagcgcgctggagtattttggtgagatgctgaaagccgctggctataatttttacggaactgagagactatacagcggcatcagtggtctcgagctggaagccgacattttcatcggggtggtatattaccagcgactgcgccacatggtgagcgacaagtttcaggtccggacaactggcgcacgggaccgggtaaccaatcagccaattggcggacgcaatgtacagggaggcatccgttttggcgagatggaaagggacgctctgctggcccacgggaccagtttcctgctgcatgacaggctattcaattgtagcgacaggagtgtagcccacgtctgtgtcaaatgtggatcacttttgtccccattgctcgagaagcctcctccatcttggagtgccatgcgcaacaggaagtataattgtactttatgcagtcgttctgatacaattgatacagtctctgtcccctacgtgttccgttacttcgtggccgagctggcagcgatgaatattaaggtgaagctggacgtcgtctag

SEQ ID NO: 201000 - DNA, 3408 bp, Artificial Sequence
  derived and/or modified sequence
atggaccccggcagcagatggagaaacctgcccagcggccccagcctgaagcacctgaccgaccccagctacggcatccccagagagcagcagaaggccgccctgcaggagctgaccagagcccacgtggagagcttcaactacgccgtgcacgagggcctgggcctggccgtgcaggccatcccccccttcgagttcgccttcaaggacgagagaatcagcttcaccatcctggacgccgtgatcagcccccccaccgtgcccaagggcaccatctgcaaggaggccaacgtgtaccccgccgagtgcagaggcagaagaagcacctacagaggcaagctgaccgccgacatcaactgggccgtgaacggcatcagcaagggcatcatcaagcagttcctgggctacgtgcccatcatggtgaagagcaagctgtgcaacctgagaaacctgcccccccaggccctgatcgagcaccacgaggaggccgaggagatgggcggctacttcatcatcaacggcatcgagaaggtgatcagaatgctgatcatgcccagaagaaacttccccatcgccatgatcagacccaagtggaagaccagaggccccggctacacccagtacggcgtgagcatgcactgcgtgagagaggagcacagcgccgtgaacatgaacctgcactacctggagaacggcaccgtgatgctgaacttcatctacagaaaggagctgttcttcctgcccctgggcttcgccctgaaggccctggtgagcttcagcgactaccagatcttccaggagctgatcaagggcaaggaggacgacagcttcctgagaaacagcgtgagccagatgctgagaatcgtgatggaggagggctgcagcacccagaagcaggtgctgaactacctgggcgagtgcttcagagtgaagctgaacgtgcccgactggtaccccaacgagcaggccgccgagttcctgttcaaccagtgcatctgcatccacctgaagagcaacaccgagaagttctacatgctgtgcctgatgaccagaaagctgttcgccctggccaagggcgagtgcatggaggacaaccccgacagcctggtgaaccaggaggtgctgacccccggccagctgttcctgatgttcctgaaggagaagctggagggctggctggtgagcatcaagatcgccttcgacaagaaggcccagaagaccagcgtgagcatgaacaccgacaacctgatgagaatcttcaccatgggcatcgacctgaccaagcccttcgagtacctgttcgccaccggcaacctgagaagcaagaccggcctgggcctgctgcaggacagcggcctgtgcgtggtggccgacaagctgaacttcatcagatacctgagccacttcagatgcgtgcacagaggcgccgacttcgccaagatgagaaccaccaccgtgagaagactgctgcccgagagctggggcttcctgtgccccgtgcacacccccgacggcgagccctgcggcctgatgaaccacctgaccgccgtgtgcgaggtggtgacccagttcgtgtacaccgccagcatccccgccctgctgtgcaacctgggcgtgacccccatcgacggcgccccccacagaagctacagcgagtgctaccccgtgctgctggacggcgtgatggtgggctgggtggacaaggacctggcccccggcatcgccgacagcctgagacacttcaaggtgctgagagagaagagaatccccccctggatggaggtggtgctgatccccatgaccggcaagcccagcctgtaccccggcctgttcctgttcaccaccccctgcagactggtgagacccgtgcagaacctggccctgggcaaggaggagctgatcggcaccatggagcagatcttcatgaacgtggccatcttcgaggacgaggtgttcgccggcgtgaccacccaccaggagctgttcccccacagcctgctgagcgtgatcgccaacttcatccccttcagcgaccacaaccagagccccagaaacatgtaccagtgccagatgggcaagcagaccatgggcttccccctgctgacctaccaggacagaagcgacaacaagctgtacagactgcagaccccccagagccccctggtgagacccagcatgtacgactactacgacatggacaactaccccatcggcaccaacgccatcgtggccgtgatcagctacaccggctacgacatggaggacgccatgatcgtgaacaaggccagctgggagagaggcttcgcccacggcagcgtgtacaagagcgagttcatcgacctgagcgagaagatcaagcagggcgacagcagcctggtgttcggcatcaagcccggcgaccccagagtgctgcagaagctggacgacgacggcctgcccttcatcggcgccaagctgcagtacggcgacccctactacagctacctgaacctgaacaccggcgagagcttcgtgatgtactacaagagcaaggagaactgcgtggtggacaacatcaaggtgtgcagcaacgacaccggcagcggcaagttcaagtgcgtgtgcatcaccatgagagtgcccagaaaccccaccatcggcgacaagttcgccagcagacacggccagaagggcatcctgagcagactgtggcccgccgaggacatgcccttcaccgagagcggcatggtgcccgacatcctgttcaacccccacggcttccccagcagaatgaccatcggcatgctgatcgagagcatggccggcaagagcgccgccctgcacggcctgtgccacgacgccacccccttcatcttcagcgaggagaacagcgccctggagtacttcggcgagatgctgaaggccgccggctacaacttctacggcaccgagagactgtacagcggcatcagcggcctggagctggaggccgacatcttcatcggcgtggtgtactaccagagactgagacacatggtgagcgacaagttccaggtgagaaccaccggcgccagagacagagtgaccaaccagcccatcggcggcagaaacgtgcagggcggcatcagattcggcgagatggagagagacgccctgctggcccacggcaccagcttcctgctgcacgacagactgttcaactgcagcgacagaagcgtggcccacgtgtgcgtgaagtgcggcagcctgctgagccccctgctggagaagcccccccccagctggagcgccatgagaaacagaaagtacaactgcaccctgtgcagcagaagcgacaccatcgacaccgtgagcgtgccctacgtgttcagatacttcgtggccgagctggccgccatgaacatcaaggtgaagctggacgtggtgtag

SEQ ID NO: 201001 - DNA, 2775 bp, Artificial Sequence
  derived and/or modified sequence
atgcactgcgtgagagaggagcacagcgccgtgaacatgaacctgcactacctggagaacggcaccgtgatgctgaacttcatctacagaaaggagctgttcttcctgcccctgggcttcgccctgaaggccctggtgagcttcagcgactaccagatcttccaggagctgatcaagggcaaggaggacgacagcttcctgagaaacagcgtgagccagatgctgagaatcgtgatggaggagggctgcagcacccagaagcaggtgctgaactacctgggcgagtgcttcagagtgaagctgaacgtgcccgactggtaccccaacgagcaggccgccgagttcctgttcaaccagtgcatctgcatccacctgaagagcaacaccgagaagttctacatgctgtgcctgatgaccagaaagctgttcgccctggccaagggcgagtgcatggaggacaaccccgacagcctggtgaaccaggaggtgctgacccccggccagctgttcctgatgttcctgaaggagaagctggagggctggctggtgagcatcaagatcgccttcgacaagaaggcccagaagaccagcgtgagcatgaacaccgacaacctgatgagaatcttcaccatgggcatcgacctgaccaagcccttcgagtacctgttcgccaccggcaacctgagaagcaagaccggcctgggcctgctgcaggacagcggcctgtgcgtggtggccgacaagctgaacttcatcagatacctgagccacttcagatgcgtgcacagaggcgccgacttcgccaagatgagaaccaccaccgtgagaagactgctgcccgagagctggggcttcctgtgccccgtgcacacccccgacggcgagccctgcggcctgatgaaccacctgaccgccgtgtgcgaggtggtgacccagttcgtgtacaccgccagcatccccgccctgctgtgcaacctgggcgtgacccccatcgacggcgccccccacagaagctacagcgagtgctaccccgtgctgctggacggcgtgatggtgggctgggtggacaaggacctggcccccggcatcgccgacagcctgagacacttcaaggtgctgagagagaagagaatccccccctggatggaggtggtgctgatccccatgaccggcaagcccagcctgtaccccggcctgttcctgttcaccaccccctgcagactggtgagacccgtgcagaacctggccctgggcaaggaggagctgatcggcaccatggagcagatcttcatgaacgtggccatcttcgaggacgaggtgttcgccggcgtgaccacccaccaggagctgttcccccacagcctgctgagcgtgatcgccaacttcatccccttcagcgaccacaaccagagccccagaaacatgtaccagtgccagatgggcaagcagaccatgggcttccccctgctgacctaccaggacagaagcgacaacaagctgtacagactgcagaccccccagagccccctggtgagacccagcatgtacgactactacgacatggacaactaccccatcggcaccaacgccatcgtggccgtgatcagctacaccggctacgacatggaggacgccatgatcgtgaacaaggccagctgggagagaggcttcgcccacggcagcgtgtacaagagcgagttcatcgacctgagcgagaagatcaagcagggcgacagcagcctggtgttcggcatcaagcccggcgaccccagagtgctgcagaagctggacgacgacggcctgcccttcatcggcgccaagctgcagtacggcgacccctactacagctacctgaacctgaacaccggcgagagcttcgtgatgtactacaagagcaaggagaactgcgtggtggacaacatcaaggtgtgcagcaacgacaccggcagcggcaagttcaagtgcgtgtgcatcaccatgagagtgcccagaaaccccaccatcggcgacaagttcgccagcagacacggccagaagggcatcctgagcagactgtggcccgccgaggacatgcccttcaccgagagcggcatggtgcccgacatcctgttcaacccccacggcttccccagcagaatgaccatcggcatgctgatcgagagcatggccggcaagagcgccgccctgcacggcctgtgccacgacgccacccccttcatcttcagcgaggagaacagcgccctggagtacttcggcgagatgctgaaggccgccggctacaacttctacggcaccgagagactgtacagcggcatcagcggcctggagctggaggccgacatcttcatcggcgtggtgtactaccagagactgagacacatggtgagcgacaagttccaggtgagaaccaccggcgccagagacagagtgaccaaccagcccatcggcggcagaaacgtgcagggcggcatcagattcggcgagatggagagagacgccctgctggcccacggcaccagcttcctgctgcacgacagactgttcaactgcagcgacagaagcgtggcccacgtgtgcgtgaagtgcggcagcctgctgagccccctgctggagaagcccccccccagctggagcgccatgagaaacagaaagtacaactgcaccctgtgcagcagaagcgacaccatcgacaccgtgagcgtgccctacgtgttcagatacttcgtggccgagctggccgccatgaacatcaaggtgaagctggacgtggtgtag

SEQ ID NO: 201002 - protein, 356 aa, Artificial Sequence
  derived and/or modified sequence
MAATRSPTRARERERSGAPAAGSDQVHSWMLATSQALDTVWRMAKGFVMLAVSFLVAAICYFRRLHLYSGHKLKWWIGYLQRKFKRNLSVEAEVDLLSYCAREWKGETPRNKLMRKAYEELFWRHHIKCVRQVRRDNYDALRSVLFQIFSQGISFPSWMKEKDIVKLPEKLLFSQGCNWIQQYSFGPEKYTGSNVFGKLRKYVELLKTQWTEFNGIRDYHKRGSMCNTLFSDAILEYKLYEALKFIMLYQVTEVYEQMKTKKVIPSLFRLLFSRETSSDPLSFMMNHLNSVGDTCGLEQIDMFILGYSLEVKIKVFRLFKFNSRDFEVCYPEEPLRDWPEISLLTENDRHYHIPVF

SEQ ID NO: 201003 - DNA, 1071 bp, Artificial Sequence
  derived and/or modified sequence
atggccgccaccagaagccccaccagagccagagagagagagagaagcggcgcccccgccgccggcagcgaccaggtgcacagctggatgctggccaccagccaggccctggacaccgtgtggagaatggccaagggcttcgtgatgctggccgtgagcttcctggtggccgccatctgctacttcagaagactgcacctgtacagcggccacaagctgaagtggtggatcggctacctgcagagaaagttcaagagaaacctgagcgtggaggccgaggtggacctgctgagctactgcgccagagagtggaagggcgagacccccagaaacaagctgatgagaaaggcctacgaggagctgttctggagacaccacatcaagtgcgtgagacaggtgagaagagacaactacgacgccctgagaagcgtgctgttccagatcttcagccagggcatcagcttccccagctggatgaaggagaaggacatcgtgaagctgcccgagaagctgctgttcagccagggctgcaactggatccagcagtacagcttcggccccgagaagtacaccggcagcaacgtgttcggcaagctgagaaagtacgtggagctgctgaagacccagtggaccgagttcaacggcatcagagactaccacaagagaggcagcatgtgcaacaccctgttcagcgacgccatcctggagtacaagctgtacgaggccctgaagttcatcatgctgtaccaggtgaccgaggtgtacgagcagatgaagaccaagaaggtgatccccagcctgttcagactgctgttcagcagagagaccagcagcgaccccctgagcttcatgatgaaccacctgaacagcgtgggcgacacctgcggcctggagcagatcgacatgttcatcctgggctacagcctggaggtgaagatcaaggtgttcagactgttcaagttcaacagcagagacttcgaggtgtgctaccccgaggagcccctgagagactggcccgagatcagcctgctgaccgagaacgacagacactaccacatccccgtgttctag

SEQ ID NO: 201004 - DNA, 1071 bp, Artificial Sequence
  derived and/or modified sequence
atggccgctacacggagcccaacacgagccagggagcgcgaacgcagtggggctcccgctgcaggatccgatcaagtgcattcatggatgttggccacgagtcaggccctagacacggtgtggcggatggctaaaggatttgtgatgctcgccgtgtccttcctcgttgcggccatatgttattttaggagacttcatctctattctgggcacaagctgaaatggtggatcgggtatctgcagcggaagttcaaaaggaacctgtccgtagaagctgaggttgaccttctgtcttactgcgcgagggagtggaagggtgagacaccaaggaacaagttaatgcggaaggcatatgaagagttattttggcggcaccatattaagtgtgttcgccaagtacgccgcgataactacgatgctcttcggtccgtgctgtttcagattttctcacagggcatttcctttccctcttggatgaaagagaaagatatcgtcaaactcccggaaaaacttttattctcccagggttgtaactggattcaacagtactcatttgggcccgaaaagtatactgggtccaatgttttcgggaaattgagaaagtacgtggagcttctgaaaacacagtggacggagtttaacggaatccgcgactaccataaacggggaagtatgtgcaatacgctgttcagtgacgccatcttggagtacaaattgtacgaggcactgaagttcattatgctgtatcaagtcacagaggtttacgagcaaatgaaaacaaagaaggtcattccctcactgtttagactgttgtttagccgcgagacgtccagcgatccactcagctttatgatgaaccatttgaattctgtgggcgatacgtgtgggttagagcagatcgatatgtttatactgggttatagtctggaggtgaaaataaaagtcttccggctttttaagtttaatagtcgagatttcgaagtgtgttatcctgaggagcccctaagagattggcctgaaatctcgctactgaccgagaacgatcgacactaccatatcccagtgttttag

SEQ ID NO: 201005 - DNA, 3597 bp, Artificial Sequence
  derived and/or modified sequence
cccgccctccccagcccgcctcagggaagcgagcccgggcgccggcgggcggccgtcgcgtctgacagaccactgcagaccacgggccgaggcccagcgcccgtccgcagcgcggccggcatggcggcgacaaggagccccacgcgggcaagggagcgggagcggtctggcgctcccgccgcaggaagtgaccaagttcactcctggatgctagctacaagccaagccttagacactgtctggagaatggcaaaaggctttgtgatgttggcagtttcatttctggtggctgccatctgctacttccggaggctacatttatattcagggcacaagctgaaatggtggattggatatctgcagagaaaattcaaaaggaacctcagtgtggaggcagaggttgatttactcagttattgtgcaagagaatggaaaggagagacaccccgtaacaagctgatgaggaaggcttatgaggagctattttggcggcatcacattaaatgtgttcgacaagtaaggagagataactatgatgctctcagatcagtgttatttcagatattcagccagggcatctcttttccatcatggatgaaagaaaaggacattgttaagcttcctgaaaaactgctgttttcacaaggttgtaattggattcagcagtacagttttggtcctgagaagtatacaggctcgaatgtgtttggaaaactacggaaatatgtggaattattgaaaacacagtggactgaatttaatggcattagagattatcacaagagaggaagtatgtgcaacacccttttttcagatgccattctggaatataaactttatgaagctttaaagttcatcatgctgtatcaagtcactgaagtttatgaacaaatgaagactaaaaaggtcattcccagtctttttagactcctgttttccagggagacatcctctgatcctttgagcttcatgatgaatcacctgaattctgtaggcgacacatgtggactagagcagattgatatgtttatacttggatactcccttgaagtaaagataaaagtgttcagactgttcaagtttaactccagagactttgaagtctgctacccagaggagcctctcagggactggccggagatctccctgctgaccgagaacgaccgccactaccacattccagtcttttaagtccgctgggggccgaacagcagtgctcaccagtgacggtggtcacagttgcaataaagtctctctctgaaaccaaagctagcatttcagcatggaaggaattaggaccttttcttcaggattacaggtacactggatgcagccatgcatggatggtttttctttatttttcagtgatttcctctgaagcagctgcactgatacatttgggagttggtggcttgactttgtccataaggggcgtggccacttcacatgatggcgggcctttaagagcacaaagaagtttaatatggacaacaacaggaaaaagcaagaagaaaacaagtagggaaaaacagctaacctggagagaaagaatttctttaacctttatgttcttcattaaaaatcttatcttggactgatttgagggatttttagaaacatggccttattttatataagcattaccttcccaggaatctttgttgtatattaatttttgataaccatttgattaactttaaaattaagtatatgtgtgtatatatacatatgtatgtttatatacacacatgtatctgtatagttttatatatacatatatacacatagacatacagagaaccactactttgtaatagtgtacagtttgttttatatctctttactttttttgttactattttatctggccagcttaatagttttatttagattttttaaaattctgtagattaaagcaaatgacagttattgaactatcacaaaactattaaactgtggtacatttaatgtgtatttaatgtgtggaatctcattatggtaggcagaataatgccctatgctccccaaagatgtctgtgtctgaatcctcagagccgtaaagggctaaatgggttaaatgggaaaggagaattaaggttgcaggtggaactgagatgctaatccaatgatgctgaaatagggagatttttctagattctccaggtggacgcagtgtaatcagaatggttcttaaaagtggaagagggaattggaagagtgtcagagtcagaggggaatgtgaaatatggaagaacggttagagagagatgcaccattgctggctttgaagatggaggaaggggccataagccagggagttgcaggcagcctgtagaattgagactggaaaggaaacagaaacttccccatagcctccagaaggaacgcagccctgccaacaccttgattttagcccagtgaagcctgtgttggacctctaatctgcagaactgtaagataatagatttgtgtttaagccactaagtttgtggtaatgtgttgtagcaacagaaaactagtattctcaggctagtttttggtcgtctttattttggaaatacttttctagtttaatttgatagttttttttttggaggtactttgctagtctgttttgagtttcagtacataagaataatttttaaaatcttgctaattatatattacttcaaagtcacaaatccctttctaagaatgacttacttcacgagatatttagcactatcattttcccagatgttcatattatttctgcaataaattaaaagggagtgtgtcaaatgctgtcatgtctgaaattagcattcatattcttttgcaatggggatgatcagtcgtgtgtactacatgaaccatgtctgatggtagcttgttcccactgtcattttgttttctggttgaagattaatgagctcagccacagaaacaagagttcttcattgacctctacagtccctgcctgtttggaaacatctatggttttgtataacccctgtcatttaactgacagtgttagaagatatccccctgatgtgttactgtaaccaagaaagcatgaacgttaccctttctggtgacagcctgccatgggctgctgtggctgatacttatagaattgttgctccaaaattttggctccacttgagctgtccagaagtgtacctgacatttgtgtattaccactcaccttggatctccttactagtgtaattatttccacatcaatccaggactgaaaggaaaaattttttcaccaggattggcagcctgtagctctgtgacctcagtcaacccatcatgttgtgttgtgggcggggggcaagaattctttagagaaccaagttgcgagaaagatttcaatccagtgaaagtaaaaagtaagaagacatttagatagttgctatattttgggaagatgtcaaaacaggtttttagggaggaggtatgaggtgttgtgttgttttgtttgtttttattcagttgtataatgaatataacaaattaagtagccagaaggagctgcatgtaaattagcaccacttttaaatgtcaacaataaatttgaggtgagcttcctgggtgatgccaacatttaaa

SEQ ID NO: 201006 - DNA, 1071 bp, Artificial Sequence
  derived and/or modified sequence
atggccgccaccaggagccccacccgggcccgggagcgggagaggtctggggccccagctgctggcagtgaccaggtgcacagctggatgctggccaccagccaggccctggacacagtgtggaggatggccaagggctttgtgatgctggccgtgtccttcctggtggccgccatctgctacttccggcggctgcacctgtacagcggccacaagctgaagtggtggattggctacctgcagaggaagttcaagaggaacctgtctgtggaggccgaggtggacctgctgagctactgtgcccgggagtggaagggggagacccccaggaacaagctgatgaggaaggcctatgaggagctgttctggaggcaccacatcaagtgtgtgcggcaggtgcggcgggacaactatgatgccctgcggtctgtgctcttccagatcttcagccagggcatctccttccccagctggatgaaggagaaggacatcgtgaagctgcctgagaagctgctcttcagccagggctgcaactggatccagcagtacagctttggacctgagaagtacacaggcagcaatgtgtttgggaagctgaggaaatatgtggagctgctgaagacccagtggacagagttcaacggcatccgggactaccacaagaggggctccatgtgcaacaccctcttcagtgatgccatcctggagtacaagctgtatgaggccctgaagttcatcatgctgtaccaggtgacagaggtgtatgagcagatgaagaccaagaaggtgatccccagcctcttccggctgctcttcagccgggagaccagcagtgaccccctgtccttcatgatgaaccacctgaacagcgtgggggacacctgtggcctggagcagattgacatgttcatcctgggctacagcctggaggtgaagatcaaggtgttccgcctcttcaagttcaacagccgggactttgaggtgtgctacccagaggagcccctgcgggactggccagagatcagcctgctgacagaaaatgacagacactaccacatccctgtgttctag

SEQ ID NO: 201007 - DNA, 1071 bp, Artificial Sequence
  derived and/or modified sequence
atggccgccacccggagccccacccgggcccgggagcgggagcggtctggtgcacccgccgctgggtcagaccaggtgcattcctggatgttggccacgtctcaagccctggacaccgtctggaggatggcaaaaggctttgttatgcttgctgtttcttttctggttgctgcaatctgctactttagaagactccacttatattctggccacaagctcaagtggtggatcggctatctgcaaaggaaattcaaaaggaacttaagcgtggaggctgaagtggacttactctcatactgcgcgagagaatggaaaggcgaaactcctagaaataagttgatgaggaaggcctatgaagaattgttttggcggcaccacattaaatgtgtaagacaggtgagaagagacaactacgacgccctgaggagcgtgctcttccagatattttcacagggtatcagctttccaagttggatgaaagagaaagacatcgttaagctgcccgagaaattgctctttagccagggatgcaactggatccagcagtactcgttcggaccagagaaatacaccggatcaaatgtttttggaaaactgcgcaagtacgtggaactgctgaagacgcagtggaccgaatttaacggtatccgcgattaccataaacggggatctatgtgcaacaccctcttttccgacgcaattctcgagtacaagttgtacgaagctctgaaattcattatgctttaccaagttactgaggtgtacgaacagatgaagacaaagaaagttataccctctctattcagattgctgttctctcgcgaaacctcttcagatcctttgagcttcatgatgaaccaccttaactctgttggtgatacttgcggattggagcagatcgacatgtttattctgggttatagccttgaagtgaagattaaagtttttcggttgtttaagttcaatagtcgagacttcgaagtctgctatccagaagaacctctccgagactggcccgaaatctccctgttgactgagaatgatcgtcattaccatatcccggtcttctag

SEQ ID NO: 201008 - DNA, 1071 bp, Artificial Sequence
  derived and/or modified sequence
atggcggcaacccggtctccaaccagagccagggaacgcgagcgatccggtgccccagcggctggatccgaccaagttcactcatggatgctggcaaccagtcaggctcttgatactgtatggagaatggccaaggggtttgtgatgctggccgtttcttttctcgtggcagccatctgctacttccggcgactacatctgtattccggccataaacttaagtggtggattggctacctgcaaaggaagttcaaaagaaacttgagcgttgaggctgaagtggaccttctgagctattgcgctcgagagtggaaaggtgagactcctagaaataagctgatgcggaaggcatatgaggaactgttttggcgtcatcacataaagtgcgttcgccaggtccggagagacaattacgacgccctgcgtagcgtgctgttccagatctttagccagggtatttcatttcctagctggatgaaagaaaaggacattgtgaaactgcctgaaaaactactgttctcccagggctgtaactggatacagcagtactctttcgggccagaaaagtatacaggctctaacgtatttggcaagttgcgcaaatatgtggagttgctgaagactcagtggacagaatttaacgggatccgggactatcacaagcggggaagtatgtgtaacaccttattctcggacgcaatcctggagtataagctctatgaagcactgaaatttattatgctataccaggtcaccgaggtttacgaacagatgaaaacaaagaaagtgatcccctctctgttccggctcctttttagcagagaaacgtcatcagatccactatcctttatgatgaaccaccttaatagtgtgggggacacttgtggcctggagcaaattgacatgttcatcctcggctattcattagaggtgaaaattaaggtgttccgattgtttaagtttaacagcagggacttcgaagtttgttatcccgaagagcctctgcgggattggcccgagatcagcctgctgacagagaatgatcggcattaccacattcctgttttttag

SEQ ID NO: 201009 - protein, 767 aa, Artificial Sequence
  derived and/or modified sequence
MSLGRLLRRASSKASDLLTLTPGGSGSGSPSVLDGEIIYSKNNVCVHPPEGLQGLGEHHPGYLCLYMEKDEMLGATLILAWVPNSRIQRQDEEALRYITPESSPVRKAPRPRGRRTRSSGASHQPSPTELRPTLTPKDEDILVVAQSVPDRMLASPAPEDEEKLAQGLGVDGAQPASQPACSPSGILSTVSPQDVTEEGREPRPEAGEEDGSLELSAEGVSRDSSFDSDSDTFSSPFCLSPISAALAESRGSVFLESDSSPPSSSDAGLRFPDSNGLLQTPRWDEPQRVCALEQICGVFRVDLGHMRSLRLFFSDEACTSGQLVVASRESQYKVFHFHHGGLDKLSDVFQQWKYCTEMQLKDQQVAPDKTCMQFSIRRPKLPSSETHPEESMYKRLGVSAWLNHLNELGQVEEEYKLRKAIFFGGIDVSIRGEVWPFLLRYYSHESTSEEREALRLQKRKEYSEIQQKRLSMTPEEHRAFWRNVQFTVDKDVVRTDRNNQFFRGEDNPNVESMRRILLNYAVYNPAVGYSQGMSDLVAPILAEVLDESDTFWCFVGLMQNTIFVSSPRDEDMEKQLLYLRELLRLTHVRFYQHLVSLGEDGLQMLFCHRWLLLCFKREFPEAEALRIWEACWAHYQTDYFHLFICVAIVAIYGDDVIEQQLATDQMLLHFGNLAMHMNGELVLRKARSLLYQFRLLPRIPCSLHDLCKLCGSGMWDSGSMPAVECTGHHPGSESCPYGGTVEMPSPKSLREGKKGPKTPQDGFGFRR

SEQ ID NO: 201010 - protein, 405 aa, Artificial Sequence
  derived and/or modified sequence
MKVAPDKTCMQFSIRRPKLPSSETHPEESMYKRLGVSAWLNHLNELGQVEEEYKLRKAIFFGGIDVSIRGEVWPFLLRYYSHESTSEEREALRLQKRKEYSEIQQKRLSMTPEEHRAFWRNVQFTVDKDVVRTDRNNQFFRGEDNPNVESMRRILLNYAVYNPAVGYSQGMSDLVAPILAEVLDESDTFWCFVGLMQNTIFVSSPRDEDMEKQLLYLRELLRLTHVRFYQHLVSLGEDGLQMLFCHRWLLLCFKREFPEAEALRIWEACWAHYQTDYFHLFICVAIVAIYGDDVIEQQLATDQMLLHFGNLAMHMNGELVLRKARSLLYQFRLLPRIPCSLHDLCKLCGSGMWDSGSMPAVECTGHHPGSESCPYGGTVEMPSPKSLREGKKGPKTPQDGFGFRR

SEQ ID NO: 201011 - DNA, 2304 bp, Artificial Sequence
  derived and/or modified sequence
atgagcctgggcagactgctgagaagagccagcagcaaggccagcgacctgctgaccctgacccccggcggcagcggcagcggcagccccagcgtgctggacggcgagatcatctacagcaagaacaacgtgtgcgtgcacccccccgagggcctgcagggcctgggcgagcaccaccccggctacctgtgcctgtacatggagaaggacgagatgctgggcgccaccctgatcctggcctgggtgcccaacagcagaatccagagacaggacgaggaggccctgagatacatcacccccgagagcagccccgtgagaaaggcccccagacccagaggcagaagaaccagaagcagcggcgccagccaccagcccagccccaccgagctgagacccaccctgacccccaaggacgaggacatcctggtggtggcccagagcgtgcccgacagaatgctggccagccccgcccccgaggacgaggagaagctggcccagggcctgggcgtggacggcgcccagcccgccagccagcccgcctgcagccccagcggcatcctgagcaccgtgagcccccaggacgtgaccgaggagggcagagagcccagacccgaggccggcgaggaggacggcagcctggagctgagcgccgagggcgtgagcagagacagcagcttcgacagcgacagcgacaccttcagcagccccttctgcctgagccccatcagcgccgccctggccgagagcagaggcagcgtgttcctggagagcgacagcagcccccccagcagcagcgacgccggcctgagattccccgacagcaacggcctgctgcagacccccagatgggacgagccccagagagtgtgcgccctggagcagatctgcggcgtgttcagagtggacctgggccacatgagaagcctgagactgttcttcagcgacgaggcctgcaccagcggccagctggtggtggccagcagagagagccagtacaaggtgttccacttccaccacggcggcctggacaagctgagcgacgtgttccagcagtggaagtactgcaccgagatgcagctgaaggaccagcaggtggcccccgacaagacctgcatgcagttcagcatcagaagacccaagctgcccagcagcgagacccaccccgaggagagcatgtacaagagactgggcgtgagcgcctggctgaaccacctgaacgagctgggccaggtggaggaggagtacaagctgagaaaggccatcttcttcggcggcatcgacgtgagcatcagaggcgaggtgtggcccttcctgctgagatactacagccacgagagcaccagcgaggagagagaggccctgagactgcagaagagaaaggagtacagcgagatccagcagaagagactgagcatgacccccgaggagcacagagccttctggagaaacgtgcagttcaccgtggacaaggacgtggtgagaaccgacagaaacaaccagttcttcagaggcgaggacaaccccaacgtggagagcatgagaagaatcctgctgaactacgccgtgtacaaccccgccgtgggctacagccagggcatgagcgacctggtggcccccatcctggccgaggtgctggacgagagcgacaccttctggtgcttcgtgggcctgatgcagaacaccatcttcgtgagcagccccagagacgaggacatggagaagcagctgctgtacctgagagagctgctgagactgacccacgtgagattctaccagcacctggtgagcctgggcgaggacggcctgcagatgctgttctgccacagatggctgctgctgtgcttcaagagagagttccccgaggccgaggccctgagaatctgggaggcctgctgggcccactaccagaccgactacttccacctgttcatctgcgtggccatcgtggccatctacggcgacgacgtgatcgagcagcagctggccaccgaccagatgctgctgcacttcggcaacctggccatgcacatgaacggcgagctggtgctgagaaaggccagaagcctgctgtaccagttcagactgctgcccagaatcccctgcagcctgcacgacctgtgcaagctgtgcggcagcggcatgtgggacagcggcagcatgcccgccgtggagtgcaccggccaccaccccggcagcgagagctgcccctacggcggcaccgtggagatgcccagccccaagagcctgagagagggcaagaagggccccaagaccccccaggacggcttcggcttcagaagatag

SEQ ID NO: 201012 - DNA, 2304 bp, Artificial Sequence
  derived and/or modified sequence
atgagcttgggtcgattattgagacgagcaagttctaaggcttcagatctcctgacgctaactcccggtgggtctgggagcggttctcctagcgtgctggacggcgaaatcatttactccaaaaacaacgtctgtgtgcacccacctgaaggtcttcaagggctcggggagcaccatcccggatatctgtgcctctatatggaaaaggacgaaatgcttggggctacactaatcctcgcatgggttcctaacagtcggatccagagacaagacgaggaagccctgaggtatatcactcccgagtcgtcaccggtacgtaaggcgccacgccctaggggacgccggaccagatctagtggagcctcccaccagcccagtccaacggagctgcgccctacgctcactcctaaagacgaggatatcttagtggtggcccagtcagtgccagatcgaatgctcgccagccctgcacccgaggatgaagagaagctcgctcaggggctgggagtagatggagcgcagcccgcctcgcagcctgcttgtagtccgtccggaattctgtccacggtgagtcctcaagatgtgactgaggaaggtcgagagccaaggcccgaagcaggggaggaagacggctccttggaactgtcagcagagggcgtgtcccgcgattcctcatttgactctgattccgatacattctcctctcctttttgcctcagcccaatctctgccgcgctcgcggagagcagaggcagtgtgtttctggaatccgattcttcgcctccctcttccagtgacgcgggattgagattccctgattcgaatggactgctacaaactcctagatgggatgagccgcaaagagtatgcgcgcttgaacaaatttgcggggtctttcgggtggacctgggccacatgagaagcttgcggctctttttcagcgacgaagcatgcacatctggacagctcgtcgtcgcttctcgagagagccagtataaagtgttccatttccatcacggtggccttgacaagctgtcggacgtgttccagcagtggaaatactgtacggaaatgcaactcaaggaccagcaggtcgcaccagataaaacctgcatgcagttcagtatacggagacctaaactaccttcctctgaaactcatcctgaggagtcaatgtacaaaagacttggcgtgtctgcctggttaaatcatttaaatgagctcgggcaggtggaggaggagtacaagctgaggaaagccattttttttggcggaatcgacgtttccattcggggagaggtgtggcccttccttctgcgctattacagccatgagagtacaagtgaggagagggaggcgctgaggctgcagaagaggaaggagtacagcgagattcagcaaaaaagactgtctatgacaccagaagagcacagggcattctggcggaacgtgcagttcaccgtcgacaaagacgtagtgagaactgaccgaaataaccagttttttcgcggggaagataacccaaacgtggagtcaatgcgaagaattctgctcaattacgcagtctacaatcctgcagtgggctattcccagggcatgagtgacctggtggcccccatccttgctgaggttctggacgagagcgacacgttttggtgctttgtgggactcatgcaaaacactattttcgtatccagcccacgcgatgaagacatggaaaagcagctgctgtacttgagggagctgctgcggttaacccatgtacgattctaccagcacctggtctccctgggcgaggatggcctccagatgctcttttgccaccgctggttactcctttgtttcaaacgcgaattcccagaggccgaggcccttcgcatttgggaagcgtgctgggcccattaccaaacggattactttcatttgtttatctgcgtggccattgtggccatttatggagacgatgtgatagagcagcagctcgccacagaccaaatgctgcttcacttcggaaatctcgcaatgcacatgaatggtgagctggtgttgcgtaaggctagaagccttctctaccaattcaggcttctgccaagaattccatgtagcctgcacgacctctgcaaactgtgcggcagcgggatgtgggatagcggtagcatgccagcagtagaatgtaccggtcaccacccgggttcagaaagttgcccatatggtggcacggttgaaatgccaagtccgaagtcccttcgagaaggaaaaaaaggccccaaaaccccacaggacggtttcggcttccggcggtag

SEQ ID NO: 201013 - DNA, 2304 bp, Artificial Sequence
  derived and/or modified sequence
atgagcctgggccgcctgctgcggcgggccagcagcaaggccagtgacctgctgaccctgacccctgggggcagcggcagcggcagccccagcgtgctggatggagagatcatctacagcaagaacaacgtgtgtgtgcaccccccagagggcctgcagggcctgggggagcaccaccctggctacctgtgcctgtacatggagaaggatgagatgctgggcgccaccctcatcctggcctgggtgcccaacagccgcatccagaggcaggatgaggaggccctgcgctacatcaccccagagagcagccctgtgaggaaggccccccggccccggggccgccgcaccaggagcagcggggccagccaccagcccagccccacagagctgcggcccaccctgacccccaaggatgaggacatcctggtggtggcccagagcgtgcctgacaggatgctggccagccctgccccagaagatgaggagaagctggcccagggcctgggcgtggatggagcccagcctgccagccagcctgcctgcagccccagcggcatcctgagcacagtgagcccccaggatgtgacagaggagggccgggagcccaggcctgaggccggggaggaggatggcagcctggagctgtctgctgagggcgtgtcccgggacagcagctttgacagcgacagcgacaccttcagcagccccttctgcctgagccccatctctgctgccctggccgagagccggggcagcgtcttcctggagagtgacagcagcccccccagcagcagtgatgctggcctgcgcttcccagacagcaatggcctgctgcagaccccccgctgggatgagccccagagggtgtgtgccctggagcagatctgtggggtcttccgggtggacctgggccacatgaggagcctgcggctcttcttcagtgatgaggcctgcaccagcggccagctggtggtggccagccgggagagccagtacaaggtgttccacttccaccacggcggcctggacaagctgagtgatgtgttccagcagtggaagtactgcacagagatgcagctgaaggaccagcaggtggccccagacaagacctgcatgcagttcagcatcagaagacccaagctgcccagcagcgagacccaccctgaggagagcatgtacaagaggctgggcgtgtctgcctggctgaaccacctgaatgagctgggccaggtggaggaggagtacaagctgaggaaggccatcttctttggaggcattgatgtgtccatccggggggaggtgtggcccttcctgctgcgctactacagccatgagagcaccagcgaggagcgggaggccctgcggctgcagaagaggaaggagtacagcgagatccagcagaagaggctgtccatgaccccagaggagcaccgggccttctggagaaatgtgcagttcaccgtggacaaggatgtggtgaggacagacaggaacaaccagttcttcagaggagaggacaaccccaacgtggagagcatgaggcgcatcctgctgaactatgctgtgtacaacccagctgtgggctacagccagggcatgtctgacctggtggcccccatcctggccgaggtgctggatgaaagtgacaccttctggtgctttgtgggcctgatgcagaacaccatctttgtgagcagccccagagatgaggacatggagaagcagctgctgtacctgcgggagctgctgcggctgacccacgtgcgcttctaccagcacctggtgtccctgggagaagatggcctgcagatgctgttctgccaccgctggctgctgctgtgcttcaagcgggagttccctgaggccgaggccctgcgcatctgggaggcctgctgggcccactaccagacagactacttccacctgttcatctgtgtggccatcgtggccatctatggagatgatgtgattgagcagcagctggccacagaccagatgctgctgcacttcggcaacctggccatgcacatgaatggagagctggtgctgaggaaggcccggagcctgctgtaccagttccggctgctgccccgcatcccctgcagcctgcatgacctgtgcaagctgtgtggcagcggcatgtgggacagcggctccatgcctgctgtggagtgcaccggccaccaccctggcagcgagagctgcccctatggaggcaccgtggagatgcccagccccaagagcctgcgggagggcaagaagggccccaagaccccccaggacggcttcggcttcagaagatag

SEQ ID NO: 201014 - DNA, 2304 bp, Artificial Sequence
  derived and/or modified sequence
atgagcctgggccggctgctgcggcgggccagcagcaaggccagcgatctactcaccctcacccctggtggatccggctctggttctccttcagtactggacggcgagatcatctattctaaaaacaacgtgtgcgtccacccgccggaggggctgcaagggctgggtgaacaccaccccggctatctttgtctgtatatggaaaaagacgagatgctcggggctacactgattctggcgtgggtgcctaactctcgcattcagaggcaagacgaagaagctctgcgatacatcacacctgaaagtagtcccgtgcgaaaagctcctaggccacgcggacggcgaactcggtcatccggtgcctcacaccaaccctctcctacagagctgagaccaaccctgacgccaaaagacgaggacatcctggtggtggcacaaagtgtgcccgaccgaatgctagcctcaccagcacctgaggacgaggaaaagctcgcgcagggactcggcgtagatggggctcagcctgcttctcagcccgcatgcagccctagtggaatattatccacggtctctccccaggatgtaactgaggaaggccgggagccacgtccagaggctggggaggaggatggatctttggagttaagcgctgagggggtaagccgtgacagctcattcgattcagactcagatacattttcatcccccttttgtttgagcccaatcagcgcagccctggccgaatcacgcgggtctgtgttcctggagagcgattcatctcctccatcctcatcagacgccgggctgcgattccctgacagcaacgggctgctgcagactccacgttgggacgagccccaaagagtgtgcgcgctcgagcagatatgcggggtgttccgtgtagacctgggtcacatgcggagcctcagactgttcttctcagacgaagcttgtacctccggccagctggttgtggccagtcgggagtcccagtataaagtgttccatttccatcacggaggactggataagctgtctgatgtgttccagcaatggaaatattgcacggaaatgcaactgaaggatcaacaggtggctcccgataagacttgcatgcagtttagcatcagacgcccgaaattgccttcctccgagacgcatcccgaagagtctatgtacaagcgcctgggtgtttccgcttggctgaatcatttgaatgaactaggacaggtagaggaggaatacaagctgaggaaagctatcttctttggcggtattgacgtctctattcgtggagaggtgtggcccttcctcctgcggtactatagccatgaaagcacttcagaagagcgcgaagccctgcgtctgcaaaagagaaaagagtattctgagattcagcaaaagagactctccatgactcccgaggaacacagggctttctggcggaacgtgcaatttacagtggataaggacgttgtgagaacagaccgaaataaccagttttttaggggagaggacaaccccaacgtggagtccatgcgtaggatactgctaaattatgccgtttacaaccctgctgtggggtactcacaggggatgtccgatctggtagcaccaattttggctgaagtactcgatgaatccgacacattctggtgtttcgttggcctcatgcaaaacaccatctttgtgagtagtccacgggacgaagatatggagaaacagctcttgtatctgagagaactgcttagactgacacacgtcagattttatcagcatctggtgagcctgggagaggatggcctccaaatgcttttttgtcacaggtggctcctgttatgtttcaaaagagagttccctgaggcagaggccctgaggatttgggaggcttgttgggcccactatcaaacagactacttccacctttttatctgcgtggccatagtggccatctacggggacgatgtcatagaacagcagctcgcaacggaccagatgctcctgcattttgggaacctggccatgcacatgaatggcgaactggtgctgcgcaaagcccggtcactcctctaccagttcagattgcttccccgcattccatgttctttgcacgacttgtgcaagctttgcgggtcggggatgtgggattcagggagcatgccagctgtggaatgcacaggacatcaccccggttctgaaagttgcccatatggcggcaccgtggagatgccgtccccaaagtctcttagagaaggcaagaagggaccgaaaacccctcaagatggattcggatttcgccgctag

SEQ ID NO: 201015 - DNA, 2304 bp, Artificial Sequence
  derived and/or modified sequence
atgagccttggacgtctgctccgtcgggcaagctcaaaggcctccgatcttctcaccctgacgcccggaggaagtggttctgggagcccctctgtcctggacggggaaatcatctattcaaagaacaacgtgtgcgtgcatccaccagagggcctgcagggactgggagagcatcaccctggatacttgtgtttgtacatggagaaggacgagatgctcggggcaacattaattctcgcctgggtacctaacagtcgtattcaacgtcaggatgaggaagcactcaggtacatcaccccggaaagttcacccgtgaggaaggcccctcgtcctcgcggtcgtaggacccgcagctcaggcgcttcgcatcagcccagcccgaccgaactgcggcctaccctcacgccaaaggacgaagatatactcgtggttgcccagtcagtgccggaccggatgctcgcatcacctgcgccagaggatgaggaaaaacttgctcaggggctaggagtggatggcgcacagcctgcttctcagccagcatgttccccatcaggcatccttagtaccgtcagcccccaggacgtaactgaagaaggtagggaaccgcgacccgaggccggagaagaagatggatccctggaactttctgcggagggggtctcgagagacagcagttttgattccgactctgacacttttagttcacccttctgtctgtcccctataagcgcagccctagccgagtcgcgcggaagtgtcttcctggagagtgattcttcgccaccaagctcgagtgatgctggtctgaggtttccggactcaaatggattgctccagacccccaggtgggatgagccccaacgcgtgtgtgctttagaacagatctgcggcgtgttccgagtggatttaggtcacatgagaagcctgaggctgttcttttctgatgaggcctgtaccagcggtcagttggtcgtggcttctagagagtctcaatataaagtgttccactttcatcatggtggactagataagctctctgatgttttccagcagtggaagtattgtacggagatgcaacttaaagaccagcaagtggcaccggataagacctgcatgcagttcagtataaggagaccaaagcttccatcttctgaaacccacccagaggagtctatgtataaacgactgggcgtctcggcatggcttaatcacctgaatgagctggggcaggtggaagaggagtacaagttgagaaaagctattttttttgggggtatagatgtcagtatcagaggggaagtatggcccttcctgctcaggtactactcacacgagtccacctccgaggagagagaggcactccgattacagaaacgcaaggaatactccgagattcagcaaaagcgactttctatgacacccgaagagcaccgcgctttctggagaaatgttcagtttacagtggataaagatgtggtaagaacagacagaaataaccagttctttcgaggtgaggacaatccaaacgtggagtctatgcgacggatcctccttaattacgccgtctacaaccctgccgtggggtacagtcagggtatgtccgacctggttgctcccattttggctgaagtgctggatgagtcagacaccttttggtgctttgtcgggctgatgcagaatactatcttcgtatcctcccctcgagatgaagacatggagaagcagctgttgtatctgcgggaactactgagactgacacacgtgcgcttttatcagcacctggtgtccctgggggaagatgggctgcagatgttattctgccaccgctggctgctcctgtgtttcaagcgtgagttccccgaggcagaggccctgcgcatctgggaggcttgctgggcacactaccaaacggactatttccacttattcatctgtgtggctatcgttgcaatctatggtgatgatgttatcgaacagcagttagcaaccgaccagatgctgctgcatttcggcaacctggcaatgcacatgaacggtgagctggtgctgcgcaaggcgcgaagcctcctgtaccaattccgtcttttacctcgcatcccatgttccctgcacgatctctgcaaactctgcggctccggtatgtgggactcaggctctatgccagccgtcgagtgtaccggccatcacccaggctctgaaagttgtccgtacggcggtactgtcgaaatgccttcccctaagtccctaagagaggggaaaaaagggcctaaaactcctcaggacggattcggttttcggagatag

SEQ ID NO: 201016 - DNA, 3257 bp, Artificial Sequence
  derived and/or modified sequence
gacggtggcggctctcggagccggcgcgaatccggcccccgcagcgggacccgggcaggtcttgacgagccctgcccgggccgacgcatgcggaggatggaaacacttgcccggcaatgtctctgggccgcctccttcgcagggcctcctccaaagcctcggacctcctgaccctcacccccggtggcagcggcagcgggtccccctctgtcctggatggagagatcatctactccaagaacaatgtctgcgtgcacccgccggaggggctgcaggggctgggggagcaccacccaggttacctgtgcttgtacatggagaaggatgagatgctgggagccaccctcatcctggcatgggtccccaactctcgcatccagaggcaggacgaggaggccctgcgctacatcacacccgagagctcccccgttcgcaaggcaccccgccctcggggccggcgcacccggagctcaggagcctcccaccagccctccccgacggagctgcggcctaccctgacccccaaagatgaggacatcctggtggtggcccagagtgttccagaccgcatgctcgccagccctgcgccagaggatgaggagaagctggcgcagggcttgggggtggatggtgcccagccagcctcgcagcctgcttgcagcccctccgggatcttgtcgacggtcagtccgcaggatgtcaccgaggaggggcgggagccgcggcccgaggccggggaggaggatggctctttggaactgtcagccgagggcgtgagcagagacagctcctttgactcagactcagacaccttctcctcgcccttctgcctctcgcccatcagcgcggcgctggccgagagccgcggctccgtgtttctggaaagtgacagcagccccccgtccagctccgacgccggcctgcggttcccggacagcaacggcctcctgcagaccccacgctgggacgagccgcagcgggtgtgcgccctggagcagatttgcggcgtgttccgcgtggacctgggccacatgcgctccctccgccttttcttcagcgacgaggcctgcaccagcggccagctggtcgttgccagccgagagagccagtacaaggttttccacttccaccacggcggcctggacaagctgtctgacgtgttccagcagtggaaatactgcaccgagatgcagctcaaagaccagcaggtcgcccccgataagacatgcatgcagttctccatccgccgccccaagctgccgtcctccgagacgcaccccgaggagagcatgtacaagaggctcggcgtctccgcctggctcaaccacctgaatgagctgggccaggtggaggaggagtacaagctgcggaaggccattttctttggcggtattgatgtgtcaatccgcggggaggtctggcccttcctgctgcgctattacagccacgagtccacgtcggaggagcgggaggcgctgcggctgcagaagcgaaaggagtactctgagatccagcagaaaaggctctccatgactcccgaggagcacagagcgttctggcgtaatgtgcagttcactgtggacaaagacgtggtccggacagatcggaacaaccagttcttccggggggaagacaatcccaatgtggagagcatgaggaggatcctgctgaactacgccgtgtacaaccctgccgtcggctattcccaagggatgtcggacctggtggcgcccatcttggccgaggtcctggatgagtcagacaccttctggtgctttgtgggtttgatgcagaacacgatcttcgtcagctcaccccgggacgaggacatggagaaacaactgctgtacctgcgcgagctgctgcggctgacgcacgtgcgcttctaccagcacctggtctcgctgggcgaggacggcctgcagatgctcttctgccaccgctggctccttctgtgcttcaagcgggagttccccgaggccgaagcgctgcggatctgggaggcctgctgggcccactaccagacggactacttccaccttttcatctgcgtggccatcgtggccatctacggggatgacgtcatcgagcagcagctggccacggaccagatgctcctgcacttcggaaacctggccatgcacatgaacggggagctcgttctccggaaggcgaggagtttgctgtaccagttccgcctcctgccccggatcccctgcagcctgcacgatctgtgtaagctgtgcgggtcaggcatgtgggacagcggctccatgcccgcggtggagtgcaccggccaccatcccggctcggagagctgtccctacgggggcacggtggagatgccttcccccaagtccctgagggaaggcaagaagggcccaaagacgccgcaggacggcttcggcttccgcagataggtcgggcccccgacaccggacaggggttgaggggacctcctcagaggccctgggcacgggagggggtggggctgggcgtgaaggggacaggggacggtagaaacctaaggaaaatgcttttgggcaacatgagaggaaccttttcatattaatgacaaaattagagtctggaagtgacagaagtcagatctacagccacccagaggaaagtcagctcctgaaacgctgcagtggaacgcgcagccaccgcacctgagacgcaggctggctgggctctcctgctggctgccctggaggatttcaacatgtcccaggatttgctccaccctcgagggcagccagacagcgtcgccaggcaatgaggaaagcagagacaggagaggaaggcctcactcacccactgcgtcgagggctgcagaacacagcggggtcctgtccaggcccagggacatctttgcaagccagacacacttcctcttgagacctcgttctctcggagtgagccaaacacacttcccaaaacgtccccagccacagctgggatgccgatggaaaggcatctgccataaaagaaaagcaaaagataaaaagcccaaccgatgtggggatagagaggcggaagagcagtcaggcttgaggagctggcgcttgtaatgtttatccgtttaaacatttcgtcctcctggtacacgaagggaactgtctgcccaggagcctgagcctcaggctgttggagaagcatctgatgcctttttctttgctgggggtcttctacgtgaggttccttggcgttgtttaaggtcaactccaccaaatacagcaaccagctggggcttg

SEQ ID NO: 201017 - protein, 454 aa, Artificial Sequence
  derived and/or modified sequence
MAAWKSWTALRLCATVVVLDMVVCKGFVEDLDESFKENRNDDIWLVDFYAPWCGHCKKLEPIWNEVGLEMKSIGSPVKVGKMDATSYSSIASEFGVRGYPTIKLLKGDLAYNYRGPRTKDDIIEFAHRVSGALIRPLPSQQMFEHMQKRHRVFFVYVGGESPLKEKYIDAASELIVYTYFFSASEEVVPEYVTLKEMPAVLVFKDETYFVYDEYEDGDLSSWINRERFQNYLAMDGFLLYELGDTGKLVALAVIDEKNTSVEHTRLKSIIQEVARDYRDLFHRDFQFGHMDGNDYINTLLMDELTVPTVVVLNTSNQQYFLLDRQIKNVEDMVQFINNILDGTVEAQGGDSILQRLKRIVFDAKSTIVSIFKSSPLMGCFLFGLPLGVISIMCYGIYTADTDGGYIEERYEVSKSENENQEQIEESKEQQEPSSGGSVVPTVQEPKDVLEKKKD

SEQ ID NO: 201018 - protein, 418 aa, Artificial Sequence
  derived and/or modified sequence
MAAWKSWTALRLCATVVVLDMVVCKGFVEDLDESFKENRNDDIWLVDFYAPWCGHCKKLEPIWNEVGLEMKSIGSPVKVGKMDATSYSSIASEFGVRGYPTIKLLKGDLAYNYRGPRTKDDIIEFAHRVSGALIRPLPSQQMFEHMQKRHRVFFVYVGGESPLKEKYIDAASELIVYTYFFSASEEVVPEYVTLKEMPAVLVFKDETYFVYDEYEDGDLSSWINRERFQNYLAMDGFLLYELGDTGKLVALAVIDEKNTSVEHTRLKSIIQEVARDYRDLFHRDFQFGHMDGNDYINTLLMDELTVPTVVVLNTSNQQYFLLDRQIKNVEDMVQFINNILDGTVEAQGGDSILQRLKRIVFDAKSTIVSIFKSSPLMGCFLFGLPLGVISIMCYGIYTADTDGGYIEERYEVSKKKKK

SEQ ID NO: 201019 - DNA, 1365 bp, Artificial Sequence
  derived and/or modified sequence
atggccgcctggaagagctggaccgccctgagactgtgcgccaccgtggtggtgctggacatggtggtgtgcaagggcttcgtggaggacctggacgagagcttcaaggagaacagaaacgacgacatctggctggtggacttctacgccccctggtgcggccactgcaagaagctggagcccatctggaacgaggtgggcctggagatgaagagcatcggcagccccgtgaaggtgggcaagatggacgccaccagctacagcagcatcgccagcgagttcggcgtgagaggctaccccaccatcaagctgctgaagggcgacctggcctacaactacagaggccccagaaccaaggacgacatcatcgagttcgcccacagagtgagcggcgccctgatcagacccctgcccagccagcagatgttcgagcacatgcagaagagacacagagtgttcttcgtgtacgtgggcggcgagagccccctgaaggagaagtacatcgacgccgccagcgagctgatcgtgtacacctacttcttcagcgccagcgaggaggtggtgcccgagtacgtgaccctgaaggagatgcccgccgtgctggtgttcaaggacgagacctacttcgtgtacgacgagtacgaggacggcgacctgagcagctggatcaacagagagagattccagaactacctggccatggacggcttcctgctgtacgagctgggcgacaccggcaagctggtggccctggccgtgatcgacgagaagaacaccagcgtggagcacaccagactgaagagcatcatccaggaggtggccagagactacagagacctgttccacagagacttccagttcggccacatggacggcaacgactacatcaacaccctgctgatggacgagctgaccgtgcccaccgtggtggtgctgaacaccagcaaccagcagtacttcctgctggacagacagatcaagaacgtggaggacatggtgcagttcatcaacaacatcctggacggcaccgtggaggcccagggcggcgacagcatcctgcagagactgaagagaatcgtgttcgacgccaagagcaccatcgtgagcatcttcaagagcagccccctgatgggctgcttcctgttcggcctgcccctgggcgtgatcagcatcatgtgctacggcatctacaccgccgacaccgacggcggctacatcgaggagagatacgaggtgagcaagagcgagaacgagaaccaggagcagatcgaggagagcaaggagcagcaggagcccagcagcggcggcagcgtggtgcccaccgtgcaggagcccaaggacgtgctggagaagaagaaggactag

SEQ ID NO: 201020 - DNA, 1257 bp, Artificial Sequence
  derived and/or modified sequence
atggccgcctggaagagctggaccgccctgagactgtgcgccaccgtggtggtgctggacatggtggtgtgcaagggcttcgtggaggacctggacgagagcttcaaggagaacagaaacgacgacatctggctggtggacttctacgccccctggtgcggccactgcaagaagctggagcccatctggaacgaggtgggcctggagatgaagagcatcggcagccccgtgaaggtgggcaagatggacgccaccagctacagcagcatcgccagcgagttcggcgtgagaggctaccccaccatcaagctgctgaagggcgacctggcctacaactacagaggccccagaaccaaggacgacatcatcgagttcgcccacagagtgagcggcgccctgatcagacccctgcccagccagcagatgttcgagcacatgcagaagagacacagagtgttcttcgtgtacgtgggcggcgagagccccctgaaggagaagtacatcgacgccgccagcgagctgatcgtgtacacctacttcttcagcgccagcgaggaggtggtgcccgagtacgtgaccctgaaggagatgcccgccgtgctggtgttcaaggacgagacctacttcgtgtacgacgagtacgaggacggcgacctgagcagctggatcaacagagagagattccagaactacctggccatggacggcttcctgctgtacgagctgggcgacaccggcaagctggtggccctggccgtgatcgacgagaagaacaccagcgtggagcacaccagactgaagagcatcatccaggaggtggccagagactacagagacctgttccacagagacttccagttcggccacatggacggcaacgactacatcaacaccctgctgatggacgagctgaccgtgcccaccgtggtggtgctgaacaccagcaaccagcagtacttcctgctggacagacagatcaagaacgtggaggacatggtgcagttcatcaacaacatcctggacggcaccgtggaggcccagggcggcgacagcatcctgcagagactgaagagaatcgtgttcgacgccaagagcaccatcgtgagcatcttcaagagcagccccctgatgggctgcttcctgttcggcctgcccctgggcgtgatcagcatcatgtgctacggcatctacaccgccgacaccgacggcggctacatcgaggagagatacgaggtgagcaagaagaagaagaagtag

SEQ ID NO: 201021 - DNA, 1365 bp, Artificial Sequence
  derived and/or modified sequence
atggctgcctggaagtcttggaccgctctgaggctttgtgccacagtcgtggttctcgatatggtggtgtgtaagggatttgtcgaagaccttgatgaatccttcaaggaaaaccgaaacgatgatatttggctggtcgacttttatgctccatggtgtggtcactgtaagaaacttgagccgatctggaacgaagtgggattggagatgaaaagtatcggcagtcctgtgaaggtcggaaagatggatgccacgtcatattcatccatcgcctctgagttcggggtgcggggctacccaacaatcaaacttttgaaaggggatctagcatacaactaccgaggccctcggactaaggacgacataatcgagtttgctcaccgggtctctggtgcccttatccgccctctcccctctcagcagatgttcgaacacatgcagaaacggcatcgggttttttttgtatacgtgggtggcgagtctccactgaaggaaaagtatattgatgcggccagcgaactcattgtgtatacatatttcttcagcgcctctgaggaggtggtgcccgaatatgtaacgcttaaagaaatgccagcagttttagtgttcaaagacgagacctacttcgtatacgacgaatatgaggatggggatctatcctcctggatcaatcgggaacgcttccagaattatcttgctatggatgggtttctcttatatgagttgggtgacacgggaaagctagtcgctctggcagtcatcgacgagaagaatacttcagtagaacatacaaggcttaagagcattattcaagaagtcgccagagactacagggacttgttccacagggacttccaattcggccatatggacggcaacgattatattaacaccctcttgatggatgagttgaccgtgcctacggtcgtcgtgctgaatacttccaatcagcagtatttcctgctggataggcagataaaaaacgtggaagacatggttcagttcattaataatatcctggatgggactgtggaggcacagggtggagactcaattctgcagcgtctgaagaggattgtgttcgacgccaagtctaccatagtgagcatctttaagagcagcccactgatgggctgcttcctgtttggcctgcctcttggtgtgataagcatcatgtgctacggtatttataccgctgataccgatgggggctacatcgaagagagatatgaagtgtctaagagcgagaatgagaatcaggagcaaatcgaagagagcaaggaacaacaggaaccttctagcgggggatctgtcgtccccacggtgcaggaaccaaaggatgtcctcgaaaaaaagaaagactag

SEQ ID NO: 201022 - DNA, 1257 bp, Artificial Sequence
  derived and/or modified sequence
atggctgcttggaaaagctggacagccctgcggttgtgcgccacagttgtcgtcctagacatggtcgtgtgtaagggttttgtcgaggatttggatgaatccttcaaagaaaaccgcaatgatgacatctggctggttgacttctacgctccctggtgcggccactgcaagaaactagaacctatctggaatgaggtcggtttggaaatgaagagcatcgggtctcctgtaaaagtagggaagatggatgccacttcctacagttcaatcgcctcagagttcggtgtcagggggtaccccaccattaagctcttgaagggcgatcttgcgtacaattatcgtggtccgcgcaccaaagatgacattatcgagtttgcacaccgcgtttccggggccctgatccgaccactccccagccaacagatgtttgaacatatgcagaagaggcacagggtattctttgtctatgtggggggggagagcccactgaaagaaaaatacatcgatgcagccagtgagctcatcgtatacacttattttttttctgcttccgaggaggttgtgcccgaatatgtgacacttaaggagatgcctgccgtgcttgtttttaaggatgaaacttacttcgtgtatgatgaatacgaagacggcgatttgtcctcatggatcaaccgtgaacggttccaaaactacttagccatggatggatttctgctctatgagcttggggatacaggtaaactggtagctctggcagtgatagacgagaagaataccagtgtcgagcacactcgacttaagtccattattcaggaagtggcacgagattatcgcgacctgttccaccgagatttccagttcggacatatggacggcaatgactacattaacaccttgctgatggacgagttgacagtgccgactgtggttgtgctgaacacgagcaaccagcagtatttcttgcttgaccgccagattaagaatgtagaagatatggtacaattcataaataatatactcgatggaaccgttgaggcacagggaggcgacagcatccttcaaagactgaaacgaatcgtgttcgatgccaagtcaacgatcgttagtatattcaagtccagcccacttatggggtgcttcctttttgggctgcccctgggcgtgatttctataatgtgctatggcatatacaccgcagataccgatggggggtacatagaagaacggtacgaagtgagcaagaagaagaaaaagtag

SEQ ID NO: 201023 - DNA, 1365 bp, Artificial Sequence
  derived and/or modified sequence
atggccgcctggaagtcctggacagccctgcggctgtgtgccaccgtggtggtgctggacatggtggtgtgcaagggctttgtggaggacctggatgagagcttcaaggaaaatagaaatgatgacatctggctggtggacttctacgccccctggtgtggccactgcaagaagctggagcccatctggaatgaggtgggcctggagatgaagagcatcggcagccctgtgaaggtgggcaagatggatgccaccagctacagcagcatcgccagcgagtttggagtgcggggctaccccaccatcaagctgctgaagggggacctggcctacaactaccggggccccaggaccaaggatgacatcattgaatttgcccaccgggtgtctggggccctgatccggcccctgcccagccagcagatgtttgagcacatgcagaagaggcacagggtcttctttgtgtatgtgggcggggagagccccctgaaggagaagtacattgatgctgccagcgagctgattgtgtacacctacttcttcagcgccagcgaggaggtggtgcctgaatatgtgaccctgaaggagatgcctgctgtgctggtgttcaaggatgagacctactttgtgtatgatgaatatgaagatggagacctgagctcctggatcaaccgggagcgcttccagaactacctggccatggatggcttcctgctgtatgagctgggggacaccgggaagctggtggccctggccgtgattgatgagaagaacacctctgtggagcacacccggctgaagagcatcatccaggaggtggcccgggactacagagacctcttccaccgggacttccagtttggccacatggatggaaatgactacatcaacaccctgctgatggatgagctgactgtgcccaccgtggtggtgctgaacaccagcaaccagcagtacttcctgctggaccggcagatcaagaatgtggaggacatggtgcagttcatcaacaacatcctggatggcaccgtggaggcccagggcggggacagcatcctgcagaggctgaagagaattgtgtttgatgccaagagcaccatcgtgtccatcttcaagagcagccccctgatgggctgcttcctgtttggcctgcccctgggcgtcatcagcatcatgtgctacggcatctacacagctgacacagatggcggctacatcgaggagagatatgaggtgtccaagtcagaaaatgaaaaccaggagcagatcgaggagagcaaggagcagcaggagcccagcagcggcggctctgtggtgcccaccgtgcaggagcccaaggatgtgctggagaagaagaaggactag

SEQ ID NO: 201024 - DNA, 1257 bp, Artificial Sequence
  derived and/or modified sequence
atggccgcctggaagtcctggacagccctgcggctgtgtgccaccgtggtggtgctggacatggtggtgtgcaagggctttgtggaggacctggatgagagcttcaaggaaaatagaaatgatgacatctggctggtggacttctacgccccctggtgtggccactgcaagaagctggagcccatctggaatgaggtgggcctggagatgaagagcatcggcagccctgtgaaggtgggcaagatggatgccaccagctacagcagcatcgccagcgagtttggagtgcggggctaccccaccatcaagctgctgaagggggacctggcctacaactaccggggccccaggaccaaggatgacatcattgaatttgcccaccgggtgtctggggccctgatccggcccctgcccagccagcagatgtttgagcacatgcagaagaggcacagggtcttctttgtgtatgtgggcggggagagccccctgaaggagaagtacattgatgctgccagcgagctgattgtgtacacctacttcttcagcgccagcgaggaggtggtgcctgaatatgtgaccctgaaggagatgcctgctgtgctggtgttcaaggatgagacctactttgtgtatgatgaatatgaagatggagacctgagctcctggatcaaccgggagcgcttccagaactacctggccatggatggcttcctgctgtatgagctgggggacaccgggaagctggtggccctggccgtgattgatgagaagaacacctctgtggagcacacccggctgaagagcatcatccaggaggtggcccgggactacagagacctcttccaccgggacttccagtttggccacatggatggaaatgactacatcaacaccctgctgatggatgagctgactgtgcccaccgtggtggtgctgaacaccagcaaccagcagtacttcctgctggaccggcagatcaagaatgtggaggacatggtgcagttcatcaacaacatcctggatggcaccgtggaggcccagggcggggacagcatcctgcagaggctgaagagaattgtgtttgatgccaagagcaccatcgtgtccatcttcaagagcagccccctgatgggctgcttcctgtttggcctgcccctgggcgtcatcagcatcatgtgctacggcatctacacagctgacacagatggcggctacatcgaggagagatatgaggtgtccaagaagaagaagaagtag

SEQ ID NO: 201025 - DNA, 1365 bp, Artificial Sequence
  derived and/or modified sequence
atggccgcctggaagagctggaccgccctgcggctgtgcgccaccgtcgtggtactggacatggttgtttgcaaggggtttgtggaggacctggatgaatctttcaaggagaatcgaaacgatgatatctggctggtggacttctatgccccttggtgcggccactgcaagaaactagagcctatctggaacgaagtgggtctcgaaatgaagagcatcggcagcccagtgaaagtaggaaagatggacgcgacatcatacagttccattgcatccgaatttggcgtaagggggtaccccactattaagctgcttaagggggatctggcctataactaccgcggaccaaggacgaaggacgatataatcgagttcgctcatcgcgttagcggcgcccttatcagacccctgccttcccagcagatgttcgagcatatgcagaagcggcatagagtctttttcgtctacgttggcggggagtctccgttaaaagagaaatacattgacgcagcatcggaactgatcgtgtacacgtacttcttttcagcatcagaggaggtggttcccgagtacgtcaccctcaaagagatgccagccgtcctcgtgttcaaagatgaaacatacttcgtgtacgatgagtacgaggacggagatctgtcaagttggatcaaccgagaacgcttccagaactatctggcaatggatggcttcctcctttacgaattaggggataccgggaagctagttgctctcgctgttatagatgagaagaacacctctgttgagcacacacgcctgaagagcattatccaggaagtagccagagactatcgggacttgtttcacagagacttccagtttggccatatggatgggaatgactacattaatacactcctcatggacgagctgaccgtaccaaccgttgtggtcttaaatacttcaaatcagcaatacttcctattagacaggcagattaaaaatgtggaggatatggttcagtttataaataatatcttagatggcaccgtggaggcccaagggggggactctatcttacagcgattaaaacggatagtattcgacgccaagagcacaatcgtgtccatctttaagagttcgcctttgatgggctgtttcctttttgggcttccactgggggtgattagtataatgtgctacggaatatacaccgccgacaccgacggtgggtatatcgaggaaagatatgaagtgagtaaatccgagaatgagaaccaagagcagatcgaggaatccaaggaacaacaggagcctagttcaggcggctcagtagtgcccacagtgcaagagcccaaagatgtgttggagaagaaaaaagactag

SEQ ID NO: 201026 - DNA, 1257 bp, Artificial Sequence
  derived and/or modified sequence
atggccgcctggaagagctggaccgccctgcggctgtgcgccaccgtcgtggtgttggacatggtggtatgcaagggatttgtggaggacctggacgaatccttcaaggagaacagaaatgatgatatctggctggtcgacttctacgctccctggtgcggacactgtaagaaactggagcccatatggaacgaagtcggcctggagatgaagagtattggcagtcctgtcaaagtcggtaagatggacgctacgagctactcgtccatcgccagtgagttcggcgtgagagggtaccccaccatcaagctgttgaagggggatctggcttacaactataggggacctcgcaccaaggatgacatcatagaattcgctcaccgggtttcgggcgcactgatacgtccactaccgagtcagcaaatgttcgagcatatgcaaaaacgacacagggtgttctttgtctacgtggggggcgaaagcccattgaaggaaaaatacatcgatgcggcctctgaactcattgtgtacacgtatttcttttctgcttctgaggaagtggtgcctgagtacgtgacgctgaaggagatgccagccgtactcgtcttcaaggatgaaacgtactttgtttacgacgaatacgaggatggagacctgtcaagctggatcaatagagaacggtttcaaaactacttagctatggatgggtttcttctttatgagctaggggataccggcaaactagtcgctcttgctgtcatcgacgagaaaaacacctctgtagaacacacccgattaaaatccattatccaggaggtggccagggattaccgggacttattccatagggattttcagttcggacacatggatggcaatgactatattaatacgttgctgatggatgaactcactgttcctacagtggtggtcctgaacacatctaatcagcagtacttcctactggaccgtcagattaagaatgtggaagacatggtgcagttcattaacaacatcctggacggcaccgtagaagcccaggggggcgactcaatactgcagcgcctgaagagaatcgtgttcgacgccaagagtactattgtgagcatttttaagtccagcccgttaatgggatgttttctgtttggattgccacttggggtgatttcaattatgtgctacggtatctacactgccgacacagatggagggtacatcgaagaacggtatgaggtaagtaaaaagaagaaaaaatag

SEQ ID NO: 201027 - DNA, 1365 bp, Artificial Sequence
  derived and/or modified sequence
atggccgcatggaaatcctggaccgctcttcggttgtgcgcgactgtagtagtgctggacatggtcgtgtgtaaaggttttgtcgaagacctagatgaaagtttcaaggaaaatcgtaacgacgatatctggctcgtggatttctatgctccttggtgtggtcattgtaagaagctagagccgatctggaacgaggtcggcctcgagatgaagagcattgggagcccagtcaaagtcggaaagatggatgcgaccagctattcctccattgcatccgagtttggggtgcgtggatacccgacaatcaaactccttaagggggatctcgcctataactatcggggacctcgcacgaaggacgatatcatcgagttcgcccatcgggtgtccggtgcgcttatccggccattgccgagtcagcagatgtttgagcatatgcagaagcgccacagagtcttcttcgtttacgtggggggagagtccccgttaaaggaaaaatatattgacgctgccagcgaactgattgtgtacacctacttcttctcagcatctgaggaggtagtgccagaatacgtcaccctgaaggagatgcccgcagtgctggtcttcaaggatgaaacatattttgtgtatgacgaatatgaggatggtgacctctccagctggattaatcgggagcgcttccagaactacctggccatggatgggttccttctatacgaactgggcgatacagggaaactcgttgcgctggccgtgattgacgagaagaatacaagcgtggagcacacaagactgaaaagtatcatccaggaagtagctagagattacagggatctgtttcatcgcgacttccagtttggccatatggatgggaacgactacatcaatacgttacttatggatgagcttacagtgccgaccgtggtggtgctgaacaccagcaaccagcagtattttttactggaccgccaaatcaaaaatgtggaggacatggtgcagttcattaacaatattctggacggcaccgtggaagcgcaagggggagactccatactacagcgactgaaaagaatcgtctttgatgccaagtcaacaatcgtgagcatctttaagtctagcccgctgatgggctgcttcctgttcggtcttcccttaggagttatcagtataatgtgttacggaatatacacagccgacaccgatggtggctacattgaagagaggtacgaggtttctaagtctgagaatgagaaccaggagcagatcgaggaaagtaaggaacagcaggaaccgagcagcggaggcagcgtcgtccctacagtgcaggaacccaaggacgtcctggagaaaaaaaaggattag

SEQ ID NO: 201028 - DNA, 1257 bp, Artificial Sequence
  derived and/or modified sequence
atggcagcatggaagtcctggacggccctgcgactgtgtgccactgtcgtcgtcctggacatggttgtgtgcaaaggatttgtcgaggacctcgacgagtcttttaaagagaatcggaacgatgatatctggctggtcgacttctatgcaccctggtgcggtcactgcaaaaaactggagcccatctggaatgaggtaggtcttgaaatgaaatcgattggctcccctgtcaaagttgggaaaatggatgcaactagctattcttcaatcgcctcagaattcggcgttaggggataccctactattaagctcctgaagggagacctcgcttacaactaccgaggaccccgtaccaaggatgacatcattgagtttgcccaccgcgtgagcggggctttgataaggcctctgccgtcccagcagatgtttgagcatatgcagaagaggcaccgggtgtttttcgtgtacgtagggggagagtcacctcttaaggaaaaatatattgacgccgcatctgagctgattgtctacacgtacttttttagcgccagcgaggaagtggttcccgaatacgtaacgcttaaggaaatgcctgccgtgctcgtctttaaggatgaaacctacttcgtctacgatgagtacgaggatggggacctttcttcctggatcaacagggagcgcttccagaactacctcgccatggacggctttcttctgtatgaactcggggacacaggtaagctggtagccttggctgtcattgacgagaagaatacttccgtcgagcatacaaggctcaagagtattatacaagaagtagctcgcgattacagggacctctttcatagagactttcaatttggccatatggacgggaatgactatattaacaccctgctcatggatgaattaacggttccaactgtggtggtgttaaacacttccaaccagcaatatttcttgttagatcgccagatcaaaaacgtggaggacatggtgcagttcatcaacaatatacttgacggcacagtggaagcccagggcggagactctattctgcagcgcctgaaaagaatagtattcgacgctaaatctaccatcgtgtccatcttcaagtcaagccccctaatgggctgttttctcttcggcctcccccttggggtgatctcaattatgtgctacgggatctatactgccgacaccgatggtggttatatcgaagagagatacgaagtcagcaagaaaaaaaaaaagtag

SEQ ID NO: 201029 - protein, 2071 aa, Artificial Sequence
  derived and/or modified sequence
MELAHSLLLNEEALAQITEAKRPVFIFEWLRFLDKVLVAANKTDVKEKQKKLVEQLTGLISSSPGPPTRKLLAKNLAALYSIGDTFTVFQTLDKCNDIIRNKDDTAAYLPTKLAAVACVGAFYEKMGRMLGSAFPETVNNLLKSLKSAESQGRSEILMSLQKVLSGLGGAAASSHRDIYKNARSLLTDRSMAVRCAVAKCLLELQNEAVFMWTAELENIATLCFKALENSNYGVRVAVSKLLGTVMATALMPKQATVMRQNVKRATFDEVLELMATGFLRGGSGFLKSGGEMLKVGGSVNREVRVGVTQAYVVFVTTLGGQWLERSFATFLSHVLDLVSHPRATQTHVEAVYSRRCVSFILRATVGSLLGEKAQIAAAKEICQAIGKQMKAVEAVVNDTSGENKSGAADIAASQHVMVCALQELGSLVQSLNATASPLIQEASIGLLEIVTSVLLHPSMAARLAAAWCLRCVAVALPFQLTPFLDRCAERLNNLKTSPEAVSGYSFAMAALLGGVHQCPLGIPHAKGKMVVSIAEDLLRTAAQNSRLSLQRTQAGWLLLGALMTLGPSVVRYHLPKMLLLWRNVFPRSLKELEAEKARGDSFTWQVTLEGRAGALCAMRSFVAHCPELLTEDVIRKLMTPIECAMTMMSHIPSVMKAHGAHLKASAAMVRLRLYDILALLPPKTYEGSFNALLRELVAEFTLTDNSANTTTSLLRSLCHYDDSVLLGSWLQETDHKSIEDQLQPNSASGSGALEHDPSSIYLRIPAGEAVPGPLPLGVSVIDASVALFGVVFPHVSYKHRLQMLDHFAECVKQAKGVRQQAVQLNIFTAVLSALKGLAENKSTLGPEEVRKSALTLVMGPLDNPNPILRCAAGEALGRMAQVVGEATFIARMAQYSFDKLKSARDVVSRTGHSLALGCLHRYVGGIGSGQHLKTSVSILLALAQDGTSPEVQTWSLHSLALIVDSSGPMYRGYVEPTLSLVLTLLLTVPPSHTEVHQCLGRCLGAIITTVGPELQGNGATTSTIRSSCLVGCAITQDHSDSLVQAAAISCLQQLHMFAPRHVNLSSLVPSLCVHLCSSHLLLRRAAVACLRQLAQREAAEVCEYAMSLAKNTGDKESSSANVSPFAPGVSSRTDIHCRHQGVNITETGLEGLLFGMLDRETDRKLCSDIHDTLGHMLSSLAVEKLSHWLMLCKDVLAASSDMSTATLLSSGKDEEAEKKDEMDDDTMFTTLGEEDKSKPFVAPRWATRVFAADCLCRIINLCENADQAHFDLALARSAKLRNPTNDLLVLHLSDLIRMAFMAATDHSNQLRMAGLQALEDIIKKFASVPEPEFPGHVILEQYQANVGAALRPAFSQDTPSDIIAKACQVCSTWIGSGVVSDLNDLRRVHNLLVSSLDKVQAGKGSSSQLYRESATTMEKLAVLKAWAEVYVVAMNIKKEAESKPKRAIKNTDDDDDDCGTIDELPPDSLITLVQPELPTLSRLWLAALKDYALLTLPAEFSSQLPPDGGAFYTPETIDTARLHYRNSWAPILHAVALWLNSTGFTCSESTEAAAISGLQKRSTSVNLNQASGAVGSAKSLPEINKDRMHLILGVSIQFLCSPRPEEPIEHVTACLQALHTLLDSPYARVHIAEDQLIGVELLSVLHRLLLTWNPSSVQLLVTGVVQQIVRAAQDYLQEKRNTLNEDDMEKEACTVLGEGGDSGGLIPGKSLVFATMELLMFILVRHMPHLSTKVSDSPSHIATKTRLSEESARLVAATVTILSDLPSLCSPAGCMTILPTILFLIARILKDTAIKSADNQVPPPVSAALQGIKSIVTLSMAKTEAGVQKQWTALIRSTLACILEYSQPEDSVPTPDEVSMLTAIALFLWSASNEIIGVQSLQNGCMNRFKNALNSCDPWVQAKCYQLLLSVFQHSNRALSTPYIHSLAPIVVEKLKAVERNRPASNIELLAVQEGIKVLETLVALGEEQNRVQLLALLVPTLISYLLDENSFASASSASKDLHEFALQNLMHIGPLYPHAFKTVMGAAPELKVRLETAVRASQASKAKAAARQPAPAIHSAPTIKLKTSFF

SEQ ID NO: 201030 - protein, 768 aa, Artificial Sequence
  derived and/or modified sequence
MELAHSLLLNEEALAQITEAKRPVFIFEWLRFLDKVLVAANKTDVKEKQKKLVEQLTGLISSSPGPPTRKLLAKNLAALYSIGDTFTVFQTLDKCNDIIRNKDDTAAYLPTKLAAVACVGAFYEKMGRMLGSAFPETVNNLLKSLKSAESQGRSEILMSLQKVLSGLGGAAASSHRDIYKNARSLLTDRSMAVRCAVAKCLLELQNEAVFMWTAELENIATLCFKALENSNYGVRVAVSKLLGTVMATALMPKQATVMRQNVKRATFDEVLELMATGFLRGGSGFLKSGGEMLKVGGSVNREVRVGVTQAYVVFVTTLGGQWLERSFATFLSHVLDLVSHPRATQTHVEAVYSRRCVSFILRATVGSLLGEKAQIAAAKEICQAIGKQMKAVEAVVNDTSGENKSGAADIAASQHVMVCALQELGSLVQSLNATASPLIQEASIGLLEIVTSVLLHPSMAARLAAAWCLRCVAVALPFQLTPFLDRCAERLNNLKTSPEAVSGYSFAMAALLGGVHQCPLGIPHAKGKMVVSIAEDLLRTAAQNSRLSLQRTQAGWLLLGALMTLGPSVVRYHLPKMLLLWRNVFPRSLKELEAEKARGDSFTWQVTLEGRAGALCAMRSFVAHCPELLTEDVIRKLMTPIECAMTMMSHIPSVMKAHGAHLKASAAMVRLRLYDILALLPPKTYEGSFNALLRELVAEFTLTDNSANTTTSLLRSLCHYDDSVLLGSWLQETDHKSIEDQLQPNSASGSGALEHDPSSIYLLLFLVH

SEQ ID NO: 201031 - DNA, 5949 bp, Artificial Sequence
  derived and/or modified sequence
atggagctggcccacagcctgctgctgaacgaggaggccctggcccagatcaccgaggccaagagacccgtgttcatcttcgagtggctgagattcctggacaaggtgctggtggccgccaacaagaccgacgtgaaggagaagcagaagaagctggtggagcagctgaccggcctgatcagcagcagccccggcccccccaccagaaagctgctggccaagaacctggccgccctgtacagcatcggcgacaccttcaccgtgttccagaccctggacaagtgcaacgacatcatcagaaacaaggacgacaccgccgcctacctgcccaccaagctggccgccgtggcctgcgtgggcgccttctacgagaagatgggcagaatgctgggcagcgccttccccgagaccgtgaacaacctgctgaagagcctgaagagcgccgagagccagggcagaagcgagatcctgatgagcctgcagaaggtgctgagcggcctgggcggcgccgccgccagcagccacagagacatctacaagaacgccagaagcctgctgaccgacagaagcatggccgtgagatgcgccgtggccaagtgcctgctggagctgcagaacgaggccgtgttcatgtggaccgccgagctggagaacatcgccaccctgtgcttcaaggccctggagaacagcaactacggcgtgagagtggccgtgagcaagctgctgggcaccgtgatggccaccgccctgatgcccaagcaggccaccgtgatgagacagaacgtgaagagagccaccttcgacgaggtgctggagctgatggccaccggcttcctgagaggcggcagcggcttcctgaagagcggcggcgagatgctgaaggtgggcggcagcgtgaacagagaggtgagagtgggcgtgacccaggcctacgtggtgttcgtgaccaccctgggcggccagtggctggagagaagcttcgccaccttcctgagccacgtgctggacctggtgagccaccccagagccacccagacccacgtggaggccgtgtacagcagaagatgcgtgagcttcatcctgagagccaccgtgggcagcctgctgggcgagaaggcccagatcgccgccgccaaggagatctgccaggccatcggcaagcagatgaaggccgtggaggccgtggtgaacgacaccagcggcgagaacaagagcggcgccgccgacatcgccgccagccagcacgtgatggtgtgcgccctgcaggagctgggcagcctggtgcagagcctgaacgccaccgccagccccctgatccaggaggccagcatcggcctgctggagatcgtgaccagcgtgctgctgcaccccagcatggccgccagactggccgccgcctggtgcctgagatgcgtggccgtggccctgcccttccagctgacccccttcctggacagatgcgccgagagactgaacaacctgaagaccagccccgaggccgtgagcggctacagcttcgccatggccgccctgctgggcggcgtgcaccagtgccccctgggcatcccccacgccaagggcaagatggtggtgagcatcgccgaggacctgctgagaaccgccgcccagaacagcagactgagcctgcagagaacccaggccggctggctgctgctgggcgccctgatgaccctgggccccagcgtggtgagataccacctgcccaagatgctgctgctgtggagaaacgtgttccccagaagcctgaaggagctggaggccgagaaggccagaggcgacagcttcacctggcaggtgaccctggagggcagagccggcgccctgtgcgccatgagaagcttcgtggcccactgccccgagctgctgaccgaggacgtgatcagaaagctgatgacccccatcgagtgcgccatgaccatgatgagccacatccccagcgtgatgaaggcccacggcgcccacctgaaggccagcgccgccatggtgagactgagactgtacgacatcctggccctgctgccccccaagacctacgagggcagcttcaacgccctgctgagagagctggtggccgagttcaccctgaccgacaacagcgccaacaccaccaccagcctgctgagaagcctgtgccactacgacgacagcgtgctgctgggcagctggctgcaggagaccgaccacaagagcatcgaggaccagctgcagcccaacagcgccagcggcagcggcgccctggagcacgaccccagcagcatctacctgagaatccccgccggcgaggccgtgcccggccccctgcccctgggcgtgagcgtgatcgacgccagcgtggccctgttcggcgtggtgttcccccacgtgagctacaagcacagactgcagatgctggaccacttcgccgagtgcgtgaagcaggccaagggcgtgagacagcaggccgtgcagctgaacatcttcaccgccgtgctgagcgccctgaagggcctggccgagaacaagagcaccctgggccccgaggaggtgagaaagagcgccctgaccctggtgatgggccccctggacaaccccaaccccatcctgagatgcgccgccggcgaggccctgggcagaatggcccaggtggtgggcgaggccaccttcatcgccagaatggcccagtacagcttcgacaagctgaagagcgccagagacgtggtgagcagaaccggccacagcctggccctgggctgcctgcacagatacgtgggcggcatcggcagcggccagcacctgaagaccagcgtgagcatcctgctggccctggcccaggacggcaccagccccgaggtgcagacctggagcctgcacagcctggccctgatcgtggacagcagcggccccatgtacagaggctacgtggagcccaccctgagcctggtgctgaccctgctgctgaccgtgccccccagccacaccgaggtgcaccagtgcctgggcagatgcctgggcgccatcatcaccaccgtgggccccgagctgcagggcaacggcgccaccaccagcaccatcagaagcagctgcctggtgggctgcgccatcacccaggaccacagcgacagcctggtgcaggccgccgccatcagctgcctgcagcagctgcacatgttcgcccccagacacgtgaacctgagcagcctggtgcccagcctgtgcgtgcacctgtgcagcagccacctgctgctgagaagagccgccgtggcctgcctgagacagctggcccagagagaggccgccgaggtgtgcgagtacgccatgagcctggccaagaacaccggcgacaaggagagcagcagcgccaacgtgagccccttcgcccccggcgtgagcagcagaaccgacatccactgcagacaccagggcgtgaacatcaccgagaccggcctggagggcctgctgttcggcatgctggacagagagaccgacagaaagctgtgcagcgacatccacgacaccctgggccacatgctgagcagcctggccgtggagaagctgagccactggctgatgctgtgcaaggacgtgctggccgccagcagcgacatgagcaccgccaccctgctgagcagcggcaaggacgaggaggccgagaagaaggacgagatggacgacgacaccatgttcaccaccctgggcgaggaggacaagagcaagcccttcgtggcccccagatgggccaccagagtgttcgccgccgactgcctgtgcagaatcatcaacctgtgcgagaacgccgaccaggcccacttcgacctggccctggccagaagcgccaagctgagaaaccccaccaacgacctgctggtgctgcacctgagcgacctgatcagaatggccttcatggccgccaccgaccacagcaaccagctgagaatggccggcctgcaggccctggaggacatcatcaagaagttcgccagcgtgcccgagcccgagttccccggccacgtgatcctggagcagtaccaggccaacgtgggcgccgccctgagacccgccttcagccaggacacccccagcgacatcatcgccaaggcctgccaggtgtgcagcacctggatcggcagcggcgtggtgagcgacctgaacgacctgagaagagtgcacaacctgctggtgagcagcctggacaaggtgcaggccggcaagggcagcagcagccagctgtacagagagagcgccaccaccatggagaagctggccgtgctgaaggcctgggccgaggtgtacgtggtggccatgaacatcaagaaggaggccgagagcaagcccaagagagccatcaagaacaccgacgacgacgacgacgactgcggcaccatcgacgagctgccccccgacagcctgatcaccctggtgcagcccgagctgcccaccctgagcagactgtggctggccgccctgaaggactacgccctgctgaccctgcccgccgagttcagcagccagctgccccccgacggcggcgccttctacacccccgagaccatcgacaccgccagactgcactacagaaacagctgggcccccatcctgcacgccgtggccctgtggctgaacagcaccggcttcacctgcagcgagagcaccgaggccgccgccatcagcggcctgcagaagagaagcaccagcgtgaacctgaaccaggccagcggcgccgtgggcagcgccaagagcctgcccgagatcaacaaggacagaatgcacctgatcctgggcgtgagcatccagttcctgtgcagccccagacccgaggagcccatcgagcacgtgaccgcctgcctgcaggccctgcacaccctgctggacagcccctacgccagagtgcacatcgccgaggaccagctgatcggcgtggagctgctgagcgtgctgcacagactgctgctgacctggaaccccagcagcgtgcagctgctggtgaccggcgtggtgcagcagatcgtgagagccgcccaggactacctgcaggagaagagaaacaccctgagatgcatgaccatcctgcccaccatcctgttcctgatcgccagaatcctgaaggacaccgccatcaagagcgccgacaaccaggtgcccccccccgtgagcgccgccctgcagggcatcaagagcatcgtgaccctgagcatggccaagaccgaggccggcgtgcagaagcagtggaccgccctgatcagaagcaccctggcctgcatcctggagtacagccagcccgaggacagcgtgcccacccccgacgaggtgagcatgctgaccgccatcgccctgttcctgtggagcgccagcaacgagatcatcggcgtgcagagcctgcagaacggctgcatgaacagattcaagaacgccctgaacagctgcgacccctgggtgcaggccaagtgctaccagctgctgctgagcgtgttccagcacagcaacagagccctgagcaccccctacatccacagcctggcccccatcgtggtggagaagctgaaggccgtggagagaaacagacccgccagcaacatcgagctgctggccgtgcaggagggcatcaaggtgctggagaccctggtggccctgggcgaggagcagaacagagtgcagctgctggccctgctggtgcccaccctgatcagctacctgctggacgagaacagcttcgccagcgccagcagcgccagcaaggacctgcacgagttcgccctgcagaacctgatgcacatcggccccctgtacccccacgccttcaagaccgtgatgggcgccgcccccgagctgaaggtgagactggagaccgccgtgagagccagccaggccagcaaggccaaggccgccgccagacagcccgcccccgccatccacagcgcccccaccatcaagctgaagaccagcttcttctag

SEQ ID NO: 201032 - DNA, 2307 bp, Artificial Sequence
  derived and/or modified sequence
atggagctggcccacagcctgctgctgaacgaggaggccctggcccagatcaccgaggccaagagacccgtgttcatcttcgagtggctgagattcctggacaaggtgctggtggccgccaacaagaccgacgtgaaggagaagcagaagaagctggtggagcagctgaccggcctgatcagcagcagccccggcccccccaccagaaagctgctggccaagaacctggccgccctgtacagcatcggcgacaccttcaccgtgttccagaccctggacaagtgcaacgacatcatcagaaacaaggacgacaccgccgcctacctgcccaccaagctggccgccgtggcctgcgtgggcgccttctacgagaagatgggcagaatgctgggcagcgccttccccgagaccgtgaacaacctgctgaagagcctgaagagcgccgagagccagggcagaagcgagatcctgatgagcctgcagaaggtgctgagcggcctgggcggcgccgccgccagcagccacagagacatctacaagaacgccagaagcctgctgaccgacagaagcatggccgtgagatgcgccgtggccaagtgcctgctggagctgcagaacgaggccgtgttcatgtggaccgccgagctggagaacatcgccaccctgtgcttcaaggccctggagaacagcaactacggcgtgagagtggccgtgagcaagctgctgggcaccgtgatggccaccgccctgatgcccaagcaggccaccgtgatgagacagaacgtgaagagagccaccttcgacgaggtgctggagctgatggccaccggcttcctgagaggcggcagcggcttcctgaagagcggcggcgagatgctgaaggtgggcggcagcgtgaacagagaggtgagagtgggcgtgacccaggcctacgtggtgttcgtgaccaccctgggcggccagtggctggagagaagcttcgccaccttcctgagccacgtgctggacctggtgagccaccccagagccacccagacccacgtggaggccgtgtacagcagaagatgcgtgagcttcatcctgagagccaccgtgggcagcctgctgggcgagaaggcccagatcgccgccgccaaggagatctgccaggccatcggcaagcagatgaaggccgtggaggccgtggtgaacgacaccagcggcgagaacaagagcggcgccgccgacatcgccgccagccagcacgtgatggtgtgcgccctgcaggagctgggcagcctggtgcagagcctgaacgccaccgccagccccctgatccaggaggccagcatcggcctgctggagatcgtgaccagcgtgctgctgcaccccagcatggccgccagactggccgccgcctggtgcctgagatgcgtggccgtggccctgcccttccagctgacccccttcctggacagatgcgccgagagactgaacaacctgaagaccagccccgaggccgtgagcggctacagcttcgccatggccgccctgctgggcggcgtgcaccagtgccccctgggcatcccccacgccaagggcaagatggtggtgagcatcgccgaggacctgctgagaaccgccgcccagaacagcagactgagcctgcagagaacccaggccggctggctgctgctgggcgccctgatgaccctgggccccagcgtggtgagataccacctgcccaagatgctgctgctgtggagaaacgtgttccccagaagcctgaaggagctggaggccgagaaggccagaggcgacagcttcacctggcaggtgaccctggagggcagagccggcgccctgtgcgccatgagaagcttcgtggcccactgccccgagctgctgaccgaggacgtgatcagaaagctgatgacccccatcgagtgcgccatgaccatgatgagccacatccccagcgtgatgaaggcccacggcgcccacctgaaggccagcgccgccatggtgagactgagactgtacgacatcctggccctgctgccccccaagacctacgagggcagcttcaacgccctgctgagagagctggtggccgagttcaccctgaccgacaacagcgccaacaccaccaccagcctgctgagaagcctgtgccactacgacgacagcgtgctgctgggcagctggctgcaggagaccgaccacaagagcatcgaggaccagctgcagcccaacagcgccagcggcagcggcgccctggagcacgaccccagcagcatctacctgctgctgttcctggtgcactag

SEQ ID NO: 201033 - DNA, 5949 bp, Artificial Sequence
  derived and/or modified sequence
atggagctggctcattccctgctcctgaacgaggaggccctcgcccagataaccgaggccaagaggcccgtctttatattcgagtggctccgcttcctggacaaggtgctggttgcagccaataaaactgatgtgaaggaaaagcaaaaaaagcttgtggagcagctaactggcctgattagcagctcccccgggcctcccacacgcaagctcctggccaaaaaccttgcagccctttactctatcggcgataccttcactgttttccagactctcgataagtgcaacgatatcattcgaaacaaggatgacactgccgcgtacctcccgactaagttggcggccgtggcctgcgtcggtgcattttatgagaaaatgggcaggatgctggggtccgcgtttcccgagacggttaataatctgttgaaaagcctaaaaagtgccgagagccagggccggtccgaaattctcatgagtctgcagaaagttctgtcaggcttgggtggagctgcagcttccagtcacagagatatctataaaaatgcgcgatctctcctgactgacagaagtatggctgtcaggtgtgccgtggccaaatgcttgctggagctgcagaacgaggccgttttcatgtggacggccgagctcgagaacattgctaccctgtgtttcaaggcccttgagaattcaaattatggagtacgtgttgcggtcagcaaacttctgggcactgttatggctactgctctgatgccaaaacaggccaccgtgatgagacagaatgtgaagagggcaacctttgatgaagtcttggagctcatggctaccggcttcctccgcggcggcagcgggttcctcaagtccggaggagagatgctgaaagtgggaggctccgtgaatcgcgaggtgcgggtgggggtgacgcaggcttatgtcgtgtttgtgacaacactaggtgggcagtggctcgaacgaagctttgctacgtttctgtctcacgtattggaccttgtgagccatccgcgagcaacacagacgcacgtggaagctgtatattcgagacggtgtgtgtcattcatactgagagctacagtgggtagtctcttgggcgaaaaagctcagatcgcagcagctaaagaaatctgtcaggcaatcggcaaacagatgaaggccgtggaagccgtggtgaacgatactagcggggaaaacaaatcaggagctgcagatattgccgcatctcagcatgttatggtgtgcgcactccaggagctgggctctctcgtgcagtccctcaatgcgactgcttctccgcttatccaggaagcctccattggactgctagagatcgttacatctgtcctcttacacccttccatggcagctaggcttgctgctgcatggtgcctgcggtgtgtcgcagtagctctgccatttcaactaaccccatttttagatcgctgtgcagagcgcttaaataacttgaagaccagtcctgaggctgtcagtggatactcattcgctatggcagcactgttgggcggagttcaccagtgtccactggggatcccccatgcaaaggggaagatggtggtgagtatagcagaagacttgttgcgcacggccgcccaaaatagccggctcagcctgcagagaacccaagccggatggctgttgctgggcgcccttatgacactggggccttcagtggttaggtaccaccttcctaaaatgctactgctgtggcggaacgtgtttccccggagccttaaggagctggaggcggaaaaagcacgcggagattccttcacttggcaggtaacgctggaagggcgcgcgggcgccctatgtgccatgcgcagcttcgtggctcactgccccgagttactgactgaggacgtgattaggaagctcatgacacccatagagtgtgcgatgaccatgatgagtcatattcccagcgtgatgaaagctcacggagcacacctcaaggcttccgccgctatggtgaggctcagactatacgacattttggcgctgctcccccccaaaacatatgaggggtcatttaacgctctcctgcgagaactggtggccgagtttacactgactgacaactctgccaacacaacaacatccctcttgcggtcactatgccactacgatgactcagtcttgcttggatcctggctccaggagaccgaccataagagcatcgaggaccagctgcagccaaatagcgcaagtggatcgggggcgctggaacatgacccaagttcaatatacttacggatcccagctggagaggctgtccccggtccactgccactgggcgtgtctgtgattgacgcctccgtggccctgtttggcgttgtattcccccatgtttcctacaaacaccgtctccaaatgcttgatcatttcgctgagtgcgtgaagcaggcgaaaggagtcagacagcaagctgtccaattgaatatatttaccgctgtgctcagtgcgctcaagggacttgccgaaaataaaagcaccttaggtccggaggaggtcagaaaatccgcgctaacactcgttatggggccgcttgacaacccaaatccaattcttcgatgcgctgcgggggaggccctgggaagaatggcacaggtggtgggtgaagctaccttcatcgcgaggatggctcagtatagtttcgacaagcttaagagcgccagagacgtggtgagcaggacaggccactccctcgcgctcggatgcctacaccgatatgtgggcggcattggttccgggcagcatctgaaaacatcggtctccatcttgttggctctcgctcaagacgggacctcacccgaggtgcagacttggtctctacatagtctggctctcattgtggactctagcggacctatgtatcgtggctatgtggaaccaaccctgagcctggtgctgactctgttgctgaccgttcctcccagtcacacagaggttcaccaatgtctcggacgatgtctgggagcaattatcaccacagttggaccagagctgcagggcaatggtgcgacaacatccactatccggagtagctgcctcgttgggtgtgccattactcaggatcattcagatagcctggttcaggcagccgccatatcctgccttcagcagctgcacatgtttgcgccaagacacgttaacttgtcgtctctggtcccaagtctttgtgtccacctgtgttccagtcatctcctgctgcgcagagcggcagtggcatgcttaagacagctggcacagagagaagccgccgaagtctgtgagtacgccatgtccctggcaaagaatactggtgacaaggaaagcagttccgctaacgtgtccccattcgcccccggcgtcagctcccgcacagacattcattgtaggcaccagggggttaatatcactgaaaccggcctggagggtctgttattcgggatgttagaccgagagaccgatcggaagctctgctccgacatccatgataccctgggacacatgctgtcctccttagccgttgaaaagctctcccattggctcatgctctgcaaggatgttctcgcagcttctagcgatatgagtactgccactctgctgtcatcggggaaagatgaggaagccgagaaaaaggacgaaatggacgacgacaccatgtttactactctgggtgaagaggataaaagtaaaccttttgtagctccgagatgggcgacacgcgttttcgcagccgactgcttgtgtagaattataaacctctgcgagaatgctgatcaggcccatttcgacttagccttggccaggtccgccaagctcaggaatccaacgaacgaccttctggtgctacacttatctgatttgattagaatggcctttatggctgcgactgatcacagcaaccagctccggatggcgggcttgcaggcgcttgaggacatcatcaagaagtttgcctccgtgccggagcctgaattcccaggacacgtgatactggaacagtatcaggccaatgtcggggccgcccttaggcccgcattcagtcaagatactccctctgacatcatcgcgaaggcctgtcaagtgtgcagcacatggatcggaagcggtgtagtgtctgacctcaatgatttacggcgcgtgcacaacctgctggtttccagtttagacaaagtgcaggccggcaagggaagttctagccagctgtatagggaatccgcaacaacaatggagaaactggccgtcctcaaggcgtgggctgaggtctacgtagtggcaatgaatatcaagaaggaagctgaatccaagccaaagcgtgctatcaaaaacactgacgatgacgacgacgattgcggaactattgacgaactcccccccgatagcctcattactctggttcaacccgaattgcccactctcagtcgactgtggttagcagccctgaaagattacgcgctcttaaccctgccagccgagttctctagccagctgccacctgacggcggggctttctacacacccgagactatcgacaccgcgcggttgcattatcgcaacagttgggcaccgatcttgcatgcagtagccttgtggctgaacagtactggttttacgtgctccgaaagcaccgaagctgcagcgatttcgggattgcagaaaagatcaaccagcgttaatttgaatcaggcgtctggagcagtgggcagcgctaagagcctacccgaaatcaataaagacagaatgcacttgatactgggggtgtctatccagtttttgtgctcccctcgcccagaggaacccatcgagcacgttaccgcctgcctgcaggcactgcacacgttactggattccccgtacgcaagggttcatatagcggaagaccaactgatcggggtggagctgctcagtgtcttgcatagattgctgttgacatggaatccaagctctgtgcagttactagtcacaggtgtagtgcagcagatcgtgagggcagcccaggattacctccaggagaagcgcaataccctgagatgtatgaccatactgcccacgatcctctttttgatcgcacgcatactcaaagacactgcaataaagagcgccgataaccaggtgccaccccccgtgtccgctgcactgcaggggatcaagtccatagtgacactctcgatggcaaagacagaagctggcgtgcagaaacaatggacggccctgatccgctctaccctcgcatgcattctcgagtattcacagcccgaagattccgtcccaacacccgacgaggtgtccatgttgaccgcaatcgcgctcttcttgtggagcgcaagtaatgagataattggagttcagagcctccagaatggttgtatgaaccggttcaagaacgccctcaattcttgtgacccatgggttcaagcaaaatgctaccaactactgctgtcggtgttccaacattccaatcgcgcattgtcaaccccctacatccattccctggcccctattgtagtagagaagctcaaagccgtggaaaggaataggccggcttcaaatatagagctgctggccgttcaagagggaatcaaggtgctggagacattagtcgcactcggggaagagcagaatagggtccaactgctggcccttctggtgccgacccttattagctatctgctggatgaaaattcctttgcttctgcaagctcagcgtccaaggacttacatgaatttgcccttcaaaatctcatgcatatcggaccattgtacccacacgcttttaagactgtgatgggagccgcaccggaattaaaagtgaggcttgaaaccgcggtgcgggccagtcaagcctccaaggccaaagctgctgcgagacagcccgccccggccatccattcagcccccacgattaaactcaagacgagtttcttctag

SEQ ID NO: 201034 - DNA, 2307 bp, Artificial Sequence
  derived and/or modified sequence
atggagctcgcccatagcctattactcaacgaagaggccttagcccagatcactgaagctaagcgacccgtgtttatcttcgaatggctgagattcctagacaaagtactcgttgccgcgaacaaaaccgatgtaaaggaaaagcagaaaaaactcgtagaacagctcacaggcctcatcagctcctcccccggtcctcctacccgaaaattacttgctaaaaatctggcggccttgtactcaataggcgatacatttacggtctttcaaaccctcgataagtgtaatgatatcataagaaacaaggacgatactgccgcttacctccccacgaagctggccgccgtcgcctgtgttggggctttctacgagaagatgggacggatgctgggaagcgccttcccggagacagttaataacctcctcaagtccctaaagagcgccgagagtcagggtaggagtgaaattctgatgagcctccagaaggtgctctccggactgggtggagcagcagccagttctcatagggacatttataaaaacgcccgcagtctgctgaccgacaggagtatggctgtgcggtgtgctgtagccaaatgtctcctggagctacagaacgaggccgtcttcatgtggactgcagagctggagaatatcgccacattgtgtttcaaggcgctcgagaattcaaactacggcgtgcgcgttgccgtatcaaagctgttgggcactgttatggctaccgctctgatgccaaagcaggcgaccgtcatgcggcagaatgtgaagcgggccacatttgacgaggtgctggaactgatggccacgggttttctaaggggaggcagcggtttcctgaagagtgggggcgaaatgctaaaggtgggagggtcagtcaatagggaggtcagagtgggggtgacacaggcttatgtcgttttcgtaactaccctagggggccaatggctcgagagatcatttgctacatttctgagccacgtgctggatttggtttctcaccctagggcaactcaaacccacgttgaggccgtgtattctaggagatgcgtcagcttcattctgagggccacggttggaagcctgctgggagagaaagcccaaatagctgccgccaaggagatttgccaggcaattgggaaacagatgaaggcagtagaggctgtggtcaacgacacatctggcgaaaacaagtctggggcagcagacattgccgcttctcagcacgtcatggtctgcgctctgcaggaactcggctcactcgtgcagtcactgaatgcaactgccagtccactgatccaggaagcctcaattgggctcttagagattgttacttccgtgttgctccatcccagcatggccgcaaggctcgccgccgcatggtgtctgcgttgtgtagccgtcgccttaccatttcagctaaccccctttctggacagatgtgccgagcggttgaacaacttaaagacgagtccggaggccgtgtcaggatactcttttgctatggccgccttactaggcggagtccaccaatgtccacttgggattccacatgcaaagggcaagatggtcgtgagcattgccgaagatctgctgcggaccgcagcgcagaacagtaggctgtccctacaacggacacaggccggatggttacttctgggagccctgatgacccttggccctagtgtcgtccgataccatctcccaaagatgctgctcctgtggcggaacgtctttccaaggtctcttaaggaactggaagcggaaaaggcacgcggcgattccttcacttggcaggtgaccctcgaggggagagctggtgcactctgcgcgatgagaagcttcgtggcacattgccctgaattgttgactgaagacgtaattaggaaattaatgacacctatagagtgtgccatgactatgatgtcccacatccctagcgtgatgaaagcccatggggcccatcttaaggcttctgccgccatggttagattgaggctgtatgatatactggcccttcttccacccaagacctacgagggatctttcaacgcgctgttacgcgagctggtcgccgagttcacactgacagacaacagtgcaaatactactaccagcttgctgcgatccctgtgccactatgacgattccgtattactgggctcttggttgcaagagaccgatcacaagtctatcgaggaccagctgcagcctaattccgcctccggttcgggagctctggaacatgaccctagcagcatatatttactgctgtttctggtgcattag

SEQ ID NO: 201035 - DNA, 5949 bp, Artificial Sequence
  derived and/or modified sequence
atggagctggcccacagcctgctgctgaatgaggaggccctggcccagatcacagaggccaagaggcctgtgttcatctttgagtggctgcgcttcctggacaaggtgctggtggccgccaacaagacagatgtgaaggagaagcagaagaagctggtggagcagctgaccggcctcatcagcagcagccctggcccccccaccaggaagctgctggccaagaacctggccgccctgtacagcatcggggacaccttcaccgtcttccagaccctggacaagtgcaatgacatcatccggaacaaggatgacacagctgcctacctgcccaccaagctggccgctgtggcctgtgtgggcgccttctatgagaagatgggccgcatgctgggcagcgccttccctgagaccgtgaacaacctgctgaagagcctgaagtctgctgagagccagggccgctctgagatcctgatgagcctgcagaaggtgctgagcggcctgggcggcgctgctgccagcagccaccgggacatctacaagaatgcccggagcctgctgacagaccgctccatggctgtgcgctgtgctgtggccaagtgcctgctggagctgcagaatgaggccgtgttcatgtggacagctgagctggagaacatcgccaccctgtgcttcaaggccctggagaacagcaactacggcgtgcgggtggccgtgtccaagctgctgggcaccgtgatggccacagccctgatgcccaagcaggccaccgtgatgaggcagaatgtgaagagggccacctttgatgaggtgctggagctgatggccaccggcttcctgcggggcggcagcggcttcctgaagagcggcggggagatgctgaaggtgggcggctctgtgaaccgggaggtgcgggtgggcgtgacccaggcctacgtggtgtttgtgaccaccctgggcggccagtggctggagaggagctttgccaccttcctgagccacgtgctggacctggtgagccacccccgggccacccagacccacgtggaggccgtgtacagccgccgctgtgtgtccttcatcctgcgggccaccgtgggcagcctgctgggggagaaggcccagattgctgctgccaaggagatctgccaggccatcggcaagcagatgaaggctgtggaggccgtggtgaatgacaccagcggggagaacaagtctggagctgctgacattgctgccagccagcacgtgatggtgtgtgccctgcaggagctgggcagcctggtgcagagcctgaatgccacagccagccccctcatccaggaggccagcatcggcctgctggagatcgtgacctctgtgctgctgcaccccagcatggccgcccggctggccgccgcctggtgcctgcgctgtgtggccgtggccctgcccttccagctgacccccttcctggacagatgtgccgagcggctgaacaacctgaagaccagccctgaggccgtgtctggctacagctttgccatggccgccctgctgggcggcgtgcaccagtgccccctgggcatcccccacgccaagggcaagatggtggtgtccattgctgaggacctgctgaggacagctgcccagaacagccggctgagcctgcagaggacccaggccggctggctgctgctgggcgccctgatgaccctgggccccagcgtggtgcgctaccacctgcccaagatgctgctgctgtggagaaatgtgttccccaggagcctgaaggagctggaggccgagaaggcccggggggacagcttcacctggcaggtgaccctggagggccgggccggggccctgtgtgccatgaggagctttgtggcccactgcccagagctgctgacagaagatgtgatcaggaagctgatgacccccattgaatgtgccatgaccatgatgagccacatccccagcgtgatgaaggcccacggggcccacctgaaggccagcgctgccatggtgcggctgcggctgtatgacatcctggccctgctgccccccaagacctatgagggcagcttcaatgccctgctgcgggagctggtggccgagttcaccctgacagacaacagcgccaacaccaccaccagcctgctgcggagcctgtgccactatgatgattctgtgctgctgggctcctggctgcaggagacagaccacaagagcattgaggaccagctgcagcccaacagcgccagcggcagcggggccctggagcatgaccccagcagcatctacctgcgcatcccagctggggaggccgtgcccggccccctgcccctgggcgtgtctgtgattgatgcctctgtggccctgtttggagtggtgttcccccacgtgtcctacaagcaccggctgcagatgctggaccactttgctgaatgtgtgaagcaggccaagggcgtgcggcagcaggccgtgcagctgaacatcttcaccgctgtgctgagcgccctgaagggcctggccgagaacaagagcaccctgggccctgaggaggtgaggaagagcgccctgaccctggtgatgggccccctggacaaccccaaccccatcctgcgctgtgccgccggggaggccctgggccgcatggcccaggtggtgggggaggccaccttcatcgccaggatggcccagtacagctttgacaagctgaagagcgccagagatgtggtgtccaggacaggccacagcctggccctgggctgcctgcaccgctacgtgggcggcatcggcagcggccagcacctgaagacctctgtgtccatcctgctggccctggcccaggacggcaccagccctgaggtgcagacctggagcctgcacagcctggccctgattgtggacagcagcggccccatgtaccggggctacgtggagcccaccctgagcctggtgctgaccctgctgctgactgtgccccccagccacacagaggtgcaccagtgcctgggccgctgcctgggcgccatcatcaccaccgtgggccctgagctgcagggcaatggagccaccaccagcaccatccgcagcagctgcctggtgggctgtgccatcacccaggaccacagcgacagcctggtgcaggccgccgccatcagctgcctgcagcagctgcacatgtttgcccccaggcatgtgaacctgagcagcctggtgcccagcctgtgtgtgcacctgtgcagcagccacctgctgctgcggcgggctgctgtggcctgcctgcggcagctggcccagcgggaggccgctgaggtgtgtgaatatgccatgagcctggccaagaacacaggagacaaggagagcagcagcgccaacgtgagcccctttgcccctggggtgagcagcaggacagacatccactgccgccaccagggcgtgaacatcacagaaacaggcctggagggcctgctgtttggcatgctggaccgggagacagacaggaagctgtgcagcgacatccatgacaccctgggccacatgctgagcagcctggccgtggagaagctgagccactggctgatgctgtgcaaggatgtgctggccgccagcagtgacatgagcacagccaccctgctgagcagcggcaaggatgaggaggccgagaagaaggatgagatggatgatgacaccatgttcaccaccctgggggaggaggacaagagcaagccctttgtggccccccgctgggccaccagggtgtttgctgctgactgcctgtgccgcatcatcaacctgtgtgaaaatgctgaccaggcccactttgacctggccctggcccggagcgccaagctgaggaaccccaccaatgacctgctggtgctgcacctgagtgacctgatccgcatggccttcatggccgccacagaccacagcaaccagctgaggatggccggcctgcaggccctggaggacatcatcaagaagtttgcctctgtgcctgagcctgagttccctggccacgtgatcctggagcagtaccaggccaacgtgggcgccgccctgcggcctgccttcagccaggacacccccagcgacatcatcgccaaggcctgccaggtgtgcagcacctggattggcagcggcgtggtgtctgacctgaatgacctgcggcgggtgcacaacctgctggtgagcagcctggacaaggtgcaggccggcaagggcagcagcagccagctgtaccgggagagcgccaccaccatggagaagctggccgtgctgaaggcctgggccgaggtgtatgtggtggccatgaacatcaagaaggaggccgagagcaagcccaagagggccatcaagaacacagatgatgatgatgatgactgtggcaccattgatgagctgcccccagacagcctcatcaccctggtgcagcctgagctgcccaccctgagccggctgtggctggccgccctgaaggactatgccctgctgaccctgcctgctgagttcagcagccagctgcccccagatggaggagccttctacaccccagagaccatcgacacagcccggctgcactacagaaattcctgggcccccatcctgcatgctgtggccctgtggctgaacagcacaggcttcacctgcagcgagagcacagaggccgccgccatcagcggcctgcagaagaggagcacctctgtgaacctgaaccaggccagcggggctgtgggcagcgccaagagcctgcctgagatcaacaaggacaggatgcacctgatcctgggcgtgtccatccagttcctgtgcagccccaggcctgaggagcccatcgagcacgtgacagcctgcctgcaggccctgcacaccctgctggacagcccctatgcccgggtgcacatcgccgaggaccagctgattggagtggagctgctgtctgtgctgcaccggctgctgctgacctggaaccccagctctgtgcagctgctggtgactggagtggtgcagcagatcgtgcgggccgcccaggactacctgcaggagaagaggaacaccctgcgctgcatgaccatcctgcccaccatcctcttcctgattgcccgcatcctgaaggacacagccatcaagtctgctgacaaccaggtgcccccacctgtgtctgctgccctgcagggcatcaagagcatcgtgaccctgtccatggccaagacagaggccggcgtgcagaagcagtggacagccctgatccgcagcaccctggcctgcatcctggagtacagccagcctgaggacagcgtgcccaccccagatgaggtgtccatgctgacagccatcgccctcttcctgtggagcgccagcaatgagatcattggagtgcagagcctgcagaatggctgcatgaaccgcttcaagaatgccctgaacagctgtgacccctgggtgcaggccaagtgctaccagctgctgctgtctgtgttccagcacagcaacagagccctgagcaccccctacatccacagcctggcccccatcgtggtggagaagctgaaggctgtggagaggaacagacctgccagcaacatcgagctgctggccgtgcaggagggcatcaaggtgctggagaccctggtggccctgggggaggagcagaacagagtgcagctgctggccctgctggtgcccaccctcatctcctacctgctggatgagaacagctttgccagcgccagcagcgccagcaaggacctgcacgagtttgccctgcagaacctgatgcacatcggccccctgtacccccacgccttcaagacagtgatgggcgccgcccctgagctgaaggtgcggctggagacagctgtgcgggccagccaggccagcaaggccaaggctgctgcccggcagcctgccccagccatccacagcgcccccaccatcaagctgaagaccagcttcttctag

SEQ ID NO: 201036 - DNA, 2307 bp, Artificial Sequence
  derived and/or modified sequence
atggagctggcccacagcctgctgctgaatgaggaggccctggcccagatcacagaggccaagaggcctgtgttcatctttgagtggctgcgcttcctggacaaggtgctggtggccgccaacaagacagatgtgaaggagaagcagaagaagctggtggagcagctgaccggcctcatcagcagcagccctggcccccccaccaggaagctgctggccaagaacctggccgccctgtacagcatcggggacaccttcaccgtcttccagaccctggacaagtgcaatgacatcatccggaacaaggatgacacagctgcctacctgcccaccaagctggccgctgtggcctgtgtgggcgccttctatgagaagatgggccgcatgctgggcagcgccttccctgagaccgtgaacaacctgctgaagagcctgaagtctgctgagagccagggccgctctgagatcctgatgagcctgcagaaggtgctgagcggcctgggcggcgctgctgccagcagccaccgggacatctacaagaatgcccggagcctgctgacagaccgctccatggctgtgcgctgtgctgtggccaagtgcctgctggagctgcagaatgaggccgtgttcatgtggacagctgagctggagaacatcgccaccctgtgcttcaaggccctggagaacagcaactacggcgtgcgggtggccgtgtccaagctgctgggcaccgtgatggccacagccctgatgcccaagcaggccaccgtgatgaggcagaatgtgaagagggccacctttgatgaggtgctggagctgatggccaccggcttcctgcggggcggcagcggcttcctgaagagcggcggggagatgctgaaggtgggcggctctgtgaaccgggaggtgcgggtgggcgtgacccaggcctacgtggtgtttgtgaccaccctgggcggccagtggctggagaggagctttgccaccttcctgagccacgtgctggacctggtgagccacccccgggccacccagacccacgtggaggccgtgtacagccgccgctgtgtgtccttcatcctgcgggccaccgtgggcagcctgctgggggagaaggcccagattgctgctgccaaggagatctgccaggccatcggcaagcagatgaaggctgtggaggccgtggtgaatgacaccagcggggagaacaagtctggagctgctgacattgctgccagccagcacgtgatggtgtgtgccctgcaggagctgggcagcctggtgcagagcctgaatgccacagccagccccctcatccaggaggccagcatcggcctgctggagatcgtgacctctgtgctgctgcaccccagcatggccgcccggctggccgccgcctggtgcctgcgctgtgtggccgtggccctgcccttccagctgacccccttcctggacagatgtgccgagcggctgaacaacctgaagaccagccctgaggccgtgtctggctacagctttgccatggccgccctgctgggcggcgtgcaccagtgccccctgggcatcccccacgccaagggcaagatggtggtgtccattgctgaggacctgctgaggacagctgcccagaacagccggctgagcctgcagaggacccaggccggctggctgctgctgggcgccctgatgaccctgggccccagcgtggtgcgctaccacctgcccaagatgctgctgctgtggagaaatgtgttccccaggagcctgaaggagctggaggccgagaaggcccggggggacagcttcacctggcaggtgaccctggagggccgggccggggccctgtgtgccatgaggagctttgtggcccactgcccagagctgctgacagaagatgtgatcaggaagctgatgacccccattgaatgtgccatgaccatgatgagccacatccccagcgtgatgaaggcccacggggcccacctgaaggccagcgctgccatggtgcggctgcggctgtatgacatcctggccctgctgccccccaagacctatgagggcagcttcaatgccctgctgcgggagctggtggccgagttcaccctgacagacaacagcgccaacaccaccaccagcctgctgcggagcctgtgccactatgatgattctgtgctgctgggctcctggctgcaggagacagaccacaagagcattgaggaccagctgcagcccaacagcgccagcggcagcggggccctggagcatgaccccagcagcatctacctgctgctcttcctggtgcactag

SEQ ID NO: 201037 - DNA, 6905 bp, Artificial Sequence
  derived and/or modified sequence
ggtggggcatccgggtctcttggtggctgcttctacccccggagctcagctgatcttcccttccagactacgaggtgtgaatttcaaacttccgtaatggagttagcccacagtttattgctaaatgaagaagctttggctcaaatcaccgaagcaaaaagaccagttttcatctttgaatggttgcgatttcttgataaagtcttggttgctgccaacaagaccgatgtaaaggaaaaacagaaaaaacttgttgaacaattaactggattaataagtagttcacctggaccacctacacgaaaattattagctaaaaatctcgcagccctttatagcattggggatactttcacagtttttcagacacttgataaatgcaatgacattatcagaaataaagatgacactgcggcctacttaccaacaaaattggctgcggtggcttgtgtcggagcattttatgaaaaaatggggagaatgttgggcagcgcatttccagaaacggtaaataatctattgaaatctctgaaaagtgcagagtctcaagggcgaagtgaaatcttaatgagtctacagaaagttctaagtggactgggtggtgcagcagcttcctcccatcgtgatatttacaagaatgccaggtctctcttgactgataggtcaatggctgttcgatgtgcagtggccaagtgtctactagaactacagaatgaagctgtatttatgtggactgctgaactagaaaatatagccactctctgctttaaggctttggaaaactcaaattatggggtacgagtggcagtgtctaaacttttaggaacagtcatggccacagcattaatgccaaaacaggcaacagtaatgcgtcagaatgtgaagcgagcaacatttgatgaagtcttagaactcatggccacaggatttctgcgtggagggtcaggtttcttaaagagcggtggagaaatgttaaaagttggagggtccgttaatcgtgaagtgagagttggagttacgcaggcgtatgttgtttttgtgacaacattgggtggtcagtggttggagcgcagctttgccacgttcctgtcccatgtacttgatctggtttcccatcctcgggcaacacaaacacatgtggaggctgtgtactccagacgatgtgtttcctttatcctaagagctactgtgggcagtttgctaggtgaaaaagcccagattgcagctgccaaagaaatctgccaagctattggaaaacaaatgaaagccgtagaagcagtagtgaatgacacaagtggagaaaacaaatctggcgcagcagacattgcagcaagccagcatgtgatggtctgtgccctccaggaactcgggagcctggtgcagagcttgaatgccaccgcatcccctcttattcaagaagcatctatagggcttttggagattgtgacttcagtgctgcttcatccaagcatggctgcccgacttgctgctgcatggtgtttgcgctgtgtggctgtggcattacctttccagctgacaccatttctagacaggtgtgcagaacggctcaacaacttgaagacctcaccagaagctgtcagtggatatagttttgcaatggctgctttgttaggtggagtacatcagtgtcctttgggcattcctcatgccaaaggaaagatggtagttagtattgctgaagatcttttacgaactgctgcccaaaatagcaggctatctttacagcgcacccaagctggctggcttttacttggagcacttatgactttaggaccatctgtcgttcgttaccatctgcccaagatgttgttattgtggcgaaatgttttcccacgttccttaaaggaattggaagctgagaaggcccgaggcgattcttttacctggcaggtaactttggaaggtcgtgctggagctctatgtgccatgaggagcttcgttgcacattgtcctgagctactaactgaagatgtgattcgaaaattgatgacccctattgaatgtgccatgactatgatgtcacacattccatctgtaatgaaagcccatggagctcatctgaaagctagtgctgcaatggtccgtttaagactttatgatatcttggctttgttacctccaaaaacttatgaaggatcttttaatgcacttcttagagaactggtagcggaattcactttgactgacaactcagccaacacaactacttccctcctcagatccctctgccattatgatgatagtgttcttcttggttcttggcttcaggaaactgatcataaatcaattgaagaccagctccagccaaacagtgcctctggaagtggggctctggagcatgatccttcctctatttatttacgcatacctgctggagaagcagtacctggtcccctccctctcggagtctcagtcattgatgcttctgtggccctttttggtgtagtgtttcctcatgtttcttataaacaccgattacaaatgttggatcactttgctgaatgtgttaaacaagctaaaggtgtccgccagcaggctgtgcagcttaacatatttactgctgttcttagtgcactaaagggcttagctgaaaacaaaagtactttaggacctgaggaagttcgtaaatctgccctgacactggttatgggtcctctggacaacccaaaccccatcttacgttgtgcagcgggggaagctcttggaagaatggctcaggtggttggagaagcaacttttattgctagaatggcccaatatagctttgacaagttgaaatcggctcgagatgttgtatctaggactggtcattcattggctcttggttgtttgcatcgttatgttggtggaataggctcaggacaacatctgaagaccagtgtcagcattttattggctctagcacaagatgggacatcccctgaagtccagacttggtctcttcattcacttgctttgatagtggattctagtggtccgatgtatcgtggctatgtggaaccaacattatctctagttcttaccttgctgttgacagttccgccttcacatacagaagttcatcagtgtttgggtcgatgcttgggtgctataataactactgttggccctgaactacaagggaatggagcaacaacttctacaattcgttcctcttgtttggtgggttgtgcaataacacaagaccattcagattctcttgttcaggcagctgccatatcttgccttcagcagcttcacatgtttgcaccacgacatgtcaatctatctagccttgttcctagcctttgtgttcacttatgtagttcccatttgttacttcgacgagcagctgtggcatgtcttcggcaacttgcacaaagagaagcagcggaagtatgtgaatatgccatgagcctggcaaaaaatacaggggacaaagagagcagtagtgccaatgtcagtccttttgcccctggggttagttctcgaactgatatccattgccggcaccaaggtgttaatataacagaaactggtcttgagggacttctttttggaatgctagaccgggagacagatcgaaaattatgttctgatattcatgacactttgggacatatgctttcttcgctggcagtagaaaaactttctcattggctaatgctttgtaaagatgtcctggcagcttctagtgatatgagtactgcaactctcttaagtagtggaaaagatgaagaagctgaaaagaaagatgagatggatgatgataccatgtttaccacgttaggtgaagaagataaatcaaagccctttgtggcccctcgctgggccactcgagtatttgctgccgattgcctgtgtcgaatcatcaatttgtgtgagaatgcagaccaggctcactttgatcttgccttggcacgttctgctaaacttcgaaaccctacaaatgacctcttggtacttcatctctctgacctcattcgcatggcattcatggctgcaactgatcatagcaaccagctgcgaatggctgggctccaggcgcttgaagacattatcaagaagtttgcgtctgtgcctgagccagaatttccaggtcatgtgatactggagcagtatcaggctaatgtgggagctgctctaagaccagccttttcacaagatacaccatcagatataatagcgaaagcttgccaggtatgtagtacatggataggaagtggagttgtcagtgatctcaatgatctccgtcgagtacacaatcttcttgtttcttctctggacaaagttcaggctggaaaaggatcttccagccagctgtaccgagagagtgccacgaccatggaaaaactggctgttctcaaagcttgggcagaggtatatgtggtcgctatgaatattaaaaaggaagcagagtcaaaaccaaaaagagcaattaaaaatactgacgatgatgatgacgactgtggtaccatcgatgaactgccaccagatagtttaataacactggtacaacctgaactaccaacactcagtcgcctgtggttagcagcattaaaagattatgcactcttgactttaccagccgaattttctagtcagcttcctccagatggtggagcattttatacccctgaaactattgatacagctagacttcactatcggaattcctgggccccaattctccatgcggtggcactttggttaaatagcacaggatttacgtgctcagagtctacagaagcagcagcaatatctggtttacaaaaacgttctacatctgtcaatttaaaccaggcatcaggagcagtgggtagtgctaaatctttgccagaaattaacaaagacagaatgcatctgattttaggtgtgagtatacagtttctttgttcccctagacctgaggagcccattgaacatgttacagcatgcctgcaggccttacataccttgctagactccccttatgctcgagtccatattgcagaagatcagctgataggtgttgagttgctgagtgttttgcaccgccttctattgacctggaatccatcatctgtccagctgttggttactggagttgtacaacagatagtaagagctgctcaggattatttgcaagagaaaagaaacactctaaatgaagatgatatggaaaaagaggcctgtaccgtattgggagaaggaggtgacagcggtggtctcattcctggaaaatctcttgtgtttgcaactatggagctgctgatgttcattttagtacggcatatgccacatctcagtaccaaggtgtcagactctccaagtcacatagccactaaaactcgactatcagaagaaagtgctcgtttggtggcagccacagttaccatactctctgatttaccatccctttgttcacccgctggatgtatgacaatcctgcccacaattctgttcttaattgcaagaatattgaaagacacagcaataaagtctgcagataatcaggttcctccaccagtcagtgcagctcttcaagggattaaaagtattgtgacactttcaatggccaaaactgaggctggcgttcaaaaacagtggacagctctgattcgtagcacgcttgcttgcatcctggaatattctcaaccagaagactctgtacctacacctgatgaagtaagcatgctaacagcaattgcactcttcctgtggtctgctagtaatgaaataataggagtccagtcattacagaatggctgcatgaacagatttaaaaatgcattaaattcatgcgacccatgggttcaagccaaatgttaccagcttctcctctcagtcttccagcattccaatcgtgccctttcaactccttatattcattcattagctccaatagtggttgaaaagctaaaagctgttgaaagaaacagaccagccagtaacatagagcttttagcggttcaagaaggaataaaagttcttgaaacactggttgctcttggtgaagaacaaaacagagtccagctacttgctcttttagttcccactttgatatcttacctgctggatgaaaattcttttgcctcagcaagttcagcttccaaagatcttcatgagtttgcactccagaatttaatgcatattggacctctgtatccacatgctttcaagacagtaatgggggctgctcctgagttgaaagtgcgtctagaaactgccgttcgagcaagccaagcgagcaaagctaaagcggctgccagacaaccagcccccgccatacattctgcaccaacaattaagctaaaaacaagttttttttaatttgtaatttcatttatttgtatttatgttgtcaactagcccctaattagtgatggccactgtatcattccaggctacctatgggttctgttttatttgtatattggtattatagtgcttccaagtaggttaagtgaaataatgctcacaccacttattgatttttaaggagtgattttttttatcatgtggtgaatatgttttcattttcctcctaataatgtttctcttttgttaacttatttatttttcaaacactgagccatagtcttaaatttaaatgctaaaaacaattgtatcatgtagtcgggcagcctattgatactgtcaggggaaaaaaatgggtcagaactcagcatctgtcatgaaaaaaatcaattgaaaaacaagcagattttaaattttgaagtaatcaaaataatggaaagtgtctgttttgtggtgtatatactatgaataaaatcacagcattttctaagcatttcccaaaatgtccttatctttctgatggatcttttagctttcatatcaaattactaaattatgctatgtatattttagttggtaacaattaaaattctcatttaaaggtt

SEQ ID NO: 201038 - DNA, 6525 bp, Artificial Sequence
  derived and/or modified sequence
ggtggggcatccgggtctcttggtggctgcttctacccccggagctcagctgatcttcccttccagactacgaggtgtgaatttcaaacttccgtaatggagttagcccacagtttattgctaaatgaagaagctttggctcaaatcaccgaagcaaaaagaccagttttcatctttgaatggttgcgatttcttgataaagtcttggttgctgccaacaagaccgatgtaaaggaaaaacagaaaaaacttgttgaacaattaactggattaataagtagttcacctggaccacctacacgaaaattattagctaaaaatctcgcagccctttatagcattggggatactttcacagtttttcagacacttgataaatgcaatgacattatcagaaataaagatgacactgcggcctacttaccaacaaaattggctgcggtggcttgtgtcggagcattttatgaaaaaatggggagaatgttgggcagcgcatttccagaaacggtaaataatctattgaaatctctgaaaagtgcagagtctcaagggcgaagtgaaatcttaatgagtctacagaaagttctaagtggactgggtggtgcagcagcttcctcccatcgtgatatttacaagaatgccaggtctctcttgactgataggtcaatggctgttcgatgtgcagtggccaagtgtctactagaactacagaatgaagctgtatttatgtggactgctgaactagaaaatatagccactctctgctttaaggctttggaaaactcaaattatggggtacgagtggcagtgtctaaacttttaggaacagtcatggccacagcattaatgccaaaacaggcaacagtaatgcgtcagaatgtgaagcgagcaacatttgatgaagtcttagaactcatggccacaggatttctgcgtggagggtcaggtttcttaaagagcggtggagaaatgttaaaagttggagggtccgttaatcgtgaagtgagagttggagttacgcaggcgtatgttgtttttgtgacaacattgggtggtcagtggttggagcgcagctttgccacgttcctgtcccatgtacttgatctggtttcccatcctcgggcaacacaaacacatgtggaggctgtgtactccagacgatgtgtttcctttatcctaagagctactgtgggcagtttgctaggtgaaaaagcccagattgcagctgccaaagaaatctgccaagctattggaaaacaaatgaaagccgtagaagcagtagtgaatgacacaagtggagaaaacaaatctggcgcagcagacattgcagcaagccagcatgtgatggtctgtgccctccaggaactcgggagcctggtgcagagcttgaatgccaccgcatcccctcttattcaagaagcatctatagggcttttggagattgtgacttcagtgctgcttcatccaagcatggctgcccgacttgctgctgcatggtgtttgcgctgtgtggctgtggcattacctttccagctgacaccatttctagacaggtgtgcagaacggctcaacaacttgaagacctcaccagaagctgtcagtggatatagttttgcaatggctgctttgttaggtggagtacatcagtgtcctttgggcattcctcatgccaaaggaaagatggtagttagtattgctgaagatcttttacgaactgctgcccaaaatagcaggctatctttacagcgcacccaagctggctggcttttacttggagcacttatgactttaggaccatctgtcgttcgttaccatctgcccaagatgttgttattgtggcgaaatgttttcccacgttccttaaaggaattggaagctgagaaggcccgaggcgattcttttacctggcaggtaactttggaaggtcgtgctggagctctatgtgccatgaggagcttcgttgcacattgtcctgagctactaactgaagatgtgattcgaaaattgatgacccctattgaatgtgccatgactatgatgtcacacattccatctgtaatgaaagcccatggagctcatctgaaagctagtgctgcaatggtccgtttaagactttatgatatcttggctttgttacctccaaaaacttatgaaggatcttttaatgcacttcttagagaactggtagcggaattcactttgactgacaactcagccaacacaactacttccctcctcagatccctctgccattatgatgatagtgttcttcttggttcttggcttcaggaaactgatcataaatcaattgaagaccagctccagccaaacagtgcctctggaagtggggctctggagcatgatccttcctctatttatttacgcatacctgctggagaagcagtacctggtcccctccctctcggagtctcagtcattgatgcttctgtggccctttttggtgtagtgtttcctcatgtttcttataaacaccgattacaaatgttggatcactttgctgaatgtgttaaacaagctaaaggtgtccgccagcaggctgtgcagcttaacatatttactgctgttcttagtgcactaaagggcttagctgaaaacaaaagtactttaggacctgaggaagttcgtaaatctgccctgacactggttatgggtcctctggacaacccaaaccccatcttacgttgtgcagcgggggaagctcttggaagaatggctcaggtggttggagaagcaacttttattgctagaatggcccaatatagctttgacaagttgaaatcggctcgagatgttgtatctaggactggtcattcattggctcttggttgtttgcatcgttatgttggtggaataggctcaggacaacatctgaagaccagtgtcagcattttattggctctagcacaagatgggacatcccctgaagtccagacttggtctcttcattcacttgctttgatagtggattctagtggtccgatgtatcgtggctatgtggaaccaacattatctctagttcttaccttgctgttgacagttccgccttcacatacagaagttcatcagtgtttgggtcgatgcttgggtgctataataactactgttggccctgaactacaagggaatggagcaacaacttctacaattcgttcctcttgtttggtgggttgtgcaataacacaagaccattcagattctcttgttcaggcagctgccatatcttgccttcagcagcttcacatgtttgcaccacgacatgtcaatctatctagccttgttcctagcctttgtgttcacttatgtagttcccatttgttacttcgacgagcagctgtggcatgtcttcggcaacttgcacaaagagaagcagcggaagtatgtgaatatgccatgagcctggcaaaaaatacaggggacaaagagagcagtagtgccaatgtcagtccttttgcccctggggttagttctcgaactgatatccattgccggcaccaaggtgttaatataacagaaactggtcttgagggacttctttttggaatgctagaccgggagacagatcgaaaattatgttctgatattcatgacactttgggacatatgctttcttcgctggcagtagaaaaactttctcattggctaatgctttgtaaagatgtcctggcagcttctagtgatatgagtactgcaactctcttaagtagtggaaaagatgaagaagctgaaaagaaagatgagatggatgatgataccatgtttaccacgttaggtgaagaagataaatcaaagccctttgtggcccctcgctgggccactcgagtatttgctgccgattgcctgtgtcgaatcatcaatttgtgtgagaatgcagaccaggctcactttgatcttgccttggcacgttctgctaaacttcgaaaccctacaaatgacctcttggtacttcatctctctgacctcattcgcatggcattcatggctgcaactgatcatagcaaccagctgcgaatggctgggctccaggcgcttgaagacattatcaagaagtttgcgtctgtgcctgagccagaatttccaggtcatgtgatactggagcagtatcaggctaatgtgggagctgctctaagaccagccttttcacaagatacaccatcagatataatagcgaaagcttgccaggtatgtagtacatggataggaagtggagttgtcagtgatctcaatgatctccgtcgagtacacaatcttcttgtttcttctctggacaaagttcaggctggaaaaggatcttccagccagctgtaccgagagagtgccacgaccatggaaaaactggctgttctcaaagcttgggcagaggtatatgtggtcgctatgaatattaaaaaggaagcagagtcaaaaccaaaaagagcaattaaaaatactgacgatgatgatgacgactgtggtaccatcgatgaactgccaccagatagtttaataacactggtacaacctgaactaccaacactcagtcgcctgtggttagcagcattaaaagattatgcactcttgactttaccagccgaattttctagtcagcttcctccagatggtggagcattttatacccctgaaactattgatacagctagacttcactatcggaattcctgggccccaattctccatgcggtggcactttggttaaatagcacaggatttacgtgctcagagtctacagaagcagcagcaatatctggtttacaaaaacgttctacatctgtcaatttaaaccaggcatcaggagcagtgggtagtgctaaatctttgccagaaattaacaaagacagaatgcatctgattttaggtgtgagtatacagtttctttgttcccctagacctgaggagcccattgaacatgttacagcatgcctgcaggccttacataccttgctagactccccttatgctcgagtccatattgcagaagatcagctgataggtgttgagttgctgagtgttttgcaccgccttctattgacctggaatccatcatctgtccagctgttggttactggagttgtacaacagatagtaagagctgctcaggattatttgcaagagaaaagaaacactctaagatgtatgacaatcctgcccacaattctgttcttaattgcaagaatattgaaagacacagcaataaagtctgcagataatcaggttcctccaccagtcagtgcagctcttcaagggattaaaagtattgtgacactttcaatggccaaaactgaggctggcgttcaaaaacagtggacagctctgattcgtagcacgcttgcttgcatcctggaatattctcaaccagaagactctgtacctacacctgatgaagtaagcatgctaacagcaattgcactcttcctgtggtctgctagtaatgaaataataggagtccagtcattacagaatggctgcatgaacagatttaaaaatgcattaaattcatgcgacccatgggttcaagccaaatgttaccagcttctcctctcagtcttccagcattccaatcgtgccctttcaactccttatattcattcattagctccaatagtggttgaaaagctaaaagctgttgaaagaaacagaccagccagtaacatagagcttttagcggttcaagaaggaataaaagttcttgaaacactggttgctcttggtgaagaacaaaacagagtccagctacttgctcttttagttcccactttgatatcttacctgctggatgaaaattcttttgcctcagcaagttcagcttccaaagatcttcatgagtttgcactccagaatttaatgcatattggacctctgtatccacatgctttcaagacagtaatgggggctgctcctgagttgaaagtgcgtctagaaactgccgttcgagcaagccaagcgagcaaagctaaagcggctgccagacaaccagcccccgccatacattctgcaccaacaattaagctaaaaacaagttttttttaatttgtaatttcatttatttgtatttatgttgtcaactagcccctaattagtgatggccactgtatcattccaggctacctatgggttctgttttatttgtatattggtattatagtgcttccaagtaggttaagtgaaataatgctcacaccacttattgatttttaaggagtgattttttttatcatgtggtgaatatgttttcattttcctcctaataatgtttctcttttgttaacttatttatttttcaaacactgagccatagtcttaaatttaaatgctaaaaacaattgtatcatgtagtcgggcagcctattgatactgtcaggggaaaaaaatgggtcagaactcagcatctgtcatgaaaaaaatcaattgaaaaacaagcagattttaaattttgaagtaatcaaaataatggaaagtgtctgttttgtggtgtatatactatgaataaaatcacagcattttctaagc

SEQ ID NO: 201039 - DNA, 2400 bp, Artificial Sequence
  derived and/or modified sequence
ggtggggcatccgggtctcttggtggctgcttctacccccggagctcagctgatcttcccttccagactacgaggtgtgaatttcaaacttccgtaatggagttagcccacagtttattgctaaatgaagaagctttggctcaaatcaccgaagcaaaaagaccagttttcatctttgaatggttgcgatttcttgataaagtcttggttgctgccaacaagaccgatgtaaaggaaaaacagaaaaaacttgttgaacaattaactggattaataagtagttcacctggaccacctacacgaaaattattagctaaaaatctcgcagccctttatagcattggggatactttcacagtttttcagacacttgataaatgcaatgacattatcagaaataaagatgacactgcggcctacttaccaacaaaattggctgcggtggcttgtgtcggagcattttatgaaaaaatggggagaatgttgggcagcgcatttccagaaacggtaaataatctattgaaatctctgaaaagtgcagagtctcaagggcgaagtgaaatcttaatgagtctacagaaagttctaagtggactgggtggtgcagcagcttcctcccatcgtgatatttacaagaatgccaggtctctcttgactgataggtcaatggctgttcgatgtgcagtggccaagtgtctactagaactacagaatgaagctgtatttatgtggactgctgaactagaaaatatagccactctctgctttaaggctttggaaaactcaaattatggggtacgagtggcagtgtctaaacttttaggaacagtcatggccacagcattaatgccaaaacaggcaacagtaatgcgtcagaatgtgaagcgagcaacatttgatgaagtcttagaactcatggccacaggatttctgcgtggagggtcaggtttcttaaagagcggtggagaaatgttaaaagttggagggtccgttaatcgtgaagtgagagttggagttacgcaggcgtatgttgtttttgtgacaacattgggtggtcagtggttggagcgcagctttgccacgttcctgtcccatgtacttgatctggtttcccatcctcgggcaacacaaacacatgtggaggctgtgtactccagacgatgtgtttcctttatcctaagagctactgtgggcagtttgctaggtgaaaaagcccagattgcagctgccaaagaaatctgccaagctattggaaaacaaatgaaagccgtagaagcagtagtgaatgacacaagtggagaaaacaaatctggcgcagcagacattgcagcaagccagcatgtgatggtctgtgccctccaggaactcgggagcctggtgcagagcttgaatgccaccgcatcccctcttattcaagaagcatctatagggcttttggagattgtgacttcagtgctgcttcatccaagcatggctgcccgacttgctgctgcatggtgtttgcgctgtgtggctgtggcattacctttccagctgacaccatttctagacaggtgtgcagaacggctcaacaacttgaagacctcaccagaagctgtcagtggatatagttttgcaatggctgctttgttaggtggagtacatcagtgtcctttgggcattcctcatgccaaaggaaagatggtagttagtattgctgaagatcttttacgaactgctgcccaaaatagcaggctatctttacagcgcacccaagctggctggcttttacttggagcacttatgactttaggaccatctgtcgttcgttaccatctgcccaagatgttgttattgtggcgaaatgttttcccacgttccttaaaggaattggaagctgagaaggcccgaggcgattcttttacctggcaggtaactttggaaggtcgtgctggagctctatgtgccatgaggagcttcgttgcacattgtcctgagctactaactgaagatgtgattcgaaaattgatgacccctattgaatgtgccatgactatgatgtcacacattccatctgtaatgaaagcccatggagctcatctgaaagctagtgctgcaatggtccgtttaagactttatgatatcttggctttgttacctccaaaaacttatgaaggatcttttaatgcacttcttagagaactggtagcggaattcactttgactgacaactcagccaacacaactacttccctcctcagatccctctgccattatgatgatagtgttcttcttggttcttggcttcaggaaactgatcataaatcaattgaagaccagctccagccaaacagtgcctctggaagtggggctctggagcatgatccttcctctatttatttactgctgttcttagtgcac

SEQ ID NO: 201040 - DNA, 5949 bp, Artificial Sequence
  derived and/or modified sequence
atggagctggcccacagcctgctgctgaacgaggaggccctggcccagatcacagaggcaaaaaggcccgtattcattttcgagtggctgcgttttcttgacaaagtactggttgctgctaacaaaaccgacgtcaaggaaaagcagaaaaagctggtcgaacaactgacgggtctcatctcatctagcccgggcccaccaacccggaagttgctggccaagaatttggctgccctgtactccattggagacaccttcactgttttccagactctggacaaatgcaacgacataatacgaaataaagacgacaccgctgcctacctgcctacgaagctggcagccgtggcctgcgtgggcgccttttacgaaaaaatgggacgaatgcttggctccgccttcccggagaccgttaacaatctgctcaaaagtcttaaatccgcagaaagccagggcagatccgaaatcctgatgtctctgcagaaagtcctgagcggcctcggtggtgctgccgccagcagccatagagatatctacaaaaatgcacgttctttgctgacagataggtcgatggctgtgagatgtgctgttgctaagtgcctgctggaattgcagaatgaggccgtattcatgtggacagctgaactggaaaatattgccaccctgtgcttcaaggcactcgagaacagtaattacggcgtacgggttgctgtctctaaactgcttggcaccgtgatggccacagccctgatgccgaaacaggcaaccgttatgcggcagaatgttaagcgggctacctttgatgaggtattggagttgatggccaccggattcttgaggggaggcagcggctttctgaagtcaggtggcgaaatgcttaaagtcggaggtagcgtgaaccgggaagtccgcgtaggcgtgacgcaggcatacgtcgtctttgtgactacgcttggtggtcagtggcttgagagatccttcgccacctttttatctcacgtgctggacctggtctcccatccccgggccacccaaacccatgtcgaggcagtctactcccgaaggtgtgtttccttcatattgagggctaccgtgggctcgctactaggagagaaggcgcaaattgccgcagcgaaagaaatctgtcaggcgatcggtaagcagatgaaagccgtggaggctgtcgtaaatgacacaagcggcgagaataaatccggggctgccgatatcgccgcctctcaacacgtcatggtttgcgcactgcaggagctgggatcgctggtccagagtctcaacgcgacggcgtccccgctgattcaggaggcttcgattggattactggaaattgtcaccagcgtcctgctgcacccatctatggcagcccgactagctgctgcctggtgtttgcgttgcgtcgccgtggctctgcccttccaattgactccctttctggataggtgcgctgaacgactgaacaacctgaagacctcacctgaagccgtgtcagggtatagctttgccatggcagcgctgttgggcggggttcaccaatgtccactcgggatacctcatgcaaagggaaaaatggtcgtatccattgcagaggacctcctgagaacggctgcccagaattctcgattgagcctgcagaggacacaggccggctggctactcctgggcgcactgatgaccttaggcccatctgtagtacggtatcacctccctaagatgctcctgctgtggcgtaatgtgttccctagaagtctgaaagaactagaagcagagaaggccaggggcgacagcttcacatggcaagtaaccctggaggggagggccggcgctctgtgtgccatgcgctcttttgtggcacactgtccagaattgttgaccgaagatgtgattagaaagcttatgactcccatagagtgcgctatgactatgatgagtcatattccgagtgttatgaaggcgcatggcgcccacctcaaggcctctgccgccatggtgaggttgagactgtacgatatcttggccctacttcccccaaaaacttacgaaggcagcttcaatgccctgttgcgagagttggtcgccgaatttaccctgaccgataattcagcaaacacaacaacttccctgttacgctccctgtgtcactacgatgacagtgtcttactagggtcctggcttcaggagaccgatcacaaatcgattgaggaccagctgcagcccaattccgccagtggcagcggcgccttggagcacgacccaagcagcatctaccttcggatccctgctggtgaggccgtgccagggccactccctttgggagtgtcagtcattgacgcaagtgtggctttattcggcgtggtttttcctcacgtttcatataaacaccgtctgcagatgctcgatcattttgccgagtgcgtcaagcaggctaagggagtgaggcaacaggccgtgcaacttaatatttttacagcagtactgtcagccctcaaaggtctcgcagagaataaatcgaccttagggcctgaggaggtgcgaaaatctgctctgacactcgtgatggggccccttgacaatcctaacccaattctccgctgtgctgcgggagaagcactgggtcgcatggctcaggtggtcggagaggctacgttcatcgccaggatggctcagtacagttttgacaagctgaaatccgctagagacgtcgtgtctcgcaccggtcacagcctggcactggggtgcctacacaggtacgtgggaggtattgggtctggtcagcacctgaaaacttccgtgtctatcctgctagctctcgcccaagatggcacgagccccgaagtgcaaacatggtctctacattctttggctctgattgttgactcctcagggcctatgtacagggggtacgtggagcccaccctgtccttggttctcactttgctgttaaccgttcccccttcgcacacagaggtgcaccaatgtcttggtcgctgccttggagcaattattacgacggtcggccctgagcttcaaggaaacggcgccacaaccagcacaatccggagttcatgtctggtgggatgtgctattactcaggaccatagtgactcactggtccaagccgctgccattagctgcttacagcagctgcatatgtttgccccccgacacgtgaatctgtcctctctagtaccctcgttgtgcgtgcacctttgctcaagccacctgttgttgcgaagagcagccgtagcgtgcctgcgacagttggcgcagcgcgaggctgctgaagtatgcgagtatgctatgtcactggccaaaaacaccggcgataaggagtcaagctccgcaaatgttagtccctttgcccctggagtgtcttccagaaccgacatccactgcaggcaccagggagtaaatatcaccgagaccggtcttgagggcctgctcttcgggatgctcgacagagaaactgacagaaagctctgctcagatattcatgatacgctgggacatatgctgtcgtctttggctgtcgaaaagctttctcattggttgatgttatgtaaggacgttctggccgccagttctgatatgtctaccgctaccctactctcatccggaaaggatgaggaggctgaaaaaaaagacgagatggatgacgacaccatgttcaccaccctaggagaagaagacaagagcaaacctttcgtcgcccccaggtgggcaacgagagtcttcgctgcggattgcttgtgtcgcatcattaacctctgcgagaatgccgaccaggcgcattttgatctcgccttggcacgcagtgctaagctccggaacccaactaatgatcttctcgtcctccacttgagcgatcttattaggatggcttttatggcggcgacagatcattctaaccagctgaggatggctggccttcaggccttggaagacattatcaaaaaattcgccagtgtcccagaacccgagttccccgggcacgttattctggagcagtaccaggccaacgtcggcgctgcccttcgcccggccttctcccaggatacgccttctgacataatcgctaaggcctgtcaggtatgttctacctggatcggcagcggtgttgtaagcgacctgaacgacctccgacgagttcataatctcctggtaagctcattggacaaggttcaggcagggaagggctccagtagtcaattatacagagaatccgcaaccaccatggagaaactggccgtgctgaaggcctgggccgaggtgtatgtcgtggcaatgaacataaagaaagaggctgagtcaaaaccaaagcgtgccattaagaatactgacgacgacgatgacgactgcggcaccatagacgagctacccccggactccctcatcaccctggtacagccggagcttcctactctgtcacgtctgtggttggctgcactgaaggactacgcactcctcactttacctgccgagttctcctctcagctccctcccgacgggggagcgttctatacccccgaaactatcgacacagcacgcttacactacagaaacagctgggcgccaatcctgcacgctgtggcgctgtggttaaactcaacgggtttcacatgttcagagagcaccgaagctgctgctattagcgggttacaaaagcggagtacctcggtgaacctaaaccaggcttctggcgccgtcggctccgcgaaatcactgcccgaaattaataaggaccgcatgcatttgatcctgggggtgtcgatccagtttttgtgcagccctcgaccagaggaaccaatcgagcatgtgactgcttgtctgcaagccctgcatactctgttggattctccgtacgcaagggttcacatcgcggaagaccagctcattggtgttgagctgctcagtgtgcttcatcgcctgttgcttacttggaacccatctagtgtccagctactggtgaccggcgtggtccagcaaatcgtgcgcgctgcgcaggactatctgcaggagaagagaaatactttgcgctgtatgactatattgcctaccatcttattcctgatcgccagaatattgaaagataccgccatcaaaagtgctgacaaccaggtgccaccccctgtatccgccgccctccagggcatcaagtcaatcgtcaccttgtcaatggccaagacagaggccggagtgcagaaacagtggactgctttgatcagatctactctcgcttgcattctggagtattcccagcctgaagacagtgtgcctacccctgacgaggtctcgatgctcacagcgatcgcgctgtttttgtggtcagcaagcaacgagatcataggagttcagtccctgcagaatggatgcatgaatcgctttaagaatgctctcaatagctgcgacccctgggtccaagcaaagtgttatcagctcttgcttagcgtgttccagcactctaatcgcgcgctgagcactccatacattcactccttggcacctatcgtggtcgagaagttgaaagctgtggagcggaaccgaccagcatccaatatcgaactgcttgcggtgcaggaagggataaaggtgttggaaacactcgtggccctgggtgaagaacagaacagggttcagcttctggcactcctagttcccacgctgatatcctacctcctggatgaaaactcattcgccagcgcatcctctgcatccaaagatctccatgagttcgccctccagaatcttatgcacatcggccccctgtacccccacgcctttaaaaccgtgatgggcgccgcacccgagctcaaggtgcgcctcgaaactgccgtgcgagcttcccaggcaagcaaggcaaaggccgccgcgcggcaaccagctccggccattcacagcgccccaactatcaaactgaaaacaagctttttctag

SEQ ID NO: 201041 - DNA, 2307 bp, Artificial Sequence
  derived and/or modified sequence
atggagctggcccacagcctgctgctgaacgaggaggccctggcccagatcacggaagccaagcggcccgtgttcatattcgagtggctccggtttctggacaaggtgctcgtcgcagctaataagactgacgtcaaggagaaacagaagaagctggtggagcagctgaccggactgatttccagcagccctggccctccaactagaaagctgttggcaaaaaacctagcggccctctactcaataggcgacacttttaccgttttccaaacattagataagtgcaatgatatcataagaaacaaagatgatacagctgcgtacctacccacaaagctggcagccgttgcatgtgtgggagcattttacgaaaaaatgggccggatgctcggaagcgctttccctgagactgttaacaacctacttaaatccttaaagtccgccgaatcacagggaagatccgagattctcatgtcactccagaaggtccttagtggtctcggcggcgcagctgcgagtagtcatcgagacatctataagaatgcacggtcacttttgaccgaccgcagcatggccgtcaggtgcgcggtcgcaaaatgcttgttagagctacagaacgaggctgtgttcatgtggaccgctgagctggagaatatcgccacactgtgttttaaggcactcgagaacagcaattacggcgtgcgggttgccgtgtccaagcttctgggcacagttatggcaacagctctcatgccaaagcaggcaactgtgatgaggcaaaacgtaaaacgagctacattcgacgaggtgctcgagctgatggcaacgggattcctcagaggcggctctggcttcttgaaatccgggggagaaatgcttaaggtgggcggatcggtgaatagagaggttagggtcggcgtgactcaagcatatgtcgtctttgtcacgaccctaggtggccagtggctggagcgctccttcgctacattcctgagtcacgtcctcgatctggttagccaccctcgagcaactcaaactcacgtggaagctgtgtacagccggcgatgtgttagctttatcctgcgggctactgtgggttctctcctgggcgaaaaggcacaaatcgccgctgccaaggaaatatgccaggcaatcgggaagcagatgaaagctgttgaagccgtggtgaatgatacaagcggagaaaataaatctggggccgcagacattgcagcctctcaacacgtgatggtctgtgccctccaggagcttggctccttggtccagtctctgaatgctaccgctagccctttaatccaggaggctagcatcggcttgctagagatagtaacttcagtgctcctacacccgagcatggccgctagactggccgccgcttggtgcctgagatgcgtggccgttgcactgcccttccagctcacgccatttctggatcggtgcgctgagcggctgaacaacctgaagacttctcctgaagcagtctccgggtattcattcgctatggccgccttgctgggaggggtgcatcaatgtcccttgggaatccctcacgccaaggggaagatggtggtatcaatcgctgaagacttgctgaggaccgccgcccagaacagtcggctgtccctgcagagaacccaggctgggtggctcctgctgggggcactgatgactctaggcccatcagtcgtgagatatcacctgcctaagatgctccttctatggcggaatgtgttcccgaggtccctgaaggaattggaagccgagaaagcccgcggggattctttcacttggcaggtgaccctggagggacgcgcgggcgcactgtgcgctatgcgcagttttgtggcccactgccctgagctcctgaccgaggacgtgatcaggaagctgatgaccccaatcgagtgcgcaatgactatgatgagtcatatcccaagcgtgatgaaagcccacggggcccacctgaaagcttcagcagccatggtccggcttcgcttgtacgatatcctggctttgctgccacccaagacctacgaggggtctttcaacgccctcttacgggagctcgtggccgagttcaccctgaccgacaactctgccaacaccacaacttctctgcttcgctcactctgccactacgatgacagcgtccttctgggctcttggttgcaggagaccgatcacaaatcaatcgaggatcagttgcaacccaactccgccagcgggtccggagcgctggaacatgatccctccagcatctaccttcttctgttcctggtacattag

SEQ ID NO: 201042 - DNA, 5948 bp, Artificial Sequence
  derived and/or modified sequence
atggagctggcacatagcctcctgctcaacgaagaagccctggcacagataaccgaagccaagagaccagttttcatctttgaatggctgagattcctggacaaagttcttgtcgctgcgaacaagacggatgtcaaggagaagcagaagaaactggtggagcaattgactgggttgattagctccagccctggaccccctactcgcaagctgctagccaaaaacctggccgctctctactctataggcgataccttcactgtctttcagacgctcgacaagtgtaacgacatcatacgaaataaggatgatactgctgcttacctgcctaccaagctggcagccgttgcttgcgtgggggcattctatgaaaagatgggaaggatgctggggagtgctttccctgaaactgttaataacctgttgaaaagcctcaagtcagccgagtcacagggccgttcagagatattaatgtctctccagaaggtgcttagtggcctcggcggtgccgcagctagttctcacagagacatatataaaaatgcccgatcgctgctgactgaccggtctatggcagtccggtgcgctgttgccaagtgtctcctcgagctgcaaaacgaggccgttttcatgtggactgctgagctggagaatattgcaaccctgtgtttcaaggcactagagaactcaaactacggggtgcgcgttgctgtctcaaagctcttggggaccgtcatggccaccgctctgatgcctaagcaagcaacggtgatgaggcagaacgtgaaacgcgctacgttcgatgaggttctggaactcatggccacaggatttctgagggggggtagtgggttcctcaaaagtgggggagagatgctgaaggtgggcggaagcgtaaaccgagaggtgcgagttggtgtaacccaagcctacgtggtctttgtcacgacattggggggtcagtggttggagcgctcttttgccactttcctgtcacatgtgctcgacctagtgtctcacccgagagccacccagacacatgtcgaggcagtgtatagcagacggtgtgtctcctttattttaagagctactgtagggtcactgcttggggagaaagcccagattgctgcagctaaagagatctgccaggccatagggaaacagatgaaagccgtcgaggcggttgttaacgatacttccggcgaaaataagtctggagcagccgacatcgcagcatcacagcacgttatggtgtgcgccctacaggagctcgggagcctggtgcagagcttgaatgcaacagccagcccacttattcaggaggcctcaatcggccttctcgagatagtgacctcggtgctgctgcaccccagcatggctgccagactggcagcggcatggtgtctgcggtgtgtggcggtggcgcttccgtttcagctaacaccctttttagatagatgtgccgagaggctcaacaatttaaagacctcgccagaggcagtctctgggtacagcttcgccatggccgctctactcgggggagtgcatcagtgtcctctcggcattcctcatgctaagggcaaaatggtggtgtccatagccgaagatcttctgaggaccgccgcacagaactctcggctctccttgcagaggacccaggccggttggctgctactgggtgcgctgatgacgcttggcccttccgtggtgaggtatcacctgcccaaaatgctgctgctctggcggaatgtgtttcctcggtctttaaaagagctagaggccgaaaaagccaggggggactcctttacttggcaggtgacactggagggcagagcgggagcactttgcgcaatgcgctccttcgtcgcacactgtccggaattgctgacggaagatgtcatcagaaagctcatgactcccatcgaatgcgccatgaccatgatgtcccacatcccatctgttatgaaggcccatggcgctcacctgaaggcatctgccgctatggtgagactccgactttacgacatcctagccctcttgccccctaagacatacgaaggaagtttcaacgccctcctgagagagcttgttgccgagtttactcttactgataatagcgctaacacgactacctctctcctcagatccttgtgccactacgacgattccgttctcctcgggtcctggttgcaggagaccgatcacaagtctatcgaggatcagctgcagcctaattccgcatcggggtccggagctctggagcacgacccgtcctcgatatacctgagaattcccgcaggtgaggccgtgcctggcccactgcctctcggggtttcagtgattgatgctagcgtcgccctcttcggcgtggtcttcccccatgtttcttacaagcatcgcctgcagatgctagatcatttcgctgaatgtgtcaagcaggccaaaggagttaggcagcaggccgtgcagcttaacatcttcaccgctgtgctgagtgccctcaaggggctggcagaaaacaaaagcaccctagggcctgaagaagtcaggaaaagcgctcttacattagtcatgggcccactagataacccaaatcccattcttagatgcgctgcgggtgaagccctgggccgtatggcgcaagtcgtcggtgaggcaacattcatcgcacgcatggcccagtactccttcgataaactgaaaagtgcgagggatgtggtgagccgaacaggacactctttagcattggggtgcctgcatcgatatgtggggggaatcggttcgggccagcacttaaaaacgtcagtgagcattttactggcactggcccaggacggaaccagcccagaagtccagacatggtccctgcattccctggcgctcatcgtggattccagcggccctatgtaccgaggctacgtggagcctacactgtctttggtgttaaccctgcttttgacagtcccgccttcacacaccgaagtgcaccagtgtcttggacgatgtctaggggcaattattacaacagtgggccctgagcttcagggcaacggagcaacaacttccaccatccggagctcctgtctcgtggggtgtgccattacgcaggaccatagcgattcattagtgcaagccgcagctatcagctgtttgcaacaattgcacatgtttgcacccaggcacgtcaacctgagtagtctggtgcctagtctttgcgtccatctctgctcttctcacctgcttttgcggagagccgctgtcgcctgtctgcgccagctggcgcagcgagaggccgctgaggtatgtgagtatgctatgagccttgcaaagaataccggggacaaggaaagcagctccgccaacgtcagcccttttgctcccggagtcagttccagaacagacatccattgccgacatcagggggttaacatcaccgagacaggactggagggcctgctcttcggcatgctggatcgcgagactgaccggaagctctgtagcgatattcatgacacccttggccacatgctgtccagcctggctgttgaaaaactctctcactggttaatgctgtgtaaggatgtcctggccgcttctagcgacatgagcaccgccactctgctcagcagcggaaaagacgaggaagcggagaagaaggatgagatggacgatgataccatgttcacgaccctgggcgaggaagacaagtcaaagccttttgtagccccacgatgggccacacgcgtgtttgctgctgactgcctctgccgcataatcaacctttgtgaaaacgccgaccaggcacattttgatttggcgctagcccgatcagctaagctaaggaaccctacaaatgacctccttgtccttcaccttagcgacttgatccgtatggcttttatggctgcaaccgatcatagtaaccagttaagaatggcaggcctccaagcactggaggacatcattaagaaatttgcatctgtgcccgaaccagagtttcccggacatgtcattctggaacagtatcaagcaaacgtgggtgccgcactgcggccagcctttagtcaagataccccaagtgatatcatcgccaaggcatgtcaggtatgctccacttggataggctctggggtggtgagcgaccttaacgatctacgcagagttcacaacttactagtgagttctcttgacaaagtccaggccggaaaaggctcctcttcccaactatatagggagtcagccacaacgatggagaaactcgcagtgctgaaagcttgggcggaggtctacgttgtcgctatgaatataaaaaaagaggccgagagcaagccaaagagagctatcaagaacaccgatgatgacgatgacgattgcggaactattgacgaacttccccctgattccttaattactctggtgcaacctgaactgcccactctgagcaggctctggctcgcagcccttaaagattacgcccttctgacactgcccgctgaattctctagccagttacctcccgacggtggggcattctatacccctgagacaatagacactgcgaggttgcactacaggaatagctgggcaccaattctccatgctgtggccttgtggttgaattctacagggttcacctgctccgagagcacagaagccgctgccatcagcggactccagaaaaggagcacttctgtgaacttgaaccaggcctcaggggctgtcggatcggcaaaaagtctgcccgaaattaacaaagatcggatgcacctgattttaggggtctctatacagtttttgtgttctcccagacccgaggagcccatcgagcacgtgacagcttgccttcaggctctccacactctgcttgatagcccgtacgctcgcgtgcatatcgctgaagaccagctcattggggtggagttgctcagtgtgttgcaccgacttttactcacctggaaccctagcagcgtgcaacttttggtgaccggggtggtacaacagatcgtgcgagccgctcaagattatctgcaggagaagaggaatacgctgcggtgcatgaccattcttcctactattttattcctaattgcgagaattcttaaagacaccgcgatcaaaagcgctgacaaccaggtgcctcctcccgtcagtgccgcactgcagggcattaagtccattgtaacactgtcaatggccaaaacagaagccggtgtccagaaacagtggaccgcactgatccggagcaccctggcctgtatactggaatatagccagcccgaggatagtgtaccaacacctgacgaggtctctatgctgactgcgatcgcattgttcctgtggagcgccagcaacgaaattattggcgtgcagagcctgcagaacggatgcatgaaccggttcaaaaatgcactgaacagctgcgatccatgggtccaggccaagtgttatcagttgctgctgagcgtttttcaacactccaaccgggctttgagtactccatatattcattctctcgctcccatcgtggttgaaaagcttaaagcggtggagcgaaatcgtcccgcttcaaacatcgagctattggctgtccaggaggggattaaagtcttggaaacgctggtggccttgggggaagagcagaatagagtacagctcctagctttacttgtgcccaccctaatcagctatctcctcgacgagaatagcttcgcctcggcctctagcgcatcgaaggatttacacgaattcgccctccagaacttgatgcacatagggccactgtatcctcacgcattcaagaccgttatgggggctgcaccagagctgaaggtgcgcctggagacagctgtgagggcttcacaggcttccaaagccaaggccgcagccagacagcccgcaccagctatccacagtgccccaactatcaaactgaaaacaagcttctttta

SEQ ID NO: 201043 - DNA, 2307 bp, Artificial Sequence
  derived and/or modified sequence
atggaattagcccacagtcttctgctgaatgaggaggcacttgcacagatcaccgaggccaagagacctgtcttcattttcgaatggctgcggtttcttgacaaagtactggtggccgcaaataagaccgacgtcaaggagaagcagaagaagctggtggagcagctaactggcctgatcagttcatcgcctgggccacccacacgaaagctgttggcaaaaaatcttgccgctctctatagtataggggacacattcaccgtgtttcagaccctcgacaagtgcaacgacatcataagaaataaggacgataccgctgcgtatctacccacaaaactggcggctgtagcttgtgttggagccttctacgagaagatgggtaggatgctgggcagtgcttttccagaaactgtaaacaaccttctgaaatccctgaagagcgcagagtcccaggggagatcagaaattctcatgtcgctgcagaaagttctcagcggactgggtggtgcagccgcttctagccaccgagacatctacaaaaacgcaaggagtctactcaccgaccggtccatggccgtgcgctgcgccgtggccaagtgtctactggaacttcagaatgaggcagtgttcatgtggacagccgaactggaaaatattgcgactctttgctttaaagccttagaaaattctaattacggagtcagagttgctgtcagcaagttactcgggaccgtcatggccactgcactcatgccaaagcaggccacagttatgcggcagaacgttaaaagggcaacttttgacgaggtcctagaactcatggctacaggattcctgcggggtgggtcggggtttttgaaatctggtggagagatgctgaaggttggtggcagcgtaaacagagaagtcagagtcggtgtcacccaggcgtacgtggtgttcgtcactaccctggggggacagtggctggaacggtcttttgccacatttctgtctcatgttttggacctagtttcacatcctagagctacgcagacgcatgtggaggccgtctactcgcgcagatgcgtgtcttttatattgagggcaacggtagggtcactactcggtgaaaaggcgcagatcgcagcagctaaagagatttgccaggcaatcgggaagcaaatgaaagctgtggaggcggtggtgaacgacacctccggagaaaacaaatccggagccgctgacatcgcagcctcacaacacgtgatggtctgcgcattacaggagcttgggagtttagtgcaatcactgaacgcgacagcttcacccctgatacaggaggcctcgatcgggttgctggagatagtgacctcagtgctcttacacccctccatggccgcacgcctggccgcagcttggtgcctgcgctgtgtcgcagtagcactgcccttccagttgactccatttctcgaccgctgtgccgagaggctgaataatctcaagaccagccccgaagctgtgtcaggatactcgtttgccatggccgcactgctggggggtgtccaccagtgcccactcggaatcccacatgccaaaggcaaaatggttgtctcaatcgccgaggacctgctgaggactgccgctcagaattcaagactgagcctgcagaggacacaggccggatggctgctgctcggcgcactcatgacattgggcccttccgtcgtccgctatcacctcccaaaaatgctgctgctgtggcgtaatgtgttcccacggagcctgaaggagctggaagccgagaaggctagaggggatagtttcacgtggcaggttaccctcgagggaagagctggcgcactgtgcgctatgaggagtttcgtggctcactgccctgagttgctcactgaagacgtcattcggaagctaatgacacctattgagtgcgccatgaccatgatgtcacacataccgtccgtaatgaaagctcacggagctcatctgaaggcctccgccgcaatggttaggctccgcctgtatgacatcctggctctcctgccccctaaaacttacgaggggtccttcaatgctttactgcgggagctggtggccgagttcaccctgactgataactcagcaaatacaacaacaagcctgctgcggagcctgtgccactacgacgattctgtcctgctggggagttggttacaggaaactgaccataaatccatcgaggaccagctacagccgaacagcgcttctggctccggtgcactggaacacgatccatcctccatttacttacttctctttttggtacattag

SEQ ID NO: 201044 - DNA, 6216 bp, Artificial Sequence
  derived and/or modified sequence
atggaactggctcatagtctattactgaacgaagaggccctcgctcaaatcacagaggctaaaagacccgtgttcatatttgagtggctgcggtttttagacaaggtgcttgttgctgccaataagacagacgtcaaagaaaaacagaagaagctggtggagcagttaacagggctgatctccagttcccctgggccccctacgcggaagttgcttgctaaaaatttggccgccctgtatagcataggggatacgtttacagtgttccaaaccctagataaatgcaatgacataatacgcaacaaagacgacaccgcagcttacttgcccacgaagctcgcagctgtggcctgtgtgggtgcattttacgaaaaaatgggaagaatgctgggcagtgccttccctgaaaccgtaaataatctactgaagagcttgaagtctgctgaaagccagggaagatccgagattcttatgtcccttcagaaggtgttatccggacttggcggcgccgcagccagtagccatcgtgacatttacaagaatgctcgctcactgctaacagaccggagcatggctgtgcgatgcgcggtcgccaagtgcctgttagaattgcagaacgaggccgtgttcatgtggacggccgagctggaaaatattgccactctgtgctttaaggctttagaaaactctaactatggcgtgcgcgtggcagtcagcaagctgctggggacggtcatggccacagctcttatgccaaagcaggctaccgtgatgaggcagaatgttaagcgtgcaaccttcgacgaagttctcgaactgatggccaccggatttttacgtggcgggagtggctttctgaagagcggaggtgagatgctgaaagtggggggcagtgttaacagggaggtgcgagtgggggtgacccaagcgtatgtggtgttcgtcacgactctcggcgggcagtggttagagaggagcttcgcaaccttcctatctcacgtgctagacttggtgtcccatccacgggccactcagacacatgtggaggcagtgtacagtaggagatgcgtcagttttattctgcgggcaaccgtcggctccctcctgggggagaaagctcagattgcagccgccaaagagatctgccaagccattggtaaacagatgaaggcagtcgaagctgtagtgaacgacacttcaggagagaataaatctggcgccgcagatattgctgctagccagcacgtcatggtgtgtgcactgcaggaactgggctcactggtccagtccctgaacgctacagcctcaccgctcatccaggaggcaagcatagggctgctggagatcgtcacttctgtgcttcttcaccctagcatggccgcaaggttggccgccgcatggtgtctccggtgtgttgcggtggcactgccctttcaactgaccccctttcttgacaggtgtgctgagaggctgaacaacctgaagacctcccctgaggcggtttctggatattccttcgcgatggccgccctgttgggaggcgtgcaccagtgccccctgggaatacctcacgccaagggtaaaatggtcgtaagcattgcggaagacctgttgaggacagctgcccagaacagtcgcctctccctccagcgaacccaggcaggttggctgctgctcggcgccttaatgacgctggggccaagcgttgtccgataccatctgcctaaaatgctccttctgtggcgtaatgtgtttccccgctcattgaaggagctcgaggccgagaaagcacggggggatagctttacctggcaagtcacactggaggggcgcgcaggagccctttgcgcaatgcgctcgttcgttgctcactgccctgagctgctgaccgaggacgtcattaggaagcttatgactcctatcgaatgcgccatgactatgatgtcacatattccgtcagtaatgaaggcccacggagcacaccttaaggcatctgcagcaatggttcggctgcgactgtatgatatcttggccctgctcccccccaagacctacgaaggttcttttaacgcactgttgcgcgaacttgtggccgagttcacccttacagataacagcgctaacactacgacaagtctgctgcgatctttatgccactacgatgactccgtcctccttgggtcttggcttcaggaaacagaccataagtcgatcgaggatcaactgcagccgaactcggccagcggatccggggcactggaacacgacccatcctccatctaccttcgcatcccagctggtgaggccgtgcctgggcctctccccctgggggtgtcggtgatcgacgcatcggtcgcgctcttcggcgtggtgttccctcacgtatcctataaacatcgactgcagatgttggatcacttcgccgaatgcgtgaagcaggctaagggggtgagacagcaggctgtccagctgaacattttcaccgctgtcttgtccgccttaaagggccttgccgagaataaatcaacactcgggcctgaggaagtgcgaaagtctgctctgacgctcgtgatgggtcccctcgacaaccccaatcctattttacgatgcgctgccggggaggccttgggacggatggcccaagtcgtgggcgaagccacttttatcgcccgaatggcacagtactccttcgacaagctgaagagtgcgagggacgttgtgagcagaaccggtcacagcttggccctgggttgcctccaccgttatgttggtggtatcgggagtggccaacacctcaaaacctccgttagcattctgctggcgctcgcccaggacggaacttctcctgaagtgcaaacttggagcctgcacagcttggcgttgattgtggacagttccggaccaatgtataggggttatgtggagccgaccctcagccttgttctgaccttgttactgaccgttcctccctcacacactgaggtgcatcagtgcctagggcggtgtttgggggcaatcatcactactgttggaccggaactgcaggggaatggagctacaactagcactattcggagcagttgccttgtaggctgcgcgattactcaagatcatagcgacagcttagtgcaggctgctgcaatttcctgtctgcagcagctccacatgttcgcaccccggcatgttaatctgtctagcttggtgccttccctctgcgtgcatctctgttcatcccacctgctgctgaggcgcgccgccgtcgcttgtctgcggcagcttgcccagcgcgaagccgccgaggtgtgcgaatatgcgatgagcttagccaagaataccggcgacaaagaatcatcatccgccaatgtctctccgtttgcgcccggagttagctcgagaaccgatattcactgtcggcaccaaggcgtcaacataactgagaccggtctcgaaggccttctgttcggcatgttagatagggaaacagatcggaagttgtgttccgacatccatgacacgctgggacacatgctgtcctcactcgcagtggaaaagctcagccattggttgatgctgtgtaaggacgtcctggccgcgagctccgatatgagcaccgctacgctgctgtctagtggcaaggatgaagaggcggaaaagaaagacgagatggacgatgacactatgttcactactctgggagaggaagacaaatcaaaaccgttcgtagccccccgatgggccaccagagttttcgctgctgactgcctgtgcaggataatcaacctgtgtgaaaacgccgaccaggcccacttcgaccttgcactggccagatcagccaagctgcggaaccctacgaatgacctcttggtgcttcacctgtcagatctgatcagaatggcctttatggccgcaaccgatcattcaaatcagctgagaatggccggtctgcaagctctcgaggacatcataaagaagttcgcttcagtccccgagccagaatttcctgggcacgtgattttggaacaatatcaggcaaacgtcggtgctgctctacgacccgccttcagtcaggacaccccctcagacattatagcgaaagcatgccaggtttgttctacctggattggaagtggtgtggtgtcagaccttaacgatttgcgtagagtacacaacctactcgtgtcaagcctggacaaggtccaggcgggcaagggcagtagtagccaactgtatagggagtccgctaccaccatggaaaagttagcggtgctgaaggcctgggccgaagtgtatgtggtagctatgaacattaagaaagaggcagagagcaaaccaaaacgcgccattaaaaatacagatgacgacgacgacgattgtggaactatcgatgaactcccgccggacagtttgatcacactcgtgcagcctgagctgcccacactgtctagactttggctcgcagccctgaaagactatgccctccttacgctgccggcggagttcagctcccaactgccccctgacggcggcgcgttttatacgcccgagaccatcgacaccgctcggctgcattaccgtaatagctgggcaccaatcctgcacgctgtggctctctggttgaactcaaccggcttcacgtgcagcgagagcaccgaggcggctgccatatccggactccaaaagcgcagtaccagtgtgaacctcaaccaggcctctggggctgtcggatctgctaaatcactcccggagataaataaggaccgaatgcacctcatcttgggagtaagtattcaatttctgtgtagccctcggcctgaggagccaattgagcacgtaacagcttgtctacaggctctccacaccctcctcgatagcccctatgctcgagtacacatcgctgaggatcagctgatcggcgtggaactactttcagtacttcataggcttcttctgacatggaaccctagctctgtgcagttgttagtgaccggggtagtgcagcagatcgtacgggcggcgcaagattatctacaggagaaacgcaatacactgaacgaggacgatatggaaaaggaggcatgtaccgtgctaggcgagggaggtgacagcggtggcctcattcccggaaagagcctggttttcgcaacaatggaactgttgatgttcatactagtaagacacatgcctcacctttctacaaaagtaagcgattcaccatctcatatcgcgactaagacaaggctgtccgaagaaagcgcaagactcgttgccgccaccgtgaccatcttgagcgacttgccttcactgtgtagtcctgcaggctgtatgacaatacttcctacaattctgtttttgatcgcacgcattttgaaggatacggccatcaaatcagccgacaatcaggtcccaccaccagtgtctgcagccctgcaggggatcaagtccattgttacactcagcatggccaagaccgaagccggagtacagaagcagtggaccgcactaataaggtccacgctggcgtgtatcctcgagtacagtcagcccgaagacagcgtgccgacgccagatgaagtctcaatgcttaccgcaattgctctgtttctgtggtccgccagcaacgagattatcggagtgcagtctcttcagaatggctgtatgaatcgctttaaaaacgcactcaattcttgcgatccttgggtgcaggcgaaatgttaccaacttctgctcagtgtgtttcagcatagtaatcgggcactctcaaccccatatatccacagccttgccccaatcgtggttgagaaattgaaggctgttgagagaaataggcctgcctcaaacatcgagctgctggctgtgcaggagggcattaaagtgctggagactttggtcgccctgggagaggagcagaacagggtccagctcctcgccctgctggtccctaccttaatttcctacctgttggatgaaaactcctttgcgtctgcgtcgagcgcatccaaggatcttcatgaatttgccctgcaaaatctgatgcatatagggcccttgtatcctcacgccttcaagactgtaatgggagccgctcctgagctgaaggtgcgactggagactgcagttcgagcatcacaggccagtaaggctaaggctgctgcacgccaaccggccccggctatacattcggcccctactatcaagctgaaaacgagtttcttttag

SEQ ID NO: 201045 - DNA, 6216 bp, Artificial Sequence
  derived and/or modified sequence
atggagctggcccacagcctgctgctgaatgaggaggccctggcccagatcacagaggccaagaggcctgtgttcatctttgagtggctgcgcttcctggacaaggtgctggtggccgccaacaagacagatgtgaaggagaagcagaagaagctggtggagcagctgaccggcctcatcagcagcagccctggcccccccaccaggaagctgctggccaagaacctggccgccctgtacagcatcggggacaccttcaccgtcttccagaccctggacaagtgcaatgacatcatccggaacaaggatgacacagctgcctacctgcccaccaagctggccgctgtggcctgtgtgggcgccttctatgagaagatgggccgcatgctgggcagcgccttccctgagaccgtgaacaacctgctgaagagcctgaagtctgctgagagccagggccgctctgagatcctgatgagcctgcagaaggtgctgagcggcctgggcggcgctgctgccagcagccaccgggacatctacaagaatgcccggagcctgctgacagaccgctccatggctgtgcgctgtgctgtggccaagtgcctgctggagctgcagaatgaggccgtgttcatgtggacagctgagctggagaacatcgccaccctgtgcttcaaggccctggagaacagcaactacggcgtgcgggtggccgtgtccaagctgctgggcaccgtgatggccacagccctgatgcccaagcaggccaccgtgatgaggcagaatgtgaagagggccacctttgatgaggtgctggagctgatggccaccggcttcctgcggggcggcagcggcttcctgaagagcggcggggagatgctgaaggtgggcggctctgtgaaccgggaggtgcgggtgggcgtgacccaggcctacgtggtgtttgtgaccaccctgggcggccagtggctggagaggagctttgccaccttcctgagccacgtgctggacctggtgagccacccccgggccacccagacccacgtggaggccgtgtacagccgccgctgtgtgtccttcatcctgcgggccaccgtgggcagcctgctgggggagaaggcccagattgctgctgccaaggagatctgccaggccatcggcaagcagatgaaggctgtggaggccgtggtgaatgacaccagcggggagaacaagtctggagctgctgacattgctgccagccagcacgtgatggtgtgtgccctgcaggagctgggcagcctggtgcagagcctgaatgccacagccagccccctcatccaggaggccagcatcggcctgctggagatcgtgacctctgtgctgctgcaccccagcatggccgcccggctggccgccgcctggtgcctgcgctgtgtggccgtggccctgcccttccagctgacccccttcctggacagatgtgccgagcggctgaacaacctgaagaccagccctgaggccgtgtctggctacagctttgccatggccgccctgctgggcggcgtgcaccagtgccccctgggcatcccccacgccaagggcaagatggtggtgtccattgctgaggacctgctgaggacagctgcccagaacagccggctgagcctgcagaggacccaggccggctggctgctgctgggcgccctgatgaccctgggccccagcgtggtgcgctaccacctgcccaagatgctgctgctgtggagaaatgtgttccccaggagcctgaaggagctggaggccgagaaggcccggggggacagcttcacctggcaggtgaccctggagggccgggccggggccctgtgtgccatgaggagctttgtggcccactgcccagagctgctgacagaagatgtgatcaggaagctgatgacccccattgaatgtgccatgaccatgatgagccacatccccagcgtgatgaaggcccacggggcccacctgaaggccagcgctgccatggtgcggctgcggctgtatgacatcctggccctgctgccccccaagacctatgagggcagcttcaatgccctgctgcgggagctggtggccgagttcaccctgacagacaacagcgccaacaccaccaccagcctgctgcggagcctgtgccactatgatgattctgtgctgctgggctcctggctgcaggagacagaccacaagagcattgaggaccagctgcagcccaacagcgccagcggcagcggggccctggagcatgaccccagcagcatctacctgcgcatcccagctggggaggccgtgcccggccccctgcccctgggcgtgtctgtgattgatgcctctgtggccctgtttggagtggtgttcccccacgtgtcctacaagcaccggctgcagatgctggaccactttgctgaatgtgtgaagcaggccaagggcgtgcggcagcaggccgtgcagctgaacatcttcaccgctgtgctgagcgccctgaagggcctggccgagaacaagagcaccctgggccctgaggaggtgaggaagagcgccctgaccctggtgatgggccccctggacaaccccaaccccatcctgcgctgtgccgccggggaggccctgggccgcatggcccaggtggtgggggaggccaccttcatcgccaggatggcccagtacagctttgacaagctgaagagcgccagagatgtggtgtccaggacaggccacagcctggccctgggctgcctgcaccgctacgtgggcggcatcggcagcggccagcacctgaagacctctgtgtccatcctgctggccctggcccaggacggcaccagccctgaggtgcagacctggagcctgcacagcctggccctgattgtggacagcagcggccccatgtaccggggctacgtggagcccaccctgagcctggtgctgaccctgctgctgactgtgccccccagccacacagaggtgcaccagtgcctgggccgctgcctgggcgccatcatcaccaccgtgggccctgagctgcagggcaatggagccaccaccagcaccatccgcagcagctgcctggtgggctgtgccatcacccaggaccacagcgacagcctggtgcaggccgccgccatcagctgcctgcagcagctgcacatgtttgcccccaggcatgtgaacctgagcagcctggtgcccagcctgtgtgtgcacctgtgcagcagccacctgctgctgcggcgggctgctgtggcctgcctgcggcagctggcccagcgggaggccgctgaggtgtgtgaatatgccatgagcctggccaagaacacaggagacaaggagagcagcagcgccaacgtgagcccctttgcccctggggtgagcagcaggacagacatccactgccgccaccagggcgtgaacatcacagaaacaggcctggagggcctgctgtttggcatgctggaccgggagacagacaggaagctgtgcagcgacatccatgacaccctgggccacatgctgagcagcctggccgtggagaagctgagccactggctgatgctgtgcaaggatgtgctggccgccagcagtgacatgagcacagccaccctgctgagcagcggcaaggatgaggaggccgagaagaaggatgagatggatgatgacaccatgttcaccaccctgggggaggaggacaagagcaagccctttgtggccccccgctgggccaccagggtgtttgctgctgactgcctgtgccgcatcatcaacctgtgtgaaaatgctgaccaggcccactttgacctggccctggcccggagcgccaagctgaggaaccccaccaatgacctgctggtgctgcacctgagtgacctgatccgcatggccttcatggccgccacagaccacagcaaccagctgaggatggccggcctgcaggccctggaggacatcatcaagaagtttgcctctgtgcctgagcctgagttccctggccacgtgatcctggagcagtaccaggccaacgtgggcgccgccctgcggcctgccttcagccaggacacccccagcgacatcatcgccaaggcctgccaggtgtgcagcacctggattggcagcggcgtggtgtctgacctgaatgacctgcggcgggtgcacaacctgctggtgagcagcctggacaaggtgcaggccggcaagggcagcagcagccagctgtaccgggagagcgccaccaccatggagaagctggccgtgctgaaggcctgggccgaggtgtatgtggtggccatgaacatcaagaaggaggccgagagcaagcccaagagggccatcaagaacacagatgatgatgatgatgactgtggcaccattgatgagctgcccccagacagcctcatcaccctggtgcagcctgagctgcccaccctgagccggctgtggctggccgccctgaaggactatgccctgctgaccctgcctgctgagttcagcagccagctgcccccagatggaggagccttctacaccccagagaccatcgacacagcccggctgcactacagaaattcctgggcccccatcctgcatgctgtggccctgtggctgaacagcacaggcttcacctgcagcgagagcacagaggccgccgccatcagcggcctgcagaagaggagcacctctgtgaacctgaaccaggccagcggggctgtgggcagcgccaagagcctgcctgagatcaacaaggacaggatgcacctgatcctgggcgtgtccatccagttcctgtgcagccccaggcctgaggagcccatcgagcacgtgacagcctgcctgcaggccctgcacaccctgctggacagcccctatgcccgggtgcacatcgccgaggaccagctgattggagtggagctgctgtctgtgctgcaccggctgctgctgacctggaaccccagctctgtgcagctgctggtgactggagtggtgcagcagatcgtgcgggccgcccaggactacctgcaggagaagaggaacaccctgaatgaagatgacatggagaaggaggcctgcaccgtgctgggggagggcggggacagcggcggcctcatccctgggaagagcctggtgtttgccaccatggagctgctgatgttcatcctggtgcgccacatgccccacctgagcaccaaggtgtctgacagccccagccacatcgccaccaagacccggctgtctgaggagagcgcccggctggtggccgccaccgtgaccatcctgagtgacctgcccagcctgtgcagccctgctggctgcatgaccatcctgcccaccatcctcttcctgattgcccgcatcctgaaggacacagccatcaagtctgctgacaaccaggtgcccccacctgtgtctgctgccctgcagggcatcaagagcatcgtgaccctgtccatggccaagacagaagctggggtgcagaagcagtggacagccctgatccgcagcaccctggcctgcatcctggagtacagccagccagaagattctgtgcccaccccagatgaggtgtccatgctgacagccatcgccctcttcctgtggagcgccagcaatgagatcatcggcgtgcagagcctgcagaatggctgcatgaaccgcttcaagaatgccctgaacagctgtgacccctgggtgcaggccaagtgctaccagctgctgctgagcgtcttccagcacagcaacagagccctgagcaccccctacatccacagcctggcccccatcgtggtggagaagctgaaggctgtggagaggaacagacctgccagcaacatcgagctgctggccgtgcaggagggcatcaaggtgctggagaccctggtggccctgggggaggagcagaacagagtgcagctgctggccctgctggtgcccaccctcatctcctacctgctggatgaaaattcctttgccagcgccagcagcgccagcaaggacctgcatgaatttgccctgcagaacctgatgcacatcggccccctgtacccccacgccttcaagacagtgatgggcgccgcccctgagctgaaggtgcggctggagacagctgtgcgggccagccaggccagcaaggccaaggccgccgcccggcagcctgccccagccatccacagcgcccccaccatcaagctgaagaccagcttcttctag

SEQ ID NO: 201046 - DNA, 6216 bp, Artificial Sequence
  derived and/or modified sequence
atggagctggcccacagcctgctgctgaacgaggaggccctggcccagattacagaggcgaagagaccggtgttcattttcgagtggcttcgcttcctggacaaagtgctggtggccgccaacaaaacagatgtaaaggagaaacagaagaagttggtggagcaactgacaggactgatttcatcctctcctggcccaccaacgaggaagttgctggcaaagaacctggcagccctgtacagtataggggacacctttacagtcttccagacactcgataaatgcaacgatataataagaaacaaggatgatactgccgcatacctacctaccaagctggctgcggtcgcatgcgtgggagccttttacgagaaaatgggtagaatgctgggttccgccttccctgaaactgtaaacaaccttttaaaatcccttaagagcgcggaatctcaggggcgctccgaaatactaatgtctctgcaaaaagtgctgtccggcttaggaggcgcagccgcatcttcacatcgcgacatctacaagaacgccaggagcctccttaccgacaggtctatggccgtgcgctgcgccgtcgcaaagtgcctgctggagctgcagaacgaagcagttttcatgtggacagctgaactggaaaacattgcaacactgtgcttcaaagcgctcgaaaacagtaactacggagtgagggttgccgtgtcaaaactgcttggcacagtcatggctactgctttgatgccaaagcaggccactgtcatgcgacagaacgttaagagggccacatttgacgaggtgctggagttaatggctaccggtttccttagggggggctctggattcctgaaatctgggggggagatgctgaaggtcggcgggagcgtgaatagggaggttagagtgggcgtgacgcaagcctatgtcgtgtttgtgacaacccttggtggacaatggctggagcggagcttcgcaaccttcctctcccatgtcctggacctcgtgagtcacccacgggcaactcagacccacgttgaggccgtttattcacgccggtgcgtctccttcatattgagggctactgttggctccctactgggtgagaaggcgcaaattgctgctgctaaggagatctgtcaggccattggcaagcagatgaaagccgtagaggccgtagtcaacgatacatccggcgaaaacaagtccggcgccgcggatatcgccgcttcccagcatgttatggtgtgcgcccttcaggaactgggctccttggtacagtcacttaacgctaccgcgtcccctcttatacaggaggccagcattggcttacttgaaatagtcacttcagtgctgctgcatccgtctatggctgcgaggttggctgccgcttggtgcttgcggtgcgtggccgtggctttgccatttcagttgacccccttcttggaccgctgtgccgaacgtttgaacaacctcaaaacaagccccgaggccgttagcggatactctttcgctatggccgccctcctagggggggtccatcaatgtccgctaggaattccgcacgcgaagggcaaaatggtggtgagtatcgcggaggacttgttgcgcacagccgcccagaattcacggctgtccttgcagcgaacccaggccggatggctgctgctgggtgccttgatgacactaggacccagtgtggtcaggtatcacttgcctaaaatgcttctcctgtggcgcaacgtgttcccccgctccctcaaagagctggaggcagaaaaagcccgtggtgacagcttcacgtggcaggtgactctcgaggggcgagccggggctctgtgcgccatgaggagctttgtggctcactgtccagagctgcttacggaggacgtgattcggaagttaatgacacccatagagtgtgccatgaccatgatgagccacatcccttcagtgatgaaggctcacggcgcccaccttaaggcaagtgcggcaatggttagactgagactgtacgacatcctggcccttctgccccccaagacctatgaaggctcattcaacgctctgttgcgagaactcgtagcggagtttacgcttaccgacaattcagccaatactacaaccagccttcttaggtctctttgccactacgacgacagtgtgctgttgggcagctggctgcaggagacagaccacaagagtattgaagaccaactgcagcctaacagtgcttcgggttccggagccctcgaacacgatcccagtagcatctaccttcggataccagccggggaagcggtgcctggtccgctccccttgggagttagtgttattgacgccagcgtcgccctttttggagtggtattccctcacgtctcttataagcatagactgcaaatgctggatcacttcgccgaatgtgtcaagcaggccaagggcgtgcgccagcaagccgtgcagctgaacatcttcaccgccgttctgtcagccctcaagggcttggctgagaacaagagcaccctgggcccggaggaagttagaaaatctgccctgactttggtcatgggtcccctggataatcctaatccaattttacggtgcgccgccggcgaggccctggggagaatggcacaggtggtcggggaagctacatttatagcccgcatggcccagtactcctttgataagttaaagagcgcgcgagatgtggtgagccgcaccggacattccttagccctgggttgcttacacagatacgtaggaggcattggcagtggacaacacttgaagacttctgtctcaatcctgttagcactggcccaagacggcacgagtcccgaggtgcagacctggtccttgcactctttggcactaatagtggatagtagcggcccaatgtaccgcgggtatgtggaacccacgctgagcttagtgctcactcttctcctgaccgtgcctcccagtcataccgaggtgcaccagtgtttgggccgatgcctgggagccattattacaaccgtgggcccggaattgcaaggaaatggggcaaccaccagcacaatcagatcatcttgtcttgtgggctgcgccataacccaggaccattccgactcactggtgcaagcagctgctatcagctgtctgcagcagctgcatatgttcgcccctaggcacgtgaaccttagctctctcgttccttctctgtgcgttcacctgtgcagctcgcacctactcctgcgcagagcggcggttgcctgcctgagacagctagcccaaagggaagcggccgaggtctgtgaatacgctatgagcctagctaagaacaccggagataaagagtcgtcttcagccaacgtcagcccgtttgcacctggagtctcctccaggactgacatccattgtaggcatcagggggttaatatcactgaaacgggcctggaagggttgctctttggtatgctggatcgtgaaaccgaccggaaactctgttcagacatccatgacacgctgggacatatgctctccagtctggctgtggagaagctgagccactggctgatgctttgtaaagatgtgcttgccgcttcaagcgacatgtctactgctacgctgttgtctagcggcaaggacgaagaggcagagaaaaaggacgaaatggacgatgacacgatgttcacaactctcggagaggaggataaatcaaagccttttgtggctcccaggtgggctacgcgcgtatttgcggccgattgcttgtgtaggatcatcaacttgtgtgagaatgccgatcaggctcactttgacctggcacttgcgagaagtgcaaaactgcgtaacccgaccaacgatctgctcgttctgcatctatctgatttaattaggatggcctttatggctgctaccgaccactctaatcagctgcgtatggctggtctccaggctctggaagatatcataaagaaattcgcctccgtgcctgagccagagttcccaggtcacgtcatcctcgagcagtaccaggcaaacgttggagcagcattgagacctgcatttagtcaagacacccccagcgatataatcgctaaagcctgccaggtctgtagcacttggattggtagtggggtcgtgtctgatctaaatgacctgaggcgcgtacacaacctgctggtatcatctctggataaagttcaggcgggtaagggatcctcctcccagctttatcgcgaaagtgccacaaccatggaaaaattggctgttctgaaggcctgggccgaggtatacgtggtggcaatgaacattaaaaaggaagctgaatcaaagccaaaacgtgctatcaagaacactgatgatgatgatgatgactgtggcactattgacgagcttccacccgacagtctgattaccttggtgcagcctgagctgccaacccttagtcgtctgtggcttgcagcactgaaggactacgcactccttacactgccagcagagttctcttcccagttgcctcctgatgggggtgctttctataccccggaaacgatagacactgcaaggttacactatcggaactcctgggcccccatactccatgcagtagccctctggcttaattctacggggttcacatgctccgagtcaaccgaggccgcagccatctctgggcttcagaagagaagcacaagcgtgaacttgaaccaggccagcggagccgtgggaagcgcaaagtctctccccgaaatcaacaaggacaggatgcatctcatcctcggtgtttcaattcagtttctatgcagcccgcggccggaagaacccattgagcacgtcaccgcgtgtctccaggccctacacacgctgctggattccccctacgcccgcgtacacattgctgaggaccagctcattggagtcgagcttttgtcagttctacatagacttttactgacctggaacccttcttccgtgcagctcttggtgactggagttgtgcagcagattgtacgtgccgcacaggattatctacaggaaaagagaaacactctgaatgaggatgatatggagaaagaggcatgcaccgtcctcggtgagggcggggacagtggaggcctcatccccggcaagtcccttgtattcgccaccatggagctgctgatgttcattctggtgcgacacatgccacacctctctactaaggtctctgattctccgagccacatcgcaaccaagacccgtctcagtgaggagtctgcccggttagttgccgctacagtcactatcttgtctgatttgccctccttgtgcagcccggctggatgtatgacaattttgccgaccatcctcttcttgattgcacggatactgaaggacactgccataaagtcagcggacaaccaggtcccaccacctgtgagtgcagcactgcaggggataaaaagtattgtcacattatccatggccaagactgaagcgggtgttcaaaaacagtggacagcccttatcaggagcacccttgcatgcatactggagtacagtcagcccgaggattccgttcccacccccgatgaggtcagcatgctgacagccatcgccctcttcttgtggtcagccagcaacgaaatcatcggtgttcaatccttacaaaacggttgcatgaatcgtttcaaaaatgccttaaatagctgtgatccatgggtgcaagccaaatgctaccagctccttttgtccgtgtttcagcacagtaacagggccctgtctaccccatatatacacagcctcgctccgatcgttgttgagaagctgaaggctgtggaaaggaaccggccagcttctaatattgaactgttagccgttcaagaggggatcaaggtgctcgaaaccctagtggctttaggtgaggagcagaatagggttcagttgcttgcactgctggtgcctacgttgatctcctacctgctcgacgaaaacagtttcgcatccgcttcaagcgcctccaaggacctgcacgaatttgccctccagaacctgatgcacatcgggcctctgtacccccacgcgttcaaaaccgtgatgggtgcggcacctgaactgaaagttcgcctggagaccgctgtccgtgccagccaggcaagcaaggctaaggctgccgctcgccagccagccccagcaatccatagcgctcccacaatcaaactcaaaacaagtttcttctag

SEQ ID NO: 201047 - DNA, 6216 bp, Artificial Sequence
  derived and/or modified sequence
atggagttagcacactccctgttgctaaatgaggaggccctggctcagattaccgaagccaaaagacctgtgtttatcttcgaatggttacggtttctcgataaagttttagtcgctgctaataaaacagatgttaaagagaaacagaagaagctggttgagcaactgaccggcctgatctcgagtagtccagggcctccaactaggaagctgctggcaaagaacctcgcggcactctatagtattggtgatacatttaccgtgttccagaccctcgacaaatgcaacgatattatcagaaacaaagacgacaccgcagcctacctccccactaagctggctgccgtagcttgtgtaggtgctttctatgagaagatgggaaggatgctcggcagcgcatttcccgaaacagttaacaacctactcaagagcttaaaatcagcagaatcacaaggccgaagtgaaatacttatgtcattgcaaaaggtgttaagtggtctgggcggtgcagccgctagctcccacagagacatctacaagaatgcacgctctctgctgactgaccgcagcatggcagtaagatgcgccgtggcaaagtgtctgttggagttacaaaatgaagctgtgtttatgtggaccgctgagcttgagaacatcgcaaccctctgcttcaaagccctcgagaatagcaactacggggtgagagtcgccgtttctaaactgttaggtaccgttatggccaccgccttgatgccaaagcaggctaccgtcatgcgccagaacgttaagcgggcaacttttgacgaggtgctggagctgatggccaccggcttcctgcggggagggtccggcttcctgaagagcggcggagaaatgctcaaagtggggggatcagtgaatagggaagtacgtgtcggggtcacccaggcatatgtggtcttcgtaactacactggggggacagtggcttgagcgctcattcgctacattcttaagccatgtgctggacctagtttcccacccgagggccacccagactcatgttgaggcggtgtattcacggcgatgtgtgtcgttcattctacgcgctacggtcggatccctgctcggagaaaaggcccagattgccgcagctaaagagatttgtcaagccatcggcaagcagatgaaggctgtggaggcggtggtcaacgacacctccggagagaacaagtcaggagccgcagatatcgccgcttctcagcatgtcatggtctgtgcgttgcaggagctgggcagccttgtgcagagccttaacgctacggccagccctcttatacaggaagcttcaattggcctacttgaaattgtgactagcgtcctgctccacccatcaatggctgccagactcgcggcagcatggtgcctgagatgcgtggccgtagcactgcccttccaattgaccccattcctagatagatgtgctgagaggctcaacaatttgaagaccagccctgaagctgttagcgggtatagcttcgcaatggcggctcttctcggtggcgttcaccagtgccctctcggcattccgcatgccaagggaaagatggtagtttctattgccgaggacttgctccgtacagccgcacagaattccagactctctcttcagcgcacacaagccggatggctgctccttggggcattaatgaccctggggccatctgtggtgcggtaccacctgcccaaaatgttgctgctgtggaggaatgtgttcccgcgttctctgaaggaattagaggctgagaaggcccgtggtgactcgttcacttggcaggtcaccttggaaggaagggctggcgctctatgcgccatgcgaagttttgtcgcacactgccccgagctgctgactgaagatgtgatccgcaagcttatgacccctattgaatgtgccatgacaatgatgagtcatatacccagtgttatgaaggcccatggtgctcatctcaaagctagtgccgctatggtgcgactaaggttgtatgacattcttgctttgcttccacccaagacgtatgaagggtccttcaacgctctactccgagaattggtggcagagtttacactgaccgataactccgcgaacaccacaactagcctcttgcgcagtctctgccattatgatgattctgtgttgctggggagctggctgcaggagaccgaccataagagtatagaggatcagctccagcctaacagtgcttcaggaagtggtgcactcgaacacgaccccagcagtatctatttgagaatccccgctggggaggctgtcccaggaccactgccgctgggtgttagtgtcatcgacgcctcagtcgctctgtttggagtggtttttccccacgtttcatacaaacaccggctacaaatgttagaccactttgcagagtgcgtgaagcaggccaagggggtgaggcagcaagctgtccagttgaatatctttactgctgtgctgtcggccctgaagggtcttgcagagaataaatctacactgggccctgaggaggtgcggaaatcagccctgaccctggtaatggggcctctggataatcccaatcccatcctgagatgtgctgcaggagaagctctcggcagaatggcccaggtcgtgggagaggccacctttattgcaaggatggctcaatatagtttcgataaactcaagtccgcgagagatgttgtgtctcgcacaggccatagcctggcactcggctgtttgcatcggtacgtgggcggaatcggcagtggccaacacctgaagacatcagtgtccatcctcctggcactggcgcaggatggcacatcaccggaggtacagacgtggtcactgcattccctggccctcattgtggactcttccgggccaatgtaccgaggctatgttgaacccacactctcacttgtgctcacccttctgcttacggttccgccaagtcataccgaagtgcatcagtgcttgggcaggtgcctgggggcaataataacaacagtgggacctgagttacaagggaatggggctaccacctccaccatcaggagtagttgcttggtaggctgcgctattacacaggatcattctgatagcctcgtccaggccgcagccataagctgtctacagcagcttcacatgttcgctcctcgccacgtgaacctgagcagcctggtgccctcactgtgcgttcatctatgcagcagccacttgctcctgcgtcgagccgcagtggcatgcctcagacagctcgcccagagggaggccgctgaggtgtgtgagtatgctatgtccctcgccaaaaatactggagataaagagtccagtagcgccaacgtgagtcctttcgccccaggagtgtcatccaggactgacatccactgccggcatcagggggtgaatataactgagacaggcctggagggattgctgttcggcatgctcgaccgcgagacagatcggaaactgtgtagtgatattcatgacactctgggacacatgctttccagccttgcggtggagaaactgagtcactggctgatgctatgtaaggacgtgctggccgctagttcagacatgagtacagccacattgttgtctagtggaaaagacgaagaagccgaaaagaaggacgagatggacgatgatactatgttcaccacactcggagaagaggacaaatccaagcccttcgtggctccgcgttgggcaacccgtgtgtttgccgcagattgtctctgtcgcatcattaacctctgcgaaaatgctgatcaggcccacttcgacctagccctggcacgaagcgcaaagttgcggaaccctactaacgatctgctagtcctgcatctgagtgacctgatcaggatggcttttatggccgcaaccgaccactctaaccagctgaggatggcaggcctgcaggcactggaagatattatcaaaaaattcgccagcgtgcccgaaccggaattcccgggacacgtcattctcgaacaatatcaggctaatgtaggagctgcactgagacccgcattctcccaggatactcctagcgatataattgctaaagcctgtcaggtctgctcaacctggattgggagcggggtggtctccgaccttaatgacctaagaagagtgcacaacttgttggtgtcctccttagataaggtgcaggccggtaaaggcagctcttcgcagctgtacagagagagtgccacaaccatggaaaagctcgccgtcctgaaggcctgggccgaagtttatgtcgtagccatgaacattaaaaaggaagctgagtctaagccaaaaagagctattaagaacacagatgacgatgacgatgattgtggcacaatcgacgaattaccccctgattcgttaattacattggtgcagccagagctcccaactctcagtcgcctgtggctggccgctttgaaagactacgccctgcttaccctgcctgccgaattttcaagtcagctgcccccagatggaggcgcattttacacaccagagaccattgacaccgccaggctgcactaccgtaacagttgggcaccaatcctgcatgctgtggccttatggcttaattccaccggctttacctgctcagagagtacagaggctgccgctatctcaggcctgcagaaaagaagcacatccgttaacctgaaccaggccagcggagcggtcgggtccgcgaaaagcctgcccgaaatcaataaggatcggatgcacctgattctgggggtgagcattcaattcctctgctctccgagaccagaggaaccgattgaacacgtgaccgcttgcttacaggctctgcacacactcttagatagtccatacgccagggtgcatatcgctgaagaccagctgattggcgtagagctcctgtccgttctgcaccgattgctgctgacctggaatcccagttctgtccagctcttagtgacaggggtggtgcagcagatcgtgagggccgctcaggattacctgcaagaaaaaagaaacacactgaacgaagacgatatggagaaggaagcctgcaccgtcctgggagaaggtggggacagcggaggactgatccctggcaaaagcctggtgttcgcgactatggagttgttaatgttcattctggtccgccacatgccacatctctccaccaaagtctccgactctccaagtcacatcgccacaaagacgcgactttctgaggagagcgctcgcctggtcgccgctacagtaaccattctatccgatctcccaagcttatgttcccccgctggttgtatgaccattctgccaactatcctgtttctgatcgctagaattctgaaggacacggccattaagagtgccgacaatcaagtgcctcctccggtctcggcagctctgcaaggaataaagtccatagtcacattgagtatggccaagactgaagccggtgtgcaaaaacagtggaccgctctcatacgcagtactctcgcctgcatactggagtattctcagcctgaggattccgttcctacccccgatgaggtgtcaatgctgaccgctatcgctttgttcctctggagtgcgtcaaacgagatcattggagttcagtctcttcagaacggttgtatgaacaggttcaagaacgccctgaatagctgtgacccttgggtgcaggccaaatgttatcagctgttgctgtcggtgtttcaacattcgaaccgagctctgtctaccccatatatccattctttggcccctatcgtggtggaaaaactcaaggccgtggagaggaaccggccagctagcaacattgaattgctcgcggtccaggagggcattaaggtcctggagaccctggtggctctgggggaagaacagaatagagtgcagctgctcgccctcttagtgcccacgctcattagctacctccttgatgaaaattcctttgccagcgcctcctctgcctcgaaagacttacacgaatttgctctgcaaaacctgatgcacattggaccactttacccgcatgccttcaagaccgtgatgggagcagccccagagcttaaagtacgtttggaaacggccgtgagggcctcgcaggcctctaaggccaaggccgcagctaggcagccagcaccggctatccactccgctcctacaattaagctcaaaacaagcttcttttag

SEQ ID NO: 201048 - DNA, 6216 bp, Artificial Sequence
  derived and/or modified sequence
atggagctggcccacagcctgctgctgaacgaggaggccctggcccagatcaccgaggccaagagacccgtgttcatcttcgagtggctgagattcctggacaaggtgctggtggccgccaacaagaccgacgtgaaggagaagcagaagaagctggtggagcagctgaccggcctgatcagcagcagccccggcccccccaccagaaagctgctggccaagaacctggccgccctgtacagcatcggcgacaccttcaccgtgttccagaccctggacaagtgcaacgacatcatcagaaacaaggacgacaccgccgcctacctgcccaccaagctggccgccgtggcctgcgtgggcgccttctacgagaagatgggcagaatgctgggcagcgccttccccgagaccgtgaacaacctgctgaagagcctgaagagcgccgagagccagggcagaagcgagatcctgatgagcctgcagaaggtgctgagcggcctgggcggcgccgccgccagcagccacagagacatctacaagaacgccagaagcctgctgaccgacagaagcatggccgtgagatgcgccgtggccaagtgcctgctggagctgcagaacgaggccgtgttcatgtggaccgccgagctggagaacatcgccaccctgtgcttcaaggccctggagaacagcaactacggcgtgagagtggccgtgagcaagctgctgggcaccgtgatggccaccgccctgatgcccaagcaggccaccgtgatgagacagaacgtgaagagagccaccttcgacgaggtgctggagctgatggccaccggcttcctgagaggcggcagcggcttcctgaagagcggcggcgagatgctgaaggtgggcggcagcgtgaacagagaggtgagagtgggcgtgacccaggcctacgtggtgttcgtgaccaccctgggcggccagtggctggagagaagcttcgccaccttcctgagccacgtgctggacctggtgagccaccccagagccacccagacccacgtggaggccgtgtacagcagaagatgcgtgagcttcatcctgagagccaccgtgggcagcctgctgggcgagaaggcccagatcgccgccgccaaggagatctgccaggccatcggcaagcagatgaaggccgtggaggccgtggtgaacgacaccagcggcgagaacaagagcggcgccgccgacatcgccgccagccagcacgtgatggtgtgcgccctgcaggagctgggcagcctggtgcagagcctgaacgccaccgccagccccctgatccaggaggccagcatcggcctgctggagatcgtgaccagcgtgctgctgcaccccagcatggccgccagactggccgccgcctggtgcctgagatgcgtggccgtggccctgcccttccagctgacccccttcctggacagatgcgccgagagactgaacaacctgaagaccagccccgaggccgtgagcggctacagcttcgccatggccgccctgctgggcggcgtgcaccagtgccccctgggcatcccccacgccaagggcaagatggtggtgagcatcgccgaggacctgctgagaaccgccgcccagaacagcagactgagcctgcagagaacccaggccggctggctgctgctgggcgccctgatgaccctgggccccagcgtggtgagataccacctgcccaagatgctgctgctgtggagaaacgtgttccccagaagcctgaaggagctggaggccgagaaggccagaggcgacagcttcacctggcaggtgaccctggagggcagagccggcgccctgtgcgccatgagaagcttcgtggcccactgccccgagctgctgaccgaggacgtgatcagaaagctgatgacccccatcgagtgcgccatgaccatgatgagccacatccccagcgtgatgaaggcccacggcgcccacctgaaggccagcgccgccatggtgagactgagactgtacgacatcctggccctgctgccccccaagacctacgagggcagcttcaacgccctgctgagagagctggtggccgagttcaccctgaccgacaacagcgccaacaccaccaccagcctgctgagaagcctgtgccactacgacgacagcgtgctgctgggcagctggctgcaggagaccgaccacaagagcatcgaggaccagctgcagcccaacagcgccagcggcagcggcgccctggagcacgaccccagcagcatctacctgagaatccccgccggcgaggccgtgcccggccccctgcccctgggcgtgagcgtgatcgacgccagcgtggccctgttcggcgtggtgttcccccacgtgagctacaagcacagactgcagatgctggaccacttcgccgagtgcgtgaagcaggccaagggcgtgagacagcaggccgtgcagctgaacatcttcaccgccgtgctgagcgccctgaagggcctggccgagaacaagagcaccctgggccccgaggaggtgagaaagagcgccctgaccctggtgatgggccccctggacaaccccaaccccatcctgagatgcgccgccggcgaggccctgggcagaatggcccaggtggtgggcgaggccaccttcatcgccagaatggcccagtacagcttcgacaagctgaagagcgccagagacgtggtgagcagaaccggccacagcctggccctgggctgcctgcacagatacgtgggcggcatcggcagcggccagcacctgaagaccagcgtgagcatcctgctggccctggcccaggacggcaccagccccgaggtgcagacctggagcctgcacagcctggccctgatcgtggacagcagcggccccatgtacagaggctacgtggagcccaccctgagcctggtgctgaccctgctgctgaccgtgccccccagccacaccgaggtgcaccagtgcctgggcagatgcctgggcgccatcatcaccaccgtgggccccgagctgcagggcaacggcgccaccaccagcaccatcagaagcagctgcctggtgggctgcgccatcacccaggaccacagcgacagcctggtgcaggccgccgccatcagctgcctgcagcagctgcacatgttcgcccccagacacgtgaacctgagcagcctggtgcccagcctgtgcgtgcacctgtgcagcagccacctgctgctgagaagagccgccgtggcctgcctgagacagctggcccagagagaggccgccgaggtgtgcgagtacgccatgagcctggccaagaacaccggcgacaaggagagcagcagcgccaacgtgagccccttcgcccccggcgtgagcagcagaaccgacatccactgcagacaccagggcgtgaacatcaccgagaccggcctggagggcctgctgttcggcatgctggacagagagaccgacagaaagctgtgcagcgacatccacgacaccctgggccacatgctgagcagcctggccgtggagaagctgagccactggctgatgctgtgcaaggacgtgctggccgccagcagcgacatgagcaccgccaccctgctgagcagcggcaaggacgaggaggccgagaagaaggacgagatggacgacgacaccatgttcaccaccctgggcgaggaggacaagagcaagcccttcgtggcccccagatgggccaccagagtgttcgccgccgactgcctgtgcagaatcatcaacctgtgcgagaacgccgaccaggcccacttcgacctggccctggccagaagcgccaagctgagaaaccccaccaacgacctgctggtgctgcacctgagcgacctgatcagaatggccttcatggccgccaccgaccacagcaaccagctgagaatggccggcctgcaggccctggaggacatcatcaagaagttcgccagcgtgcccgagcccgagttccccggccacgtgatcctggagcagtaccaggccaacgtgggcgccgccctgagacccgccttcagccaggacacccccagcgacatcatcgccaaggcctgccaggtgtgcagcacctggatcggcagcggcgtggtgagcgacctgaacgacctgagaagagtgcacaacctgctggtgagcagcctggacaaggtgcaggccggcaagggcagcagcagccagctgtacagagagagcgccaccaccatggagaagctggccgtgctgaaggcctgggccgaggtgtacgtggtggccatgaacatcaagaaggaggccgagagcaagcccaagagagccatcaagaacaccgacgacgacgacgacgactgcggcaccatcgacgagctgccccccgacagcctgatcaccctggtgcagcccgagctgcccaccctgagcagactgtggctggccgccctgaaggactacgccctgctgaccctgcccgccgagttcagcagccagctgccccccgacggcggcgccttctacacccccgagaccatcgacaccgccagactgcactacagaaacagctgggcccccatcctgcacgccgtggccctgtggctgaacagcaccggcttcacctgcagcgagagcaccgaggccgccgccatcagcggcctgcagaagagaagcaccagcgtgaacctgaaccaggccagcggcgccgtgggcagcgccaagagcctgcccgagatcaacaaggacagaatgcacctgatcctgggcgtgagcatccagttcctgtgcagccccagacccgaggagcccatcgagcacgtgaccgcctgcctgcaggccctgcacaccctgctggacagcccctacgccagagtgcacatcgccgaggaccagctgatcggcgtggagctgctgagcgtgctgcacagactgctgctgacctggaaccccagcagcgtgcagctgctggtgaccggcgtggtgcagcagatcgtgagagccgcccaggactacctgcaggagaagagaaacaccctgaacgaggacgacatggagaaggaggcctgcaccgtgctgggcgagggcggcgacagcggcggcctgatccccggcaagagcctggtgttcgccaccatggagctgctgatgttcatcctggtgagacacatgccccacctgagcaccaaggtgagcgacagccccagccacatcgccaccaagaccagactgagcgaggagagcgccagactggtggccgccaccgtgaccatcctgagcgacctgcccagcctgtgcagccccgccggctgcatgaccatcctgcccaccatcctgttcctgatcgccagaatcctgaaggacaccgccatcaagagcgccgacaaccaggtgcccccccccgtgagcgccgccctgcagggcatcaagagcatcgtgaccctgagcatggccaagaccgaggccggcgtgcagaagcagtggaccgccctgatcagaagcaccctggcctgcatcctggagtacagccagcccgaggacagcgtgcccacccccgacgaggtgagcatgctgaccgccatcgccctgttcctgtggagcgccagcaacgagatcatcggcgtgcagagcctgcagaacggctgcatgaacagattcaagaacgccctgaacagctgcgacccctgggtgcaggccaagtgctaccagctgctgctgagcgtgttccagcacagcaacagagccctgagcaccccctacatccacagcctggcccccatcgtggtggagaagctgaaggccgtggagagaaacagacccgccagcaacatcgagctgctggccgtgcaggagggcatcaaggtgctggagaccctggtggccctgggcgaggagcagaacagagtgcagctgctggccctgctggtgcccaccctgatcagctacctgctggacgagaacagcttcgccagcgccagcagcgccagcaaggacctgcacgagttcgccctgcagaacctgatgcacatcggccccctgtacccccacgccttcaagaccgtgatgggcgccgcccccgagctgaaggtgagactggagaccgccgtgagagccagccaggccagcaaggccaaggccgccgccagacagcccgcccccgccatccacagcgcccccaccatcaagctgaagaccagcttcttctag

SEQ ID NO: 201049 - protein, 188 aa, Artificial Sequence
  derived and/or modified sequence
MSTMFADTLLIVFISVCTALLAEGITWVLVYRTDKYKRLKAEVEKQSKKLEKKKETITESAGRQQKKKIERQEEKLKNNNRDLSMVRMKSMFAIGFCFTALMGMFNSIFDGRVVAKLPFTPLSYIQGLSHRNLLGDDTTDCSFIFLYILCTMSIRQNIQKILGLAPSRAATKQAGGFLGPPPPSGKFS

SEQ ID NO: 201050 - protein, 169 aa, Artificial Sequence
  derived and/or modified sequence
MSTMFADTLLIVFISVCTALLAEGITWVLVYRTDKYKRLKAEVEKQSKKLEKKKETITESAGRQQKVRMKSMFAIGFCFTALMGMFNSIFDGRVVAKLPFTPLSYIQGLSHRNLLGDDTTDCSFIFLYILCTMSIRQNIQKILGLAPSRAATKQAGGFLGPPPPSGKFS

SEQ ID NO: 201051 - DNA, 567 bp, Artificial Sequence
  derived and/or modified sequence
atgagcaccatgttcgccgacaccctgctgatcgtgttcatcagcgtgtgcaccgccctgctggccgagggcatcacctgggtgctggtgtacagaaccgacaagtacaagagactgaaggccgaggtggagaagcagagcaagaagctggagaagaagaaggagaccatcaccgagagcgccggcagacagcagaagaagaagatcgagagacaggaggagaagctgaagaacaacaacagagacctgagcatggtgagaatgaagagcatgttcgccatcggcttctgcttcaccgccctgatgggcatgttcaacagcatcttcgacggcagagtggtggccaagctgcccttcacccccctgagctacatccagggcctgagccacagaaacctgctgggcgacgacaccaccgactgcagcttcatcttcctgtacatcctgtgcaccatgagcatcagacagaacatccagaagatcctgggcctggcccccagcagagccgccaccaagcaggccggcggcttcctgggcccccccccccccagcggcaagttcagctag

SEQ ID NO: 201052 - DNA, 510 bp, Artificial Sequence
  derived and/or modified sequence
atgagcaccatgttcgccgacaccctgctgatcgtgttcatcagcgtgtgcaccgccctgctggccgagggcatcacctgggtgctggtgtacagaaccgacaagtacaagagactgaaggccgaggtggagaagcagagcaagaagctggagaagaagaaggagaccatcaccgagagcgccggcagacagcagaaggtgagaatgaagagcatgttcgccatcggcttctgcttcaccgccctgatgggcatgttcaacagcatcttcgacggcagagtggtggccaagctgcccttcacccccctgagctacatccagggcctgagccacagaaacctgctgggcgacgacaccaccgactgcagcttcatcttcctgtacatcctgtgcaccatgagcatcagacagaacatccagaagatcctgggcctggcccccagcagagccgccaccaagcaggccggcggcttcctgggcccccccccccccagcggcaagttcagctag

SEQ ID NO: 201053 - DNA, 567 bp, Artificial Sequence
  derived and/or modified sequence
atgtccacaatgttcgcagacaccctgctgatcgtctttatctcagtgtgtaccgcgctgctcgccgagggaataacctgggtgctggtgtatcggacagataagtacaagaggctgaaagccgaagttgagaagcagagcaaaaagctggagaaaaagaaggagaccattacagaaagcgcaggcaggcagcagaaaaagaaaatagagagacaagaagaaaaactgaaaaataataatcgagatttgagcatggtgcgcatgaagtcaatgttcgccattggtttctgtttcacggctctcatgggaatgttcaactctatctttgacggacgagtagtcgccaaactcccattcacccccctatcctacatccagggactgagccataggaacttgctgggcgacgacaccaccgattgctcatttatcttcctgtacattttgtgcacgatgagcattaggcaaaacatccagaaaattctcggcctggcccccagcagagctgccactaagcaggcgggagggtttctgggtccacctcccccgtctggtaagttttcctag

SEQ ID NO: 201054 - DNA, 510 bp, Artificial Sequence
  derived and/or modified sequence
atgtcaactatgttcgctgatacactgctcatagtatttatctccgtttgcacagccctgctggccgagggaatcacttgggttctggtgtaccgcacagacaagtataaaaggcttaaagcagaggttgaaaagcagagtaaaaagctggaaaagaaaaaggagactatcactgaatccgctggccggcaacagaaagtgagaatgaagtcaatgttcgctataggtttctgttttactgcccttatgggcatgtttaattccatttttgacggtcgggtagttgccaaacttccattcacgcctctaagctacatacagggtctgagtcaccggaatttgctgggagacgacaccaccgactgcagcttcatctttctgtatatcttgtgcactatgtcgatcaggcagaacatacaaaagattctcgggttggcccccagcagggccgcaacaaagcaggctggcggctttcttggcccgcccccaccttctgggaagttttcatag

SEQ ID NO: 201055 - DNA, 567 bp, Artificial Sequence
  derived and/or modified sequence
atgagcaccatgtttgctgacaccctgctgattgtgttcatctctgtgtgcacagccctgctggccgagggcatcacctgggtgctggtgtacagaacagacaagtacaagaggctgaaggccgaggtggagaagcagagcaagaagctggagaagaagaaggagaccatcacagagagcgctggccggcagcagaagaagaagattgagcggcaggaggagaagctgaagaacaacaacagagacctgtccatggtgaggatgaagtccatgtttgccatcggcttctgcttcaccgccctgatgggcatgttcaacagcatctttgatggccgggtggtggccaagctgcccttcacccccctgagctacatccagggcctgagccacaggaacctgctgggagatgacaccacagactgcagcttcatcttcctgtacatcctgtgcaccatgagcatccggcagaacatccagaagatcctgggcctggcccccagcagagctgccaccaagcaggccggcggcttcctgggccccccaccacccagcggcaagttctcctag

SEQ ID NO: 201056 - DNA, 510 bp, Artificial Sequence
  derived and/or modified sequence
atgagcaccatgtttgctgacaccctgctgattgtgttcatctctgtgtgcacagccctgctggccgagggcatcacctgggtgctggtgtacagaacagacaagtacaagaggctgaaggccgaggtggagaagcagagcaagaagctggagaagaagaaggagaccatcacagagagcgctggccggcagcagaaggtgaggatgaagtccatgtttgccatcggcttctgcttcaccgccctgatgggcatgttcaacagcatctttgatggccgggtggtggccaagctgcccttcacccccctgagctacatccagggcctgagccacaggaacctgctgggagatgacaccacagactgcagcttcatcttcctgtacatcctgtgcaccatgagcatccggcagaacatccagaagatcctgggcctggcccccagccgggccgccaccaagcaggccggcggcttcctgggccccccacctccttctgggaagttctcctag

SEQ ID NO: 201057 - DNA, 567 bp, Artificial Sequence
  derived and/or modified sequence
atgagcaccatgttcgccgacaccctgctgatcgtgttcatcagcgtgtgcaccgctctgctggcagagggaatcacttgggtgttagtgtatagaacggacaaatataagcgactgaaggcggaagtggagaaacaatctaagaagctggagaagaaaaaggaaaccattacagagtctgccggccggcagcagaagaaaaagatcgaacgacaggaggaaaagctgaaaaataataaccgggatctgagcatggttcgaatgaaatccatgttcgctatcgggttttgcttcaccgctctgatggggatgtttaactcaatctttgatggcagggtggttgctaaacttccatttacgcctctgagctacattcagggactgtctcaccggaatctgctgggagacgatactaccgactgttctttcatcttcctgtacattttgtgcactatgtccatcaggcagaatatccagaagatcctgggcctggcgccttccagggcggccaccaagcaagctggtggattcttaggacctccacctcctagcggaaagtttagctag

SEQ ID NO: 201058 - DNA, 510 bp, Artificial Sequence
  derived and/or modified sequence
atgagcaccatgttcgccgacaccctgctgatcgtgttcatcagcgtctgcacggcattactggccgaggggataacttgggttttggtttatcggaccgacaagtacaaaagactgaaagccgaagtggaaaagcaatcaaagaagttggagaaaaagaaagaaaccattaccgagtcagcaggacgccaacagaaagtccgcatgaaatccatgttcgcaattggattctgttttaccgccctcatgggaatgtttaactcaatttttgacgggcgtgtcgtggcaaaactcccgtttacgcctctgtcttacatccagggcctttcacatcggaacctactgggagatgatacaacagactgcagcttcatattcctgtatattttatgcacgatgagtattcgccaaaatatccagaagattttgggcctcgcaccaagccgcgctgcgacgaagcaggccggaggctttctgggcccaccccctccctccggtaagttttcctag

SEQ ID NO: 201059 - DNA, 567 bp, Artificial Sequence
  derived and/or modified sequence
atgagtacaatgtttgccgacactctgcttatagtcttcattagcgtatgtactgctttgttggcggagggcataacttgggtgctggtttacagaactgataaatacaaacgtctgaaagccgaagtcgagaagcagagtaagaagttagagaaaaagaaggaaaccatcaccgagagtgccggtcgccaacaaaaaaaaaaaattgagaggcaggaggaaaaactcaagaacaataacagggatctgagtatggtgaggatgaaaagtatgttcgctatcggcttttgcttcaccgccttgatggggatgttcaactccatcttcgacggcagggtggtcgctaagctcccttttacgccccttagttatatccaggggctgtctcaccggaacctgctaggggacgacaccaccgactgttcatttatcttcctgtacattctgtgtacaatgagcatccgccaaaacatccagaagattcttggcctggccccaagccgggcagccaccaaacaggccggaggcttcctgggtcccccaccgccttcaggcaagtttagctag

SEQ ID NO: 201060 - DNA, 510 bp, Artificial Sequence
  derived and/or modified sequence
atgagcactatgttcgccgacactttgctgattgtgtttatcagcgtatgtactgccttgctggctgaaggaatcacttgggtactggtctatcgcacggataagtacaagcggctcaaagcggaggtcgaaaaacagtctaagaagttggaaaagaaaaaggagactattaccgaatccgctgggcgtcagcaaaaggtgcgcatgaagtctatgttcgccatcggcttttgcttcaccgcccttatgggtatgttcaacagcatctttgacgggagggtcgttgcgaagctccccttcactccactttcctacatccagggactgtcgcacaggaatctgctgggggacgatactactgactgtagtttcatctttctgtatatcctatgtactatgtcaattcgccagaatattcaaaaaattctaggtcttgcaccctctagagccgctaccaagcaggctggcggattcttagggcctccacctccaagcgggaaattctcatag

SEQ ID NO: 201061 - DNA, 2224 bp, Artificial Sequence
  derived and/or modified sequence
ctaatattacgaccacagaagttgggctgaggtagaagtcaagactatcccaataactggattctggccgagaaaaaggcgcgcgccagcaccccagtcagtaaaatctaccgggcaaagttcgccgccgccactatcctcctctggctctgaaatagttccaattctcgcgagattcggcctgactaccagcccttcagctccagtgagttgcgggttggtttcctctagactctcgtggccacaccgttctccgatacgagcctttccggtgctatgccccggaagcggaagtgcgatcttcgggctgtcagagttggtctgttactcggtggtggcggagtctacggaagccgttttcgcttcacttttcctggctgtagagcgctttccccctggcgggtgagagtgcagagacgaaggtgcgagatgagcactatgttcgcggacactctcctcatcgtttttatctctgtgtgcacggctctgctcgcagagggcataacctgggtcctggtttacaggacagacaagtacaagagactgaaggcagaagtggaaaaacagagtaaaaaattggaaaagaagaaggaaacaataacagagtcagctggtcgacaacagaaaaagaaaatagagagacaagaagagaaactgaagaataacaacagagatctatcaatggttcgaatgaaatccatgtttgctattggcttttgttttactgccctaatgggaatgttcaattccatatttgatggtagagtggtggcaaagcttccttttacccctctttcttacatccaaggactgtctcatcgaaatctgctgggagatgacaccacagactgttccttcattttcctgtatattctctgtactatgtcgattcgacagaacattcagaagattctcggccttgccccttcacgagccgccaccaagcaggcaggtggatttcttggcccaccacctccttctgggaagttctcttgaactcaagaactctttattttctatcattctttctagacacacacacatcagactggcaactgttttgtagcaagagccataggtagccttactacttgggcctctttctagttttgaattatttctaagccttttgggtatgattagagtgaaaatggcagccagcaaacttgatagtgcttttggtcctagatgatttttatcaaataagtggattgattagttaagttcaggtaatgtttatgtaatgaaaaacaaatagcatccttcttgtttcatttacataagtattttctgtgggaccgactctcaaggcactgtgtatgccctgcaagttggctgtctatgagcatttagagatttagaagaaaaatttagtttgtttaacccttgtaactgtttgttttgttgttgtttttttttcaagccaaatacatgacataagatcaataaagaggccaaatttttagctgttttatgtacaaggagagatctgtttcattttgttttgccgtatttctagatataagttttagcatgggccaggaaggactaaaataaaagtttttaaggtactgtactttttgccatacttgactcatatactcaaaatacagagttgtcttggtgtaggaattggaaagcaagagtggaaaggaacgtaataactcgttggagtttaaaaatgagggtcttggcaagtaacactgatgtctgaaaaaaaattaaatataaataaataaataaaaatgagggtcctcagctgttctcttcatatcctattacagtctctcagattcttgtgggggcactcttagatctcccttggagacaaggttatagttatatgttgttaatctcgcagagcttccttttagtcacaatagccttcattttctgccatgccccttcataagggagaaggatgtttgtaccatgatcctccccgcataatctatggaattaggagtcctgtgtggagtcttatcaataaatatgcacattcatcaaatgtctacttaaatgtgagtattctaccagtgagaaaaaacacataattttcaaggtaatcattgttaaaccaacagcaaacttctttcttatcagcaccataaagtccagaagacagtagaaaagtatcttcaaagtgctgaggaaaataagtatcaacttagaattttatgtacaatattggaggcaaaataaagacatgtttagacatacaaaa

SEQ ID NO: 201062 - DNA, 1129 bp, Artificial Sequence
  derived and/or modified sequence
aagtgcgatcttcgggctgtcagagttggtctgttactcggtggtggcggagtctacggaagccgttttcgcttcacttttcctggctgtagagcgctttccccctggcgggtgagagtgcagagacgaaggtgcgagatgagcactatgttcgcggacactctcctcatcgtttttatctctgtgtgcacggctctgctcgcagagggcataacctgggtcctggtttacaggacagacaagtacaagagactgaaggcagaagtggaaaaacagagtaaaaaattggaaaagaagaaggaaacaataacagagtcagctggtcgacaacagaaagttcgaatgaaatccatgtttgctattggcttttgttttactgccctaatgggaatgttcaattccatatttgatggtagagtggtggcaaagcttccttttacccctctttcttacatccaaggactgtctcatcgaaatctgctgggagatgacaccacagactgttccttcattttcctgtatattctctgtactatgtcgattcgacagaacattcagaagattctcggccttgccccttcacgagccgccaccaagcaggcaggtggatttcttggcccaccacctccttctgggaagttctcttgaactcaagaactctttattttctatcattctttctagacacacacacatcagactggcaactgttttgtagcaagagccataggtagccttactacttgggcctctttctagttttgaattatttctaagccttttgggtatgattagagtgaaaatggcagccagcaaacttgatagtgcttttggtcctagatgatttttatcaaataagtggattgattagttaagttcaggtaatgtttatgtaatgaaaaacaaatagcatccttcttgtttcatttacataagtattttctgtgggaccgactctcaaggcactgtgtatgccctgcaagttggctgtctatgagcatttagagatttagaagaaaaatttagtttgtttaacccttgtaactgtttgttttgttgttgtttttttttcaagccaaatacatgacataagatcaataaagaggccaaatttttagctgttttatgt

SEQ ID NO: 201063 - protein, 59 aa, Artificial Sequence
  derived and/or modified sequence
MTAEDSTAAMSSDSAAGSSAKVPEGVAGAPNEAALLALMERTGYSMVQENGQRKYGGPP

SEQ ID NO: 201064 - protein, 217 aa, Artificial Sequence
  derived and/or modified sequence
MTAEDSTAAMSSDSAAGSSAKVPEGVAGAPNEAALLALMERTGYSMVQENGQRKYGGPPPGWEGPHPQRGCEVFVGKIPRDVYEDELVPVFEAVGRIYELRLMMDFDGKNRGYAFVMYCHKHEAKRAVRELNNYEIRPGRLLGVCCSVDNCRLFIGGIPKMKKREEILEEIAKVTEGVLDVIVYASAADKMKNRGFAFVEYESHRAAAMARRKLMPG

SEQ ID NO: 201065 - protein, 114 aa, Artificial Sequence
  derived and/or modified sequence
MTAEDSTAAMSSDSAAGSSAKVPEGVAGAPNEAALLALMERTGYSMVQENGQRKYGGPPPGWEGPHPQRGCEVFVGKIPRDVYEDELVPVFEAVGRIYELRLMMDFDGKNRGYA

SEQ ID NO: 201066 - protein, 193 aa, Artificial Sequence
  derived and/or modified sequence
MTAEDSTAAMSSDSAAGSSAKVPEGVAGAPNEAALLALMERTGYSMVQENGQRKYGGPPPGWEGPHPQRGCEVFVGKIPRDVYEDELVPVFEAVGRIYELRLMMDFDGKNRGYAFVMYCHKHEAKRAVRELNNYEIRPGRLLGVCCSVDNCRLFIGGIPKMKKREEILEEIAKVTEGVLDVIVYASAADKMKN

SEQ ID NO: 201067 - protein, 159 aa, Artificial Sequence
  derived and/or modified sequence
MTAEDSTAAMSSDSAAGSSAKVPEGVAGAPNEAALLALMERTGYSMVQENGQRKYGGPPPGWEGPHPQRGCEVFVGKIPRDVYEDELVPVFEAVGRIYELRLMMDFDGKNRGYAFVMYCHKHEAKRAVRELNNYEIRPGRLLGVCCSVDNCRLFIGGIP

SEQ ID NO: 201068 - protein, 137 aa, Artificial Sequence
  derived and/or modified sequence
MTAEDSTAAMSSDSAAGSSAKVPEGVAGAPNEAALLALMERTGYSMVQENGQRKYGGPPPGWEGPHPQRGCEVFVGKIPRDVYEDELVPVFEAVGRIYELRLMMDFDGKNRGYAFVMYCHKHEAKRAVRELNNYEIR

SEQ ID NO: 201069 - protein, 524 aa, Artificial Sequence
  derived and/or modified sequence
MTAEDSTAAMSSDSAAGSSAKVPEGVAGAPNEAALLALMERTGYSMVQENGQRKYGGPPPGWEGPHPQRGCEVFVGKIPRDVYEDELVPVFEAVGRIYELRLMMDFDGKNRGYAFVMYCHKHEAKRAVRELNNYEIRPGRLLGVCCSVDNCRLFIGGIPKMKKREEILEEIAKVTEGVLDVIVYASAADKMKNRGFAFVEYESHRAAAMARRKLMPGRIQLWGHQIAVDWAEPEIDVDEDVMETVKILYVRNLMIETTEDTIKKSFGQFNPGCVERVKKIRDYAFVHFTSREDAVHAMNNLNGTELEGSCLEVTLAKPVDKEQYSRYQKAARGGGAAEAAQQPSYVYSCDPYTLAYYGYPYNALIGPNRDYFVKVAIPAIGAQYSMFPAAPAPKMIEDGKIHTVEHMISPIAVQPDPASAAAAAAAAAAAAAAVIPTVSTPPPFQGRPITPVYTVAPNVQRIPTAGIYGASYVPFAAPATATIATLQKNAAAAAAMYGGYAGYIPQAFPAAAIQVPIPDVYQTY

SEQ ID NO: 201070 - protein, 124 aa, Artificial Sequence
  derived and/or modified sequence
MTAEDSTAAMSSDSAAGSSAKVPEGVAGAPNEAALLALMERTGYSMVQENGQRKYGGPPPGWEGPHPQRGCEVFVGKIPRDVYEDELVPVFEAVGRIYELRLMMDFDGKNRGYAFVMYCHKHEA

SEQ ID NO: 201071 - DNA, 657 bp, Artificial Sequence
  derived and/or modified sequence
ataaacaggtaaggcggagggggtggggcgcggattgcggacatctgggtttcttgggaattgggatggggtgggggttcgagccaactccccagagagcaggcaaggtgaagcgagggcttggctgctgtttctaaatgcagtgtttttttgttccctttctagaaaccctccgtaactctaggtcagagcgcactaaaatgagccacttctgaacgagcagcgcccaggccccaggccctgctgcgaaggccccggcaaaggtcagggccccgtccgcgtgacgctcctgcctgcgcgcggccaagccatgctcggccccaggatttgcctcaaagggcactgcaaaaattgaacagaggaatcccaaggaagctgcctgaatttgcctgtatactctcgttctgcgacttataaaggaccagacaaatcaaattagtggttttggtttccgccagctgtggatgcctttgacattatgaccgcagaggattccaccgcagccatgagcagtgactcggccgccgggtcctccgccaaggtgcccgagggcgtggcgggcgcgcccaacgaggcagcactgctggcgctgatggagcgcacgggctacagcatggtgcaagagaacgggcagcgcaagtacggcggcccaccgcc

SEQ ID NO: 201072 - DNA, 1100 bp, Artificial Sequence
  derived and/or modified sequence
taatttctccaacgtggttctggctgggtttctcggagcagcccgaagggggccgagcgtctgactcggacagatgcccccaggtggagcaggtgccacttctgggtgtctgaaaggcatgtgacttttggggcggggagagaagtccgtctggtcaagtcccccaatctctgccatcaaggccgattttctttgaaccttcagcaaagctcaggtaacggaggccttggaaagagactctgcgtcaggtcacccagcagagatcagcaatccttggctcactgaggaggtttggatttgcctcaaagggcactgcaaaaattgaacagaggaatcccaaggaagctgcctgaatttgcctgtatactctcgttctgcgacttataaaggaccagacaaatcaaattagtggttttggtttccgccagctgtggatgcctttgacattatgaccgcagaggattccaccgcagccatgagcagtgactcggccgccgggtcctccgccaaggtgcccgagggcgtggcgggcgcgcccaacgaggcagcactgctggcgctgatggagcgcacgggctacagcatggtgcaagagaacgggcagcgcaagtacggcggcccaccgcccggctgggagggcccgcacccgcagcgtggctgcgaggtcttcgtgggcaagatcccgcgcgacgtgtacgaggacgagctggtgcccgtgttcgaggccgtgggccgcatctacgagctgcgcctcatgatggactttgacggcaagaaccgcggctacgccttcgtcatgtactgccacaagcacgaggccaagcgcgcagtgcgtgagctcaacaactacgagatccgcccgggccgcctgctcggcgtgtgctgcagcgtggacaactgccgcctcttcatcggcgggatccccaagatgaagaagcgcgaggaaatcctggaggagattgccaaggtcaccgagggcgtgctggacgtgatcgtctacgccagcgcggccgacaagatgaagaaccgcggcttcgccttcgtggagtacgagagccaccgcgcggctgccatggctcgccgcaagctcatgcctggcc

SEQ ID NO: 201073 - DNA, 836 bp, Artificial Sequence
  derived and/or modified sequence
gtcacagaattcgattcctgttggcccattccgcgcctacaaacaggcttagcgctccactgaaatgcgggaggctccttaactcttgtataaacagaaaccctccgtaactctaggtcagagcgcactaaaatgagccacttctgaacgagcagcgcccaggccccaggccctgctgcgaaggccccggcaaaggtcagggccccgtccgcgtgacgctcctgcctgcgcgcggccaagccatgctcggccccagctcaggtaacggaggccttggaaagagactctgcgtcaggtcacccagcagagatcagcaatccttggctcactgaggaggtttggatttgcctcaaagggcactgcaaaaattgaacagaggaatcccaaggaagctgcctgaatttgcctgtatactctcgttctgcgacttataaaggaccagacaaatcaaattagtggttttggtttccgccagctgtggatgcctttgacattatgaccgcagaggattccaccgcagccatgagcagtgactcggccgccgggtcctccgccaaggtgcccgagggcgtggcgggcgcgcccaacgaggcagcactgctggcgctgatggagcgcacgggctacagcatggtgcaagagaacgggcagcgcaagtacggcggcccaccgcccggctgggagggcccgcacccgcagcgtggctgcgaggtcttcgtgggcaagatcccgcgcgacgtgtacgaggacgagctggtgcccgtgttcgaggccgtgggccgcatctacgagctgcgcctcatgatggactttgacggcaagaaccgcggctacgc

SEQ ID NO: 201074 - DNA, 882 bp, Artificial Sequence
  derived and/or modified sequence
gggaaagagagcgccaggtgcttagcaggatttgcctcaaagggcactgcaaaaattgaacagaggaatcccaaggaagctgcctgaatttgcctgtatactctcgttctgcgacttataaaggaccagacaaatcaaattagtggttttgagacagggtctcactatgttgcccagactggtctggaactcctgagctcaagcaagcttctcacctcagcctcccaaagtgctgggattataggcttcagccaccacgcccaaccagccaggtttccgccagctgtggatgcctttgacattatgaccgcagaggattccaccgcagccatgagcagtgactcggccgccgggtcctccgccaaggtgcccgagggcgtggcgggcgcgcccaacgaggcagcactgctggcgctgatggagcgcacgggctacagcatggtgcaagagaacgggcagcgcaagtacggcggcccaccgcccggctgggagggcccgcacccgcagcgtggctgcgaggtcttcgtgggcaagatcccgcgcgacgtgtacgaggacgagctggtgcccgtgttcgaggccgtgggccgcatctacgagctgcgcctcatgatggactttgacggcaagaaccgcggctacgccttcgtcatgtactgccacaagcacgaggccaagcgcgcagtgcgtgagctcaacaactacgagatccgcccgggccgcctgctcggcgtgtgctgcagcgtggacaactgccgcctcttcatcggcgggatccccaagatgaagaagcgcgaggaaatcctggaggagattgccaaggtcaccgagggcgtgctggacgtgatcgtctacgccagcgcggccgacaagatgaagaac

SEQ ID NO: 201075 - DNA, 856 bp, Artificial Sequence
  derived and/or modified sequence
ccgcgcctacaaacaggcttagcgctccactgaaatgcgggaggctccttaactcttgtataaacagaaaccctccgtaactctaggtcagagcgcactaaaatgagccacttctgaacgagcagcgcccaggccccaggccctgctgcgaaggccccggcaaaggtcagggccccgtccgcgtgacgctcctgcctgcgcgcggccaagccatgctcggccccaggatttgcctcaaagggcactgcaaaaattgaacagaggaatcccaaggaagctgcctgaatttgcctgtatactctcgttctgcgacttataaaggaccagacaaatcaaattagtggttttggtttccgccagctgtggatgcctttgacattatgaccgcagaggattccaccgcagccatgagcagtgactcggccgccgggtcctccgccaaggtgcccgagggcgtggcgggcgcgcccaacgaggcagcactgctggcgctgatggagcgcacgggctacagcatggtgcaagagaacgggcagcgcaagtacggcggcccaccgcccggctgggagggcccgcacccgcagcgtggctgcgaggtcttcgtgggcaagatcccgcgcgacgtgtacgaggacgagctggtgcccgtgttcgaggccgtgggccgcatctacgagctgcgcctcatgatggactttgacggcaagaaccgcggctacgccttcgtcatgtactgccacaagcacgaggccaagcgcgcagtgcgtgagctcaacaactacgagatccgcccgggccgcctgctcggcgtgtgctgcagcgtggacaactgccgcctcttcatcggcgggatccc

SEQ ID NO: 201076 - DNA, 797 bp, Artificial Sequence
  derived and/or modified sequence
tgaaccttcagcaaaggtatctgcgctcctaaaaaacaacaggaatgtggcactggcctttagccaggggaggctcagccagcaggataaaatttcagggcagatttacgggaagttgccggtgttgggagtaaaaatctggtttgctcaggtaacggaggccttggaaagagactctgcgtcaggtcacccagcagagatcagcaatccttggctcactgaggaggtttggatttgcctcaaagggcactgcaaaaattgaacagaggaatcccaaggaagctgcctgaatttgcctgtatactctcgttctgcgacttataaaggaccagacaaatcaaattagtggttttggtttccgccagctgtggatgcctttgacattatgaccgcagaggattccaccgcagccatgagcagtgactcggccgccgggtcctccgccaaggtgcccgagggcgtggcgggcgcgcccaacgaggcagcactgctggcgctgatggagcgcacgggctacagcatggtgcaagagaacgggcagcgcaagtacggcggcccaccgcccggctgggagggcccgcacccgcagcgtggctgcgaggtcttcgtgggcaagatcccgcgcgacgtgtacgaggacgagctggtgcccgtgttcgaggccgtgggccgcatctacgagctgcgcctcatgatggactttgacggcaagaaccgcggctacgccttcgtcatgtactgccacaagcacgaggccaagcgcgcagtgcgtgagctcaacaactacgagatccgcc

SEQ ID NO: 201077 - DNA, 4934 bp, Artificial Sequence
  derived and/or modified sequence
gcagactagacgctgagcgctcccgtgcgcagcgccccacgcagccgggacgcggcgccgctctgcgggtggaaccgccgcgcgctcccggcctcgggagctgagcccgagagaacttcgctgccttcgggtcgccgctcccgctttccactgtggaatgtgcagcttgggatagagagaaaccagggtttggggagcggtcctcctggagactttctctctgcaagtctccaaggttaagcaattctgacccactggaattcccagagcctgggagttaagcctaaaacgctctgttgctttaagcggcgcggtggggagtcgctggacactccttattttggttttacattaaaaagaaggcggacgagaagatgttgtaggtgacttcctagctgtgttaagttgctcctgggctgtgaatggtgttaatttctgaagtgggcggctccaaaaacttaacaaggaaagctcaggtaacggaggccttggaaagagactctgcgtcaggtcacccagcagagatcagcaatccttggctcactgaggaggtttggatttgcctcaaagggcactgcaaaaattgaacagaggaatcccaaggaagctgcctgaatttgcctgtatactctcgttctgcgacttataaaggaccagacaaatcaaattagtggttttggtttccgccagctgtggatgcctttgacattatgaccgcagaggattccaccgcagccatgagcagtgactcggccgccgggtcctccgccaaggtgcccgagggcgtggcgggcgcgcccaacgaggcagcactgctggcgctgatggagcgcacgggctacagcatggtgcaagagaacgggcagcgcaagtacggcggcccaccgcccggctgggagggcccgcacccgcagcgtggctgcgaggtcttcgtgggcaagatcccgcgcgacgtgtacgaggacgagctggtgcccgtgttcgaggccgtgggccgcatctacgagctgcgcctcatgatggactttgacggcaagaaccgcggctacgccttcgtcatgtactgccacaagcacgaggccaagcgcgcagtgcgtgagctcaacaactacgagatccgcccgggccgcctgctcggcgtgtgctgcagcgtggacaactgccgcctcttcatcggcgggatccccaagatgaagaagcgcgaggaaatcctggaggagattgccaaggtcaccgagggcgtgctggacgtgatcgtctacgccagcgcggccgacaagatgaagaaccgcggcttcgccttcgtggagtacgagagccaccgcgcggctgccatggctcgccgcaagctcatgcctggccgcatccagctgtggggccaccagatcgccgtggactgggccgaacctgagatcgacgtggacgaggacgtgatggagaccgtgaagatcctctacgtgcgcaacctcatgatcgagaccaccgaggacaccatcaagaagagcttcggccagttcaaccccggctgcgtggagcgcgtcaagaagatccgcgactacgccttcgtgcacttcaccagccgcgaggatgccgtgcatgccatgaacaacctcaacggcactgagctggagggctcgtgcctggaggtcacgctggccaagcccgtggacaaggagcagtactcgcgctaccagaaggcagccaggggcggcggcgcggctgaggcagcgcagcagcccagctacgtgtactcctgcgacccctacacactggcctactacggctacccctacaacgcgctcattgggcccaacagggactactttgtgaaagtagccatccctgccattggggctcagtattccatgtttccagcagctccagcccctaaaatgattgaagatggcaaaatccacacagtggagcacatgatcagccccattgctgtgcagccagacccagccagtgctgctgccgccgcagccgcggccgcagccgccgcagccgctgtcattcccactgtgtcgacgccaccacctttccagggccgcccaataactccagtatacacggtggctccaaacgttcagagaattcctactgccgggatctacggggccagttacgtgccatttgctgctccagctacagccacgatcgccacactacagaagaacgcggcagccgcggccgccatgtatggaggatacgcaggctacatacctcaggccttccctgctgctgccattcaggtccccatccccgacgtctaccagacatactgaggctggtgaccagcacgaagacagaccacacaaacaccactgaaggaacgcttgactatttatgaagaaggaacatgttggattcacacatgcaacctgaaagtgaagaatgttagcagatttatttctgaattattttatatacatgaagttttcactagttttttaagactattttcaacttagcatgcctacgttcatacatttccaaaagacttgcaatggttcgtgccttcattccatcttttaaaaatttgtatgctgtactacatttgtatagaggtttttgttgttgtttttttaaggatatattttcagtatgaaggttattttcttaacttctgcactccagagatttctattttgtagtaccttcaataatatatcaactatatattaaaaaagcacacttgaggagctagggaactattttgaaaaatatatacaatatttaaagatacaaacagtagtgcttaaaaatactacataaagcattattttaaaggttatactggaaagtgcaattttaaaatgagtaaaacctctgtatttctgctggcattaagggttgatggtgttaccatgtatcatcatggcggtactattttttaaaagaaattaaacactggatctctccttaagccaacattgaaaagacttgccgcacttctgagtccaaacactggaaagctctcctttgccaccgttagccggggctcattctccatgtgccttagccttaaacatgcccccactcccacatctctcaccctgtcccctcctccccagattcccaatcccaccgcaatgtttggcaagcctaggactgataagtagctctgatagaggagctggtggcttttatacttcttcctgggtttttgttggggtttgttgtttcgttgttttttgtttttttttttgtttggttggggaagtattgtcttctacgtgtgctattttcagtagcagagtaagcacaaggttttaatcgagttgcataagacacctttgcatagctatttaattgcccaatgtaaaactttaatgccatttctaatgcttttattcatttttgaagtatgagtttgtagggacaaagaatgtatgttatcgtagacaagacccccagagactcttttcagcagaaagttatgcttctagttgccttaccatgtttcttgcaaaactgtccatggtcctcaagggtgttggaaacattatgtttattaaatgggcctctcttcctttgctgtgcacttgatgggtgaactggattggggtgtgcacatccaggaggaggaggagagacctgtagaagtttaaagatagtttgtaaatatcttctaatgcttgtttttagtccttttatgttggagaagttcatggtatgtagtttaatgcaaaatgaaaccattttatttcaatgttattaaaaaggtttgttttattaggaagttaatgtattgttgcagtgttttgtgcctgtttaaaggcttttgtttagcagagtgaatgtaaaatacagtaaaatgttaagattgtcatctactttttaaaaaaaaatatcaacttggaattgttttttaaaggctcaatcaaggaagtgaggtgtgcaataaggtagcaagtaaaacgcagttgcgtttttatgtcatgttagagatccatacaattttccactcacgggatttttgttgatggctgaattcttgtggattcataagaggatcatgcccttagcaagtacttttgttttgttttaaattaagagattcccaaatgcctttttccccctcatcttgaaatgagatgagtttttatgtgtaagcaatatttatttaactattctataaaattattgagtgcctactgaggcctttaagcaccgctaacattcctttccatcattcttttaaatgacataaaataattgtgcaatgttcctgatgatgtaccccacaagctgcattcaaactcaaatctgtgggaatgagtgactcgacaaaatgtaattcggatcagatcctcatcccctgactgtgtgaaaaaagtactctccttctagtgaaggattgtcacagagtttcactggatgaaactatgacccagtattcttactgtattttacatatgcctgtaaattatttgcaaaaaagaagaagaagaggaagaaagaaaagaaagaaaagaaagaaagaaagaaagaaagaaagaaagaaagaaagaaagaaagaaagaaagaaagaaaaagaaagaaagaataaaaaaaaatgataacatggcaaccaccaaactcccttaaaaacaaacattggtgacatggccaattaagtatcagtgagcctcctatctgggacttatctgttcctattgtttcaaaaccatttcatgtacactactgaggtaagtttataacttgaaatgtgaactttttttttttttagtgttaagaacaaactatataaatgtaaaaaaaaagttttagagttctgttttcaaacattgctagtggtttagttaactttagctgctttatatttgaaaagcttttatttagatcttgctccatttacagtacattcttaggatgtatgtagtaaataaagctttctttaaagcaatcgcaagaccttattttaaattgtg

SEQ ID NO: 201078 - DNA, 582 bp, Artificial Sequence
  derived and/or modified sequence
gcttaagcaaagctttcattacagttagcctgtcgcacccagatcaagattggaaaggatttgcctcaaagggcactgcaaaaattgaacagaggaatcccaaggaagctgcctgaatttgcctgtatactctcgttctgcgacttataaaggaccagacaaatcaaattagtggttttggtttccgccagctgtggatgcctttgacattatgaccgcagaggattccaccgcagccatgagcagtgactcggccgccgggtcctccgccaaggtgcccgagggcgtggcgggcgcgcccaacgaggcagcactgctggcgctgatggagcgcacgggctacagcatggtgcaagagaacgggcagcgcaagtacggcggcccaccgcccggctgggagggcccgcacccgcagcgtggctgcgaggtcttcgtgggcaagatcccgcgcgacgtgtacgaggacgagctggtgcccgtgttcgaggccgtgggccgcatctacgagctgcgcctcatgatggactttgacggcaagaaccgcggctacgccttcgtcatgtactgccacaagcacgaggc

SEQ ID NO: 201079 - DNA, 4473 bp, Artificial Sequence
  derived and/or modified sequence
agtcagacccaggaggagtgaggtcaattgccctttagtcccaggactaaccggaagcttctgcaacaggaggacattgaaaataagatggaacccatccacataaggatttgcctcaaagggcactgcaaaaattgaacagaggaatcccaaggaagctgcctgaatttgcctgtatactctcgttctgcgacttataaaggaccagacaaatcaaattagtggttttggtttccgccagctgtggatgcctttgacattatgaccgcagaggattccaccgcagccatgagcagtgactcggccgccgggtcctccgccaaggtgcccgagggcgtggcgggcgcgcccaacgaggcagcactgctggcgctgatggagcgcacgggctacagcatggtgcaagagaacgggcagcgcaagtacggcggcccaccgcccggctgggagggcccgcacccgcagcgtggctgcgaggtcttcgtgggcaagatcccgcgcgacgtgtacgaggacgagctggtgcccgtgttcgaggccgtgggccgcatctacgagctgcgcctcatgatggactttgacggcaagaaccgcggctacgccttcgtcatgtactgccacaagcacgaggccaagcgcgcagtgcgtgagctcaacaactacgagatccgcccgggccgcctgctcggcgtgtgctgcagcgtggacaactgccgcctcttcatcggcgggatccccaagatgaagaagcgcgaggaaatcctggaggagattgccaaggtcaccgagggcgtgctggacgtgatcgtctacgccagcgcggccgacaagatgaagaaccgcggcttcgccttcgtggagtacgagagccaccgcgcggctgccatggctcgccgcaagctcatgcctggccgcatccagctgtggggccaccagatcgccgtggactgggccgaacctgagatcgacgtggacgaggacgtgatggagaccgtgaagatcctctacgtgcgcaacctcatgatcgagaccaccgaggacaccatcaagaagagcttcggccagttcaaccccggctgcgtggagcgcgtcaagaagatccgcgactacgccttcgtgcacttcaccagccgcgaggatgccgtgcatgccatgaacaacctcaacggcactgagctggagggctcgtgcctggaggtcacgctggccaagcccgtggacaaggagcagtactcgcgctaccagaaggcagccaggggcggcggcgcggctgaggcagcgcagcagcccagctacgtgtactcctgcgacccctacacactggcctactacggctacccctacaacgcgctcattgggcccaacagggactactttgtgaaagtagccatccctgccattggggctcagtattccatgtttccagcagctccagcccctaaaatgattgaagatggcaaaatccacacagtggagcacatgatcagccccattgctgtgcagccagacccagccagtgctgctgccgccgcagccgcggccgcagccgccgcagccgctgtcattcccactgtgtcgacgccaccacctttccagggccgcccaataactccagtatacacggtggctccaaacgttcagagaattcctactgccgggatctacggggccagttacgtgccatttgctgctccagctacagccacgatcgccacactacagaagaacgcggcagccgcggccgccatgtatggaggatacgcaggctacatacctcaggccttccctgctgctgccattcaggtccccatccccgacgtctaccagacatactgaggctggtgaccagcacgaagacagaccacacaaacaccactgaaggaacgcttgactatttatgaagaaggaacatgttggattcacacatgcaacctgaaagtgaagaatgttagcagatttatttctgaattattttatatacatgaagttttcactagttttttaagactattttcaacttagcatgcctacgttcatacatttccaaaagacttgcaatggttcgtgccttcattccatcttttaaaaatttgtatgctgtactacatttgtatagaggtttttgttgttgtttttttaaggatatattttcagtatgaaggttattttcttaacttctgcactccagagatttctattttgtagtaccttcaataatatatcaactatatattaaaaaagcacacttgaggagctagggaactattttgaaaaatatatacaatatttaaagatacaaacagtagtgcttaaaaatactacataaagcattattttaaaggttatactggaaagtgcaattttaaaatgagtaaaacctctgtatttctgctggcattaagggttgatggtgttaccatgtatcatcatggcggtactattttttaaaagaaattaaacactggatctctccttaagccaacattgaaaagacttgccgcacttctgagtccaaacactggaaagctctcctttgccaccgttagccggggctcattctccatgtgccttagccttaaacatgcccccactcccacatctctcaccctgtcccctcctccccagattcccaatcccaccgcaatgtttggcaagcctaggactgataagtagctctgatagaggagctggtggcttttatacttcttcctgggtttttgttggggtttgttgtttcgttgttttttgtttttttttttgtttggttggggaagtattgtcttctacgtgtgctattttcagtagcagagtaagcacaaggttttaatcgagttgcataagacacctttgcatagctatttaattgcccaatgtaaaactttaatgccatttctaatgcttttattcatttttgaagtatgagtttgtagggacaaagaatgtatgttatcgtagacaagacccccagagactcttttcagcagaaagttatgcttctagttgccttaccatgtttcttgcaaaactgtccatggtcctcaagggtgttggaaacattatgtttattaaatgggcctctcttcctttgctgtgcacttgatgggtgaactggattggggtgtgcacatccaggaggaggaggagagacctgtagaagtttaaagatagtttgtaaatatcttctaatgcttgtttttagtccttttatgttggagaagttcatggtatgtagtttaatgcaaaatgaaaccattttatttcaatgttattaaaaaggtttgttttattaggaagttaatgtattgttgcagtgttttgtgcctgtttaaaggcttttgtttagcagagtgaatgtaaaatacagtaaaatgttaagattgtcatctactttttaaaaaaaaatatcaacttggaattgttttttaaaggctcaatcaaggaagtgaggtgtgcaataaggtagcaagtaaaacgcagttgcgtttttatgtcatgttagagatccatacaattttccactcacgggatttttgttgatggctgaattcttgtggattcataagaggatcatgcccttagcaagtacttttgttttgttttaaattaagagattcccaaatgcctttttccccctcatcttgaaatgagatgagtttttatgtgtaagcaatatttatttaactattctataaaattattgagtgcctactgaggcctttaagcaccgctaacattcctttccatcattcttttaaatgacataaaataattgtgcaatgttcctgatgatgtaccccacaagctgcattcaaactcaaatctgtgggaatgagtgactcgacaaaatgtaattcggatcagatcctcatcccctgactgtgtgaaaaaagtactctccttctagtgaaggattgtcacagagtttcactggatgaaactatgacccagtattcttactgtattttacatatgcctgtaaattatttgcaaaaaagaagaagaagaggaagaaagaaaagaaagaaaagaaagaaagaaagaaagaaagaaagaaagaaagaaagaaagaaagaaagaaagaaagaaaaagaaagaaagaataaaaaaaaatgataacatggcaaccaccaaactcccttaaaaacaaacattggtgacatggccaattaagtatcagtgagcctcctatctgggacttatctgttcctattgtttcaaaaccatttcatgtacactactgaggtaagtttataacttgaaatgtgaactttttttttttttagtgttaagaacaaactatataaatgtaaaaaaaaagttttagagttctgttttcaaacattgctagtggtttagttaactttagctgctttatatttgaaaagcttttatttagatcttgctccatttacagtacattcttaggatgtatgtagtaaataaagctttctttaaagcaatcgcaagacctta

SEQ ID NO: 201080 - DNA, 741 bp, Artificial Sequence
  derived and/or modified sequence
ataaacaggtaaggcggagggggtggggcgcggattgcggacatctgggtttcttgggaattgggatggggtgggggttcgagccaactccccagagagcaggcaaggtgaagcgagggcttggctgctgtttctaaatgcagtgtttttttgttccctttctagaaaccctccgtaactctaggtcagagcgcactaaaatgagccacttctgaacgagcagcgcccaggccccaggccctgctgcgaaggccccggcaaaggtcagggccccgtccgcgtgacgctcctgcctgcgcgcggccaagccatgctcggccccagctcaggtaacggaggccttggaaagagactctgcgtcaggtcacccagcagagatcagcaatccttggctcactgaggaggtttggatttgcctcaaagggcactgcaaaaattgaacagaggaatcccaaggaagctgcctgaatttgcctgtatactctcgttctgcgacttataaaggaccagacaaatcaaattagtggttttggtttccgccagctgtggatgcctttgacattatgaccgcagaggattccaccgcagccatgagcagtgactcggccgccgggtcctccgccaaggtgcccgagggcgtggcgggcgcgcccaacgaggcagcactgctggcgctgatggagcgcacgggctacagcatggtgcaagagaacgggcagcgcaagtacggcggcccaccgc

SEQ ID NO: 201081 - DNA, 1575 bp, Artificial Sequence
  derived and/or modified sequence
atgacagcagaggacagcaccgcagccatgagctccgacagtgcagccgggagtagcgccaaggtgccagagggcgtagccggcgctccgaatgaggctgccctcctggccctaatggagaggactggttacagcatggtgcaggagaacggccagcggaaatatggggggcctcctccggggtgggagggacctcatccccagcggggatgtgaggtctttgtaggcaaaattccccgagacgtatacgaagacgaactggtcccggtgtttgaagctgtgggcagaatctacgagttaaggctgatgatggactttgatggaaagaaccgcggatacgcttttgttatgtattgtcataagcacgaggcgaagcgggcagtgagagaattgaacaattacgagataaggcccggaaggttactgggcgtctgctgcagcgtcgataactgccgcttgttcataggcggtattccgaagatgaagaaacgggaagagattcttgaggagatcgccaaggtcactgagggggtcctcgatgtgatagtttacgcttcggcagcagataaaatgaagaacaggggtttcgcctttgttgaatatgagtctcatagagccgccgcgatggccagaagaaaactgatgcctgggcgcatccagctgtgggggcaccagattgctgtggattgggccgagcctgaaatcgacgtcgacgaggacgtgatggagaccgttaagatattgtacgtgagaaatttaatgattgagaccacagaagatactataaagaagagttttggacagttcaaccctgggtgcgtggagcgagtgaagaaaattcgagactacgctttcgtgcatttcacttcacgggaagatgctgtgcacgccatgaacaatttgaatggaaccgagctggagggctcctgcctagaagtgaccctggcaaagcccgttgacaaagagcagtactcccgttaccagaaagctgcgagagggggcggagcagctgaagccgctcagcagccttcctacgtttactcttgcgatccctacaccctcgcttattatggttatccgtacaatgccctgattggaccaaatcgagactacttcgttaaagtggccattccagccatcggagcccagtactctatgtttcccgccgcaccagctcctaagatgattgaggacggcaagatccacaccgtcgaacacatgatttctcctattgcggtccaaccggaccccgccagtgccgcagccgcggctgctgccgctgcagcagccgccgccgcagtgatcccgaccgtgtcgacaccacccccatttcagggcaggcccattactcctgtatatacggtggccccaaatgtacagcgaatccccacagctgggatatacggtgctagctatgtgcccttcgctgccccagcaaccgctaccatcgccaccctgcaaaaaaatgctgccgctgctgcggcaatgtatggcggttatgccggctatataccgcaggcttttcccgctgccgctatccaggtcccaatccccgatgtgtaccaaacttactag

SEQ ID NO: 201082 - DNA, 1575 bp, Artificial Sequence
  derived and/or modified sequence
atgacagctgaagatagcaccgccgctatgtccagcgatagcgcagccggttcttctgcaaaagtgcctgagggagtcgccggtgcccccaatgaagcggccctgctggcccttatggagcgcaccggctactctatggtacaggagaatggacaaaggaagtatgggggtcctccccccggttgggaggggccccacccccagcggggctgtgaagtgtttgtagggaaaattccacgtgatgtgtacgaggacgagctcgtacctgtgttcgaggccgttgggagaatatatgagttgcgacttatgatggacttcgatggtaaaaacaggggctacgcgtttgtcatgtactgtcacaaacacgaggccaagcgcgctgtgcgtgagctgaataactatgaaatacggcccggaagattgcttggcgtttgctgttcagtcgataattgccggctgtttattgggggcatcccgaagatgaaaaagcgggaggaaattctggaggaaatcgctaaagtaaccgaaggcgtgttagatgtgattgtatatgcatccgccgcagacaagatgaagaataggggcttcgccttcgtggagtatgagagtcatcgcgccgcggccatggccaggcggaaattgatgccaggtcggatacagctctggggacaccagatcgcagtcgactgggcagagcctgaaatcgatgtggatgaggatgtgatggagacagttaagattctgtacgtgagaaatttgatgatcgagacaacagaagacactataaagaaaagttttggacagtttaatccgggttgtgtagagcgcgtcaagaagattcgggactatgcattcgtccactttacatctagggaagatgcagtgcacgctatgaacaatctgaacggtacagaattagaggggtcctgtttggaagtgactttagctaagcccgtggacaaggagcagtactcccggtaccagaaagctgcgcgaggagggggagcggctgaggctgcacaacagcccagctacgtctactcttgcgacccttatactcttgcatactatggctatccatacaacgctctcataggtccgaatagggactactttgtgaaagttgcaatacccgctatcggggcacagtacagcatgttcccagctgcacccgcccccaagatgatcgaagacggaaaaatccacaccgtggagcacatgatcagccccattgccgtgcaacctgaccccgcctcagccgctgccgccgcagccgcagctgccgcggcggcagctgccgtgatcccgacagtaagtaccccacccccctttcagggccgtccaattacacctgtgtacacagtggctccaaatgtacagcgcattcctacggcaggcatttacggtgcctcctatgtgcctttcgcagctccggcgactgccacaattgcgaccctgcagaagaatgctgctgcggccgcggccatgtatggagggtacgccggttacatccctcaggcatttcccgcagccgctattcaggtgcccatccctgatgtgtaccagacctattag

SEQ ID NO: 201083 - DNA, 180 bp, Artificial Sequence
  derived and/or modified sequence
atgacagccgaggatagcaccgccgcgatgtcaagcgactccgcagccggctcatcagccaaagtgcccgagggggttgccggggccccaaacgaagccgctcttctcgcattgatggagaggaccggttacagtatggttcaggagaatgggcaacgcaagtacggaggtcccccatag

SEQ ID NO: 201084 - DNA, 480 bp, Artificial Sequence
  derived and/or modified sequence
atgaccgccgaggattccacagctgcaatgtcctcagactccgctgccggttcgtccgcgaaggtccctgaaggagtggcaggcgcgccgaatgaagccgcccttctggcccttatggaaagaacgggatattcgatggtccaggaaaacggtcagcggaagtatggcggaccaccacccggatgggagggaccgcatcctcagcgcggatgtgaggtgttcgtgggaaaaattccccgcgatgtttacgaagacgagctggttccggttttcgaggcagtgggtagaatctatgagttaaggctgatgatggattttgacggtaagaatcgtgggtacgccttcgtgatgtattgccataagcacgaggctaagcgcgccgtgcgggagcttaataactacgagattaggcctggtaggttgcttggtgtttgctgcagtgtcgacaactgtagacttttcattggaggaattccctag

SEQ ID NO: 201085 - DNA, 375 bp, Artificial Sequence
  derived and/or modified sequence
atgaccgccgaggattctacagccgccatgagttccgactcagcagctgggtccagtgccaaggtgcccgagggggtggctggtgctccgaatgaggctgccctgctggcactgatggaacggacaggttatagcatggtgcaggagaacggccaacgcaagtacgggggacccccccctggatgggaggggccacacccacaaaggggatgtgaggtttttgtgggaaagatccccagggacgtttatgaggacgaacttgttcctgtattcgaggccgtgggtcggatttatgagttgaggttaatgatggatttcgatggcaaaaaccgcgggtacgccttcgtaatgtactgtcacaaacatgaggcatag

SEQ ID NO: 201086 - DNA, 345 bp, Artificial Sequence
  derived and/or modified sequence
atgaccgcagaggattccacggcagccatgtcctcggatagcgccgccggttcaagcgccaaggttccagagggagtcgctggggcacctaatgaagccgccttgctggcactgatggaacgcacagggtactctatggttcaagagaacggccaacgaaagtacggtggtcctccacctggatgggagggcccacacccccagcgtgggtgtgaggtatttgtaggcaaaatccctagagacgtttacgaagacgagttggtgcccgtgtttgaagccgtgggacgtatttacgagctgcgtctgatgatggatttcgatggcaagaaccgaggatatgcatag

SEQ ID NO: 201087 - DNA, 180 bp, Artificial Sequence
  derived and/or modified sequence
atgacagccgaggattcaacggcggccatgtccagtgactctgccgcggggtctagtgccaaagttccggaaggagtggctggggcacctaatgaggcggcccttttagcgctgatggagaggaccggttactcaatggtccaggagaatggacagagaaaatacggtggtccaccgtag

SEQ ID NO: 201088 - DNA, 582 bp, Artificial Sequence
  derived and/or modified sequence
atgactgccgaagacagcacggccgccatgtcttcagactcagcggctggctcatccgcaaaagtgcccgagggtgtggcaggagcacctaatgaggccgctcttctggccttaatggaaaggactggatactctatggtgcaagaaaacggacagcgcaagtatggaggcccaccacctggatgggagggcccccatcctcagcggggctgtgaggtgttcgtcggcaaaatacctcgtgatgtttatgaagacgaacttgtcccagtgttcgaagcagttggacggatctatgagttgcgccttatgatggattttgacggtaagaacaggggatatgctttcgtcatgtattgccataagcatgaggctaagcgcgcagttagagagctcaacaactatgagattagaccggggcgacttttgggcgtgtgttgctcagtggataattgccgtctattcataggcgggatccccaagatgaagaagagagaagagatcctggaggagattgccaaggtgacagagggcgtgttggatgtgattgtgtacgcctcagccgctgataagatgaagaattag

SEQ ID NO: 201089 - DNA, 414 bp, Artificial Sequence
  derived and/or modified sequence
atgactgccgaagatagcactgcagctatgtcttctgactctgcagctggtagctccgccaaggtgcctgaaggagtggcgggcgcaccaaacgaggctgctcttcttgccttgatggaacgaacagggtactctatggtccaggagaacggacagcgtaagtacggtgggccccctcctggttgggaaggtccccacccccagaggggctgtgaggtgtttgttgggaagattccccgggatgtttacgaggatgaactcgtccccgtttttgaggctgtaggacggatatatgagctgagactcatgatggactttgacggcaaaaatcggggctatgcctttgtaatgtactgtcataaacatgaggcgaagcgggcagtgcgggaactgaacaattacgagatcaggtag

SEQ ID NO: 201090 - DNA, 654 bp, Artificial Sequence
  derived and/or modified sequence
atgacggctgaggacagcacagcggctatgtcatcagattcagccgccgggagcagcgccaaagtccctgagggggtcgcgggtgcccctaacgaagcagcccttttggcactgatggagagaactggatatagcatggtccaggagaatggacagcgaaagtacggcggaccaccaccgggttgggaaggcccgcaccctcaacgtgggtgcgaagttttcgtgggtaagattccaagagacgtttatgaagacgagttggtgcctgtcttcgaggctgtcggtagaatctacgaactccggcttatgatggattttgatgggaaaaatagaggctatgcctttgtaatgtattgccataagcacgaggccaagcgagcagtgagagaactcaacaattatgaaattcgccccggccggctgctgggcgtttgttgcagcgttgataattgccggctcttcatcggcggtataccaaagatgaagaaacgggaggaaatccttgaagaaatagcaaaagtcacggagggggtcctggacgtaattgtttacgcgagtgcggccgataagatgaaaaatcgaggtttcgcttttgtcgaatacgaatctcacagagccgcggcgatggccagaagaaaactgatgcctggatag

SEQ ID NO: 201091 - DNA, 1575 bp, Artificial Sequence
  derived and/or modified sequence
atgacagctgaggacagcacagctgccatgagcagtgacagcgctgctggcagcagcgccaaggtgcctgagggcgtggccggggccccaaatgaagctgccctgctggccctgatggagaggacaggctacagcatggtgcaggagaatggccagaggaaatatggaggccccccacctggctgggagggcccccacccccagaggggctgtgaggtgtttgtgggcaagatccccagagatgtgtatgaagatgagctggtgcctgtgtttgaagctgtgggccgcatctatgagctgcggctgatgatggactttgatggcaagaacagaggctacgcctttgtgatgtactgccacaagcatgaggccaagagagctgtgcgggagctgaacaactatgagatccggcccggccgcctgctgggcgtgtgctgcagcgtggacaactgccgcctcttcatcggcggcatccccaagatgaagaagcgggaggagatcctggaggagatcgccaaggtgacagaaggagtgctggatgtgattgtgtatgccagcgctgctgacaagatgaagaacagaggatttgcctttgtggagtatgagagccacagagctgctgccatggcccggaggaagctgatgcctggccgcatccagctgtggggccaccagattgctgtggactgggccgagcctgagattgatgtggatgaagatgtgatggagaccgtgaagatcctgtatgtgaggaacctgatgattgagaccacagaggacaccatcaagaagagctttggccagttcaaccctggctgtgtggagcgggtgaagaagatccgggactatgcctttgtgcacttcaccagccgggaggatgctgtgcacgccatgaacaacctgaatggaacagagctggagggcagctgcctggaggtgaccctggccaagcctgtggacaaggagcagtacagccgctaccagaaggccgcccggggcggcggcgctgctgaggccgcccagcagcccagctatgtgtacagctgtgacccctacaccctggcctactacggctacccctacaatgccctgattggccccaacagagactactttgtgaaggtggccatcccagccatcggggcccagtacagcatgtttcctgctgccccagcccccaagatgattgaagatggcaagatccacacagtggagcacatgatcagccccatcgctgtgcagcctgaccctgccagcgctgctgctgctgctgctgctgctgctgctgctgctgctgctgtgatccccaccgtgtccaccccaccacccttccagggccggcccatcacccctgtgtacacagtggcccccaacgtgcagaggatccccacagctggcatctacggggccagctatgtgccctttgctgccccagccacagccaccatcgccaccctgcagaagaatgctgctgctgctgctgccatgtatggaggctacgccggctacatcccccaggccttccctgctgctgccatccaggtgcccatcccagatgtgtaccagacctactag

SEQ ID NO: 201092 - DNA, 180 bp, Artificial Sequence
  derived and/or modified sequence
atgacagctgaggacagcacagctgccatgagcagtgacagcgctgctggcagcagcgccaaggtgcctgagggcgtggccggggccccaaatgaagctgccctgctggccctgatggagaggacaggctacagcatggtgcaggagaatggccagaggaaatatggaggccccccatag

SEQ ID NO: 201093 - DNA, 480 bp, Artificial Sequence
  derived and/or modified sequence
atgacagctgaggacagcacagctgccatgagcagtgacagcgctgctggcagcagcgccaaggtgcctgagggcgtggccggggccccaaatgaagctgccctgctggccctgatggagaggacaggctacagcatggtgcaggagaatggccagaggaaatatggaggccccccacctggctgggagggcccccacccccagaggggctgtgaggtgtttgtgggcaagatccccagagatgtgtatgaagatgagctggtgcctgtgtttgaagctgtgggccgcatctatgagctgcggctgatgatggactttgatggcaagaacagaggctacgcctttgtgatgtactgccacaagcatgaggccaagagagctgtgcgggagctgaacaactatgagatccggcccggccgcctgctgggcgtgtgctgcagcgtggacaactgccgcctcttcatcggcggcatcccctag

SEQ ID NO: 201094 - DNA, 375 bp, Artificial Sequence
  derived and/or modified sequence
atgacagctgaggacagcacagctgccatgagcagtgacagcgctgctggcagcagcgccaaggtgcctgagggcgtggccggggccccaaatgaagctgccctgctggccctgatggagaggacaggctacagcatggtgcaggagaatggccagaggaaatatggaggccccccacctggctgggagggcccccacccccagaggggctgtgaggtgtttgtgggcaagatccccagagatgtgtatgaagatgagctggtgcctgtgtttgaagctgtgggccgcatctatgagctgcggctgatgatggactttgatggcaagaacagaggctacgcctttgtgatgtactgccacaagcatgaggcctag

SEQ ID NO: 201095 - DNA, 345 bp, Artificial Sequence
  derived and/or modified sequence
atgacagctgaggacagcacagctgccatgagcagtgacagcgctgctggcagcagcgccaaggtgcctgagggcgtggccggggccccaaatgaagctgccctgctggccctgatggagaggacaggctacagcatggtgcaggagaatggccagaggaaatatggaggccccccacctggctgggagggcccccacccccagaggggctgtgaggtgtttgtgggcaagatccccagagatgtgtatgaagatgagctggtgcctgtgtttgaagctgtgggccgcatctatgagctgcggctgatgatggactttgatggcaagaacagaggctacgcctag

SEQ ID NO: 201096 - DNA, 582 bp, Artificial Sequence
  derived and/or modified sequence
atgacagctgaggacagcacagctgccatgagcagtgacagcgctgctggcagcagcgccaaggtgcctgagggcgtggccggggccccaaatgaagctgccctgctggccctgatggagaggacaggctacagcatggtgcaggagaatggccagaggaaatatggaggccccccacctggctgggagggcccccacccccagaggggctgtgaggtgtttgtgggcaagatccccagagatgtgtatgaagatgagctggtgcctgtgtttgaagctgtgggccgcatctatgagctgcggctgatgatggactttgatggcaagaacagaggctacgcctttgtgatgtactgccacaagcatgaggccaagagagctgtgcgggagctgaacaactatgagatccggcccggccgcctgctgggcgtgtgctgcagcgtggacaactgccgcctcttcatcggcggcatccccaagatgaagaagcgggaggagatcctggaggagatcgccaaggtgacagaaggagtgctggatgtgattgtgtatgccagcgctgctgacaagatgaagaactag

SEQ ID NO: 201097 - DNA, 414 bp, Artificial Sequence
  derived and/or modified sequence
atgacagctgaggacagcacagctgccatgagcagtgacagcgctgctggcagcagcgccaaggtgcctgagggcgtggccggggccccaaatgaagctgccctgctggccctgatggagaggacaggctacagcatggtgcaggagaatggccagaggaaatatggaggccccccacctggctgggagggcccccacccccagaggggctgtgaggtgtttgtgggcaagatccccagagatgtgtatgaagatgagctggtgcctgtgtttgaagctgtgggccgcatctatgagctgcggctgatgatggactttgatggcaagaacagaggctacgcctttgtgatgtactgccacaagcatgaggccaagagagctgtgcgggagctgaacaactatgagatcagatag

SEQ ID NO: 201098 - DNA, 654 bp, Artificial Sequence
  derived and/or modified sequence
atgacagctgaggacagcacagctgccatgagcagtgacagcgctgctggcagcagcgccaaggtgcctgagggcgtggccggggccccaaatgaagctgccctgctggccctgatggagaggacaggctacagcatggtgcaggagaatggccagaggaaatatggaggccccccacctggctgggagggcccccacccccagaggggctgtgaggtgtttgtgggcaagatccccagagatgtgtatgaagatgagctggtgcctgtgtttgaagctgtgggccgcatctatgagctgcggctgatgatggactttgatggcaagaacagaggctacgcctttgtgatgtactgccacaagcatgaggccaagagagctgtgcgggagctgaacaactatgagatccggcccggccgcctgctgggcgtgtgctgcagcgtggacaactgccgcctcttcatcggcggcatccccaagatgaagaagcgggaggagatcctggaggagatcgccaaggtgacagaaggagtgctggatgtgattgtgtatgccagcgctgctgacaagatgaagaacagaggatttgcctttgtggagtatgagagccacagagctgctgccatggcccggaggaagctgatgcctggatag

SEQ ID NO: 201099 - DNA, 1575 bp, Artificial Sequence
  derived and/or modified sequence
atgaccgccgaggacagcaccgccgccatgagcagcgacagcgccgcaggatcttcagcaaaagtgcctgagggcgttgccggcgcccccaatgaggctgctctgctggccttaatggagagaacaggttatagtatggtccaggaaaatggacagcgcaaatatggaggaccgccacccgggtgggaaggaccgcacccccaacgaggatgtgaggttttcgtggggaagattccgcgggatgtttatgaggacgagcttgtacctgtcttcgaggccgtgggccgtatttacgaattgaggttgatgatggacttcgatggcaagaacagggggtatgcttttgtcatgtactgccataagcatgaggctaagcgagccgtgagggagctgaataattatgagattcggcctggtcggctcctgggcgtttgctgcagcgtggacaactgtcggctgtttattggcggaatacccaagatgaaaaagagggaggaaatcctggaggaaattgccaaggttacggagggcgttttggatgttatcgtctacgcatccgccgctgacaaaatgaaaaatcgaggcttcgcctttgtggagtacgagagtcaccgggccgcagccatggcgcgcaggaagctcatgccgggtagaatacaactatggggccatcaaattgccgtggattgggccgagcccgagatcgatgtcgacgaggatgtgatggaaacagtcaaaattctatatgtcaggaatttgatgattgagacaaccgaggacactatcaaaaagagcttcggacagttcaatccaggttgtgttgagcgtgtcaaaaagattcgcgactacgcattcgtgcactttacgagtcgggaggacgccgtgcacgccatgaacaatctcaatggaaccgaactggaaggatcttgcttggaggtgactctggctaagccagtggataaggagcagtattctcgataccagaaggcagcacgcgggggcggcgccgccgaggccgcacaacagccttcatacgtttactcatgcgacccatatacgctggcatattatggctacccatataacgctctgataggtcccaatagagattacttcgtgaaggtggccatcccagctatcggggcccagtatagtatgttccccgctgcccctgcacccaagatgatcgaggatggaaaaatccacacagttgaacacatgatctctcccattgccgtgcagccagaccccgcatccgcagccgcagctgctgcggccgctgccgctgcggccgctgcagtgatcccaactgtgtctaccccacctccatttcaggggagacccatcacccctgtctatacagttgcccctaatgtgcagagaattcctactgcagggatctacggagcaagttacgtgcccttcgccgccccagccactgccactatcgcaactctccagaagaacgcagcggccgccgccgcaatgtacggtggatatgcaggttatattccgcaggccttccctgcagccgctattcaggttccaatcccagacgtgtatcaaacatattag

SEQ ID NO: 201100 - DNA, 1575 bp, Artificial Sequence
  derived and/or modified sequence
atgaccgccgaggacagcaccgccgccatgagcagcgacagcgccgccgggagcagtgccaaagtgcctgagggcgtcgcgggcgcccccaacgaagcagcactgctggccctcatggagcggaccggatatagtatggtgcaggaaaacggccaaagaaaatatggagggcctcctcctggctgggaaggcccacacccgcagcgcggttgtgaggtgtttgtgggcaagattccaagagatgtgtacgaggacgaactcgtgcccgtgttcgaggcagtgggtcgcatttatgagctgagactcatgatggacttcgacggtaagaaccgggggtacgcattcgtcatgtattgtcacaaacacgaggcgaagcgggccgtgagagaactcaacaattatgaaatacgccccggccgcctccttggcgtgtgttgctcagtggacaattgtaggctgttcatcggcggaatccctaagatgaaaaagcgagaagaaatacttgaagaaattgcaaaagtcaccgagggagttctcgacgttatcgtgtatgcaagtgcagcggataagatgaaaaatcgcgggttcgcctttgtagagtacgagagtcaccgcgccgctgcaatggcgcgtcgaaaattgatgcccggccggatccagctgtggggtcaccagatcgctgtggactgggccgagcctgagatagatgttgacgaagatgtgatggagactgtgaagattctgtatgtgcgaaatttaatgattgaaacaacagaggacaccattaaaaagtcatttggccagtttaatcccggatgcgtggagcgtgtgaaaaagataagggattacgcattcgtacatttcactagccgcgaagacgctgtccatgcaatgaataacctgaatggaactgagctggaaggtagctgtcttgaagtgaccctcgccaagccagtggacaaggaacagtactccaggtaccaaaaagcagctagggggggcggagcagcggaggccgcccagcagcccagttacgtctactcctgcgacccatatacactggcttactacggctacccttacaatgcactgatcggcccaaacagagattacttcgtgaaggtggccattcccgccattggagcccagtacagcatgtttccagcggctccggcgccaaaaatgattgaggatggaaaaatacacaccgtggaacacatgatttctcccattgctgtgcaaccggacccagcctctgctgccgcagctgccgccgccgccgccgctgccgctgctgccgttatccctaccgtaagtactcccccacctttccaggggaggcccataactccagtgtacacagtagcgccgaacgtacagcggatccccactgccgggatttatggcgctagttacgtgccctttgccgctccagccaccgcaacaattgctacgctgcagaagaacgccgctgccgctgccgccatgtacggcggctacgctggctacatcccccaagcattccctgctgccgcaatacaggtgcccatccctgacgtctaccagacgtattag

SEQ ID NO: 201101 - DNA, 180 bp, Artificial Sequence
  derived and/or modified sequence
atgaccgccgaggacagcaccgccgccatgagcagcgacagcgccgctgggagttcagcaaaagtacctgaaggagtagctggagcgcccaacgaagccgcactgctcgccctaatggagagaactggctattccatggtccaagagaacgggcagaggaaatacggcggtccaccctag

SEQ ID NO: 201102 - DNA, 480 bp, Artificial Sequence
  derived and/or modified sequence
atgaccgccgaggacagcaccgccgccatgagcagcgacagcgccgcagggtccagtgctaaggtgcctgagggcgtagctggcgctccaaacgaggcagcgctgttggcactgatggaaaggacaggctatagcatggtacaggagaatggccagaggaagtatggagggcccccacccggatgggaggggccccatccacagagagggtgtgaggtcttcgtgggcaaaattcctcgagacgtctacgaggacgagttggttcctgtgttcgaggcggtaggacgcatctatgagcttaggctcatgatggatttcgacggcaaaaaccggggctacgcatttgtcatgtactgccataagcatgaggctaaacgcgccgtgcgggaactgaacaactatgagatacgaccaggtcgcctcctcggagtgtgctgcagcgtggataactgcaggctatttataggcggcattccttag

SEQ ID NO: 201103 - DNA, 375 bp, Artificial Sequence
  derived and/or modified sequence
atgaccgccgaggacagcaccgccgccatgagcagcgacagcgccgcgggcagctccgcgaaagtacccgagggtgtggcaggcgccccaaacgaagctgcactgttagccctcatggaaagaaccgggtactccatggttcaggaaaatggtcagcgcaagtacgggggtccaccccctggctgggaaggcccacacccacagaggggatgcgaggtgttcgtgggaaagattccaagggacgtgtacgaagacgagctggtgccggtcttcgaggcggtgggccgcatttatgaattgaggctgatgatggacttcgatggtaagaaccggggatacgcctttgtcatgtactgccacaagcacgaagcctag

SEQ ID NO: 201104 - DNA, 345 bp, Artificial Sequence
  derived and/or modified sequence
atgaccgccgaggacagcaccgccgccatgagcagcgacagcgccgcaggatcttctgcaaaggtgccagagggcgtggccggggctccaaacgaggctgcgctgttagccttaatggagagaacaggctattcaatggtccaagaaaatgggcagagaaagtatggaggacctccccctggctgggagggaccccaccctcagagaggttgtgaagtgttcgtgggcaaaattccgagggatgtatatgaagacgaattagtgccagttttcgaggctgtcggtcggatttatgagctccggcttatgatggacttcgacggtaaaaatcgaggctatgcctag

SEQ ID NO: 201105 - DNA, 180 bp, Artificial Sequence
  derived and/or modified sequence
atgaccgccgaggacagcaccgccgccatgagcagcgacagcgccgcaggatcttcagcaaaagtaccagaaggcgtggccggagctcctaatgaggctgctttactggctctgatggagcgaactggctacagcatggtgcaagaaaatgggcagcgaaaatacggtgggccgccctag

SEQ ID NO: 201106 - DNA, 582 bp, Artificial Sequence
  derived and/or modified sequence
atgaccgccgaggacagcaccgccgccatgagcagcgacagcgccgccggcagctctgcaaaggtgccagaaggagtggcaggagcccctaatgaggccgctctgctggcacttatggagagaacagggtattctatggtccaggaaaacggccaaagaaaatatggaggcccgccaccaggctgggaaggtccgcaccctcagagaggttgcgaggttttcgttggtaaaattccacgggacgtgtacgaagacgagctcgtgccagttttcgaggccgtcgggcgtatatatgagttgcgattaatgatggacttcgatggaaaaaatagggggtatgcatttgtcatgtattgtcacaagcacgaggccaagagggcggtgcgggagctcaataattacgagatcagaccaggacgactattgggggtatgctgttctgtggacaactgccgactttttatcggaggtatcccgaagatgaagaaacgggaagaaattctggaggagattgcaaaggtgacagagggggtactagacgttattgtgtatgcatcggccgccgacaagatgaaaaattag

SEQ ID NO: 201107 - DNA, 414 bp, Artificial Sequence
  derived and/or modified sequence
atgaccgccgaggacagcaccgccgccatgagcagcgacagcgccgctgggtcttcggccaaggtgcctgaaggagtggctggggccccaaatgaagccgcgttgcttgcattaatggagcggacaggttacagcatggtccaggagaatgggcagaggaagtatgggggacctcctcccgggtgggagggtccccacccacagcgagggtgtgaggtctttgtgggcaagatccccagagatgtctacgaagacgaacttgtaccggtattcgaagcagtgggtcggatatatgagttacggctgatgatggactttgacggaaagaatcgtgggtatgccttcgtgatgtattgccataaacacgaggcaaagagggcagtcagagagctcaataactatgaaatacgctag

SEQ ID NO: 201108 - DNA, 654 bp, Artificial Sequence
  derived and/or modified sequence
atgaccgccgaggacagcaccgccgccatgagcagcgacagcgccgcaggcagcagtgcaaaggttcccgagggggttgcgggggcccctaacgaagccgccctgcttgcgctgatggaacgtacgggctactcaatggtccaggagaacgggcaaaggaaatatggtggccccccccctgggtgggaaggccctcacccccaaaggggctgtgaagtgtttgtcggcaagataccacgggatgtttatgaggacgagcttgtgccagtgttcgaggcagtggggcgaatatatgaactccggctcatgatggacttcgacgggaagaatcggggctatgccttcgtaatgtactgccataaacacgaggcaaaacgggccgtccgggagctgaacaattacgagatccgccccggacggctgcttggcgtgtgctgttctgtcgacaactgtagactttttattggcgggattcccaagatgaaaaagcgggaggagatattagaggaaatcgcaaaggtgaccgagggagtgttggacgtaatcgtctacgcatccgctgccgacaagatgaaaaatagaggcttcgcctttgtggaatatgagagtcatagagccgccgccatggctaggcgcaagcttatgccgggctag

SEQ ID NO: 201109 - DNA, 1575 bp, Artificial Sequence
  derived and/or modified sequence
atgactgctgaggactccacagccgctatgagctctgacagtgctgccggatcgtctgccaaagttcctgaaggagttgcgggtgcacccaatgaggccgctctattagccctgatggaacgcactgggtactctatggttcaagagaatggccagcggaaatatgggggacctccgccaggatgggagggcccacaccctcagagggggtgcgaggttttcgtagggaagatacctcgtgacgtgtacgaagacgaattagtgccagtattcgaagctgtaggaaggatttacgaacttcgtctgatgatggatttcgacggaaagaaccgcggatacgcgtttgtaatgtattgccacaaacacgaagccaaacgagccgtcagagagctgaacaactacgagatacgaccgggtagactgctgggagtatgctgcagcgtggacaactgccggctctttatcgggggtatccccaagatgaaaaagagggaggaaatcttggaagagattgctaaggtgaccgaaggagtgcttgatgtgatcgtgtacgcctccgccgctgataagatgaagaacaggggattcgcgttcgtcgagtacgaatcccacagggctgccgctatggccagaaggaaactgatgcctggtaggatccagctctggggccatcagatcgctgtggattgggcagaacctgaaatagacgtcgacgaggatgtaatggagacagtgaagatcttgtacgtgcgtaatctgatgattgaaactacagaagatacaattaagaagtctttcggccagtttaatcccggatgcgtcgaaagagttaagaagataagggattatgctttcgtgcattttacaagccgggaggacgcggtccacgcaatgaacaacctgaatgggaccgagttggaaggttcctgtctagaggtcacacttgccaagcctgtggacaaggagcagtacagccggtaccagaaagccgcaagaggaggaggagccgcagaggctgcccagcaaccctcgtacgtgtatagctgcgacccctacaccttggcctactacggctacccttacaatgcactgatcgggccaaacagagactactttgttaaggtggcaattcccgcaattggagctcaatatagtatgtttccagccgcacccgcaccaaaaatgatagaggacggtaaaatccacactgtcgaacacatgatcagtcccattgccgtccaaccagacccagcaagtgcagctgccgctgcagcggctgcagccgcagctgcagcagccgtaatccctacggtgtcaacgccccctcccttccagggaaggccaataacccctgtctacacggtggccccaaatgttcagaggatccccaccgcgggaatctatggggctagctatgtgccttttgctgccccagcaacagccacaatagcaaccctccagaagaacgcagccgctgcagcggcaatgtacgggggatacgccggatacatcccacaggccttccccgcagctgcaatccaggtgcccattcccgatgtataccagacctattag

SEQ ID NO: 201110 - DNA, 1575 bp, Artificial Sequence
  derived and/or modified sequence
atgactgctgaggactctaccgctgccatgagtagcgactccgcagccggatccagcgcaaaggtacccgagggcgtagccggagcccctaatgaggccgcactcttggccctgatggaacgcaccggttactctatggtccaggagaacgggcaacgaaagtacggaggcccacctcccggatgggagggcccacacccacagaggggctgcgaagtgtttgtaggaaaaatccccagggacgtttatgaggacgagcttgttcctgtctttgaggcagtaggacgtatatacgaactgcggcttatgatggatttcgatggtaagaaccgcggatacgcgtttgttatgtactgccacaaacacgaggcaaagcgcgcagttagagagctgaacaattacgaaatacgtcctggccgtctgctcggcgtctgctgcagtgtggataactgccggctgttcatcggcggtatcccgaagatgaagaagagggaagagatattggaggagatagctaaggtgactgaaggtgtgttggacgttatcgtctacgcctcagctgcagacaagatgaaaaaccgcggattcgccttcgttgaatacgagagtcacagagcagccgctatggctaggaggaagctgatgccaggacgcatccagctttgggggcatcagattgctgtcgactgggccgagcctgagattgacgtggacgaggatgtgatggaaactgttaaaattttgtacgtcaggaatctgatgattgaaaccactgaggatacaatcaaaaagtcttttggacaatttaaccccggatgtgtggagcgggtaaagaaaattcgcgattatgcattcgtccattttactagcagagaagacgccgtgcacgccatgaataacctcaacggtacagagctggagggaagttgcctcgaggtcaccctcgccaagcctgtagacaaagagcagtattcaaggtatcagaaggcggctcgagggggaggagcagccgaggccgctcagcagccatcctacgtctacagctgtgacccgtataccctggcttactatgggtacccatacaacgctctgattggacccaacagagattattttgtgaaggtcgccattcctgctatcggtgcccaatactctatgtttccagccgcacccgcacccaaaatgatagaggacgggaagatccacaccgtggagcatatgatatcaccgatagcagtccaacctgatcccgcatccgccgcagctgccgcagccgcagccgcagcagcggctgctgccgtaattcctacagtcagcaccccaccccctttccaagggaggccaattaccccagtgtacaccgtggctcccaatgtgcagagaatacctactgcaggaatttacggggcttcttacgtcccttttgctgccccagcgacagctacaatagctacactccagaaaaatgccgctgcagccgctgccatgtatggcggatatgccggatacatcccccaagccttccccgctgcagccattcaggtacctattccagacgtgtatcagacatactag

SEQ ID NO: 201111 - DNA, 180 bp, Artificial Sequence
  derived and/or modified sequence
atgaccgctgaagattcgaccgccgctatgtcttccgacagcgccgcaggaagttccgccaaggtccccgagggggtggccggagcccctaatgaggccgcactgctcgcactaatggagagaactgggtacagcatggtacaggaaaacggccagagaaaatacgggggtccaccctag

SEQ ID NO: 201112 - DNA, 480 bp, Artificial Sequence
  derived and/or modified sequence
atgacggccgaagatagcactgccgcaatgagctctgatagtgccgctggatcctcggccaaagtgccagagggagttgctggagcgccaaatgaggctgcactgctggcactgatggaaaggactggctattctatggtgcaggagaacgggcagcggaagtacgggggtcctccacctgggtgggagggcccacacccccaacggggatgcgaagtatttgttgggaaaatcccccgtgatgtgtacgaagacgaactcgtgcccgtattcgaggccgtgggtcgcatatacgagcttcgtttgatgatggacttcgacggaaagaaccgaggctacgcttttgttatgtactgtcataaacacgaagctaagagagccgtgagagagctgaataactatgagataaggccagggagactcctgggtgtttgctgctccgtggacaactgcaggctgtttattggtgggatcccctag

SEQ ID NO: 201113 - DNA, 375 bp, Artificial Sequence
  derived and/or modified sequence
atgacagctgaggatagcaccgccgctatgagctctgactccgccgcagggagcagtgccaaggtgcccgagggcgtcgccggagcccctaatgaagctgccttgctcgcactaatggagaggaccggctattccatggtgcaggagaacgggcagcgcaagtacggcggaccacctccaggatgggaaggcccacacccacagagaggctgcgaagtctttgtgggaaagatccccagggatgtttacgaggatgaactcgttcccgtgttcgaggctgttggtagaatctacgagctcagactgatgatggactttgacggcaaaaaccgtggctacgcattcgtgatgtattgccataaacatgaggcctag

SEQ ID NO: 201114 - DNA, 345 bp, Artificial Sequence
  derived and/or modified sequence
atgacggcggaggattctaccgcagccatgagcagcgatagtgctgctggatcttccgcaaaggtgccagagggtgtcgccggagcccctaatgaagcggcactgctcgctctgatggaaaggacaggatactctatggtacaggagaacggccagcgcaagtatggtggacccccacctggatgggaagggccacacccacagaggggatgtgaagtcttcgtgggcaagatccctagggatgtctatgaagatgagctcgtgccagtgttcgaggccgtcgggagaatttacgaattgagactcatgatggacttcgatggaaagaatcgcggatatgcctag

SEQ ID NO: 201115 - DNA, 180 bp, Artificial Sequence
  derived and/or modified sequence
atgacggctgaggattcaaccgcagccatgtcatcagattccgcagctggttccagcgctaaggtccctgaaggagtagccggtgctcctaatgaagccgcacttctggccctgatggaacggaccggatactccatggtgcaagagaatgggcaaaggaagtacgggggacctccttag

SEQ ID NO: 201116 - DNA, 582 bp, Artificial Sequence
  derived and/or modified sequence
atgacagcagaggactctacagcagccatgtcaagcgactcagcagcgggaagtagcgcaaaggtgccagaaggcgtggccggtgctcccaatgaagcggctctcttggcactgatggaaaggacgggatactccatggttcaggagaacggtcagcggaagtacggaggcccaccacccggatgggagggtccgcatccacagaggggctgcgaagtgtttgtagggaaaatcccaagagatgtttacgaagacgaattggtgcccgttttcgaagccgtgggccgtatttacgaactccgcctgatgatggactttgacgggaaaaatcgcggttatgcttttgtaatgtactgtcacaagcacgaggcaaagagggctgtgcgtgagttgaacaattacgagatccgccctggcaggctgttgggcgtgtgctgttctgtagataactgcaggctgttcattgggggtataccgaagatgaaaaagcgggaggagattctcgaagagatcgccaaagtcacagagggggttctggatgtgattgtgtatgcttctgctgccgacaagatgaagaactag

SEQ ID NO: 201117 - DNA, 414 bp, Artificial Sequence
  derived and/or modified sequence
atgacagctgaggacagtacagctgctatgagtagcgattctgccgcagggagctccgcaaaagtgccagagggcgtggctggggctcctaacgaagccgctttgctggcattaatggaaagaacggggtactcaatggttcaggaaaacggccagcggaagtatggaggaccgcctcctgggtgggaggggcctcacccccaaagaggatgcgaggtgttcgtcggaaagataccccgagacgtttacgaagatgagttagtgcctgtgtttgaggcagttggcagaatttacgagctgaggctcatgatggattttgatggcaaaaaccgtggatatgcatttgttatgtactgccacaaacacgaagccaaaagagccgttagagaactcaacaactatgagattcgttag

SEQ ID NO: 201118 - DNA, 654 bp, Artificial Sequence
  derived and/or modified sequence
atgacagccgaggactctaccgccgcaatgagctccgactcagctgccggatcgtcagcaaaggtcccggaaggtgtggctggagcgcctaatgaggccgcattgctggcactcatggaacgcaccggctatagcatggtacaagaaaatggccaacgcaaatatgggggtcctcccccaggctgggaggggcctcatccccagagaggatgtgaggttttcgttgggaaaatccccagggacgtatatgaggacgagcttgtgcctgtattcgaagcggtgggtcggatatacgaacttcgattaatgatggatttcgatggaaagaacagagggtatgcattcgtcatgtactgtcacaagcatgaagctaagcgcgctgtccgcgaactgaataattacgagatccgccctggtcgacttctaggggtttgttgtagcgtagataattgcaggctttttataggtggaatccctaagatgaagaaacgggaagagattctggaagagatagccaaggtaactgaaggcgtactcgatgtaatcgtttatgccagcgccgcagacaagatgaaaaaccgcggtttcgcctttgtggagtacgaatcccaccgcgctgctgcaatggctcgaagaaaattgatgcccggttag

SEQ ID NO: 201119 - DNA, 1575 bp, Artificial Sequence
  derived and/or modified sequence
atgaccgccgaggacagcaccgccgccatgagcagcgacagcgccgccggcagcagcgccaaggtgcccgagggcgtggccggcgcccccaacgaggccgccctgctggccctgatggagagaaccggctacagcatggtgcaggagaacggccagagaaagtacggcggccccccccccggctgggagggcccccacccccagagaggctgcgaggtgttcgtgggcaagatccccagagacgtgtacgaggacgagctggtgcccgtgttcgaggccgtgggcagaatctacgagctgagactgatgatggacttcgacggcaagaacagaggctacgccttcgtgatgtactgccacaagcacgaggccaagagagccgtgagagagctgaacaactacgagatcagacccggcagactgctgggcgtgtgctgcagcgtggacaactgcagactgttcatcggcggcatccccaagatgaagaagagagaggagatcctggaggagatcgccaaggtgaccgagggcgtgctggacgtgatcgtgtacgccagcgccgccgacaagatgaagaacagaggcttcgccttcgtggagtacgagagccacagagccgccgccatggccagaagaaagctgatgcccggcagaatccagctgtggggccaccagatcgccgtggactgggccgagcccgagatcgacgtggacgaggacgtgatggagaccgtgaagatcctgtacgtgagaaacctgatgatcgagaccaccgaggacaccatcaagaagagcttcggccagttcaaccccggctgcgtggagagagtgaagaagatcagagactacgccttcgtgcacttcaccagcagagaggacgccgtgcacgccatgaacaacctgaacggcaccgagctggagggcagctgcctggaggtgaccctggccaagcccgtggacaaggagcagtacagcagataccagaaggccgccagaggcggcggcgccgccgaggccgcccagcagcccagctacgtgtacagctgcgacccctacaccctggcctactacggctacccctacaacgccctgatcggccccaacagagactacttcgtgaaggtggccatccccgccatcggcgcccagtacagcatgttccccgccgcccccgcccccaagatgatcgaggacggcaagatccacaccgtggagcacatgatcagccccatcgccgtgcagcccgaccccgccagcgccgccgccgccgccgccgccgccgccgccgccgccgccgccgtgatccccaccgtgagcacccccccccccttccagggcagacccatcacccccgtgtacaccgtggcccccaacgtgcagagaatccccaccgccggcatctacggcgccagctacgtgcccttcgccgcccccgccaccgccaccatcgccaccctgcagaagaacgccgccgccgccgccgccatgtacggcggctacgccggctacatcccccaggccttccccgccgccgccatccaggtgcccatccccgacgtgtaccagacctactag

SEQ ID NO: 201120 - DNA, 180 bp, Artificial Sequence
  derived and/or modified sequence
atgaccgccgaggacagcaccgccgccatgagcagcgacagcgccgccggcagcagcgccaaggtgcccgagggcgtggccggcgcccccaacgaggccgccctgctggccctgatggagagaaccggctacagcatggtgcaggagaacggccagagaaagtacggcggccccccctag

SEQ ID NO: 201121 - DNA, 480 bp, Artificial Sequence
  derived and/or modified sequence
atgaccgccgaggacagcaccgccgccatgagcagcgacagcgccgccggcagcagcgccaaggtgcccgagggcgtggccggcgcccccaacgaggccgccctgctggccctgatggagagaaccggctacagcatggtgcaggagaacggccagagaaagtacggcggccccccccccggctgggagggcccccacccccagagaggctgcgaggtgttcgtgggcaagatccccagagacgtgtacgaggacgagctggtgcccgtgttcgaggccgtgggcagaatctacgagctgagactgatgatggacttcgacggcaagaacagaggctacgccttcgtgatgtactgccacaagcacgaggccaagagagccgtgagagagctgaacaactacgagatcagacccggcagactgctgggcgtgtgctgcagcgtggacaactgcagactgttcatcggcggcatcccctag

SEQ ID NO: 201122 - DNA, 375 bp, Artificial Sequence
  derived and/or modified sequence
atgaccgccgaggacagcaccgccgccatgagcagcgacagcgccgccggcagcagcgccaaggtgcccgagggcgtggccggcgcccccaacgaggccgccctgctggccctgatggagagaaccggctacagcatggtgcaggagaacggccagagaaagtacggcggccccccccccggctgggagggcccccacccccagagaggctgcgaggtgttcgtgggcaagatccccagagacgtgtacgaggacgagctggtgcccgtgttcgaggccgtgggcagaatctacgagctgagactgatgatggacttcgacggcaagaacagaggctacgccttcgtgatgtactgccacaagcacgaggcctag

SEQ ID NO: 201123 - DNA, 345 bp, Artificial Sequence
  derived and/or modified sequence
atgaccgccgaggacagcaccgccgccatgagcagcgacagcgccgccggcagcagcgccaaggtgcccgagggcgtggccggcgcccccaacgaggccgccctgctggccctgatggagagaaccggctacagcatggtgcaggagaacggccagagaaagtacggcggccccccccccggctgggagggcccccacccccagagaggctgcgaggtgttcgtgggcaagatccccagagacgtgtacgaggacgagctggtgcccgtgttcgaggccgtgggcagaatctacgagctgagactgatgatggacttcgacggcaagaacagaggctacgcctag

SEQ ID NO: 201124 - DNA, 582 bp, Artificial Sequence
  derived and/or modified sequence
atgaccgccgaggacagcaccgccgccatgagcagcgacagcgccgccggcagcagcgccaaggtgcccgagggcgtggccggcgcccccaacgaggccgccctgctggccctgatggagagaaccggctacagcatggtgcaggagaacggccagagaaagtacggcggccccccccccggctgggagggcccccacccccagagaggctgcgaggtgttcgtgggcaagatccccagagacgtgtacgaggacgagctggtgcccgtgttcgaggccgtgggcagaatctacgagctgagactgatgatggacttcgacggcaagaacagaggctacgccttcgtgatgtactgccacaagcacgaggccaagagagccgtgagagagctgaacaactacgagatcagacccggcagactgctgggcgtgtgctgcagcgtggacaactgcagactgttcatcggcggcatccccaagatgaagaagagagaggagatcctggaggagatcgccaaggtgaccgagggcgtgctggacgtgatcgtgtacgccagcgccgccgacaagatgaagaactag

SEQ ID NO: 201125 - DNA, 414 bp, Artificial Sequence
  derived and/or modified sequence
atgaccgccgaggacagcaccgccgccatgagcagcgacagcgccgccggcagcagcgccaaggtgcccgagggcgtggccggcgcccccaacgaggccgccctgctggccctgatggagagaaccggctacagcatggtgcaggagaacggccagagaaagtacggcggccccccccccggctgggagggcccccacccccagagaggctgcgaggtgttcgtgggcaagatccccagagacgtgtacgaggacgagctggtgcccgtgttcgaggccgtgggcagaatctacgagctgagactgatgatggacttcgacggcaagaacagaggctacgccttcgtgatgtactgccacaagcacgaggccaagagagccgtgagagagctgaacaactacgagatcagatag

SEQ ID NO: 201126 - DNA, 654 bp, Artificial Sequence
  derived and/or modified sequence
atgaccgccgaggacagcaccgccgccatgagcagcgacagcgccgccggcagcagcgccaaggtgcccgagggcgtggccggcgcccccaacgaggccgccctgctggccctgatggagagaaccggctacagcatggtgcaggagaacggccagagaaagtacggcggccccccccccggctgggagggcccccacccccagagaggctgcgaggtgttcgtgggcaagatccccagagacgtgtacgaggacgagctggtgcccgtgttcgaggccgtgggcagaatctacgagctgagactgatgatggacttcgacggcaagaacagaggctacgccttcgtgatgtactgccacaagcacgaggccaagagagccgtgagagagctgaacaactacgagatcagacccggcagactgctgggcgtgtgctgcagcgtggacaactgcagactgttcatcggcggcatccccaagatgaagaagagagaggagatcctggaggagatcgccaaggtgaccgagggcgtgctggacgtgatcgtgtacgccagcgccgccgacaagatgaagaacagaggcttcgccttcgtggagtacgagagccacagagccgccgccatggccagaagaaagctgatgcccggctag

SEQ ID NO: 201127 - protein, 622 aa, Artificial Sequence
  derived and/or modified sequence
MEGPGLGSQCRNHSHGPHPPGFGRYGICAHENKELANAREALPLIEDSSNCDIVKATQYGIFERCKELVEAGYDVRQPDKENVSLLHWAAINNRLDLVKFYISKGAVVDQLGGDLNSTPLHWAIRQGHLPMVILLLQHGADPTLIDGEGFSSIHLAVLFQHMPIIAYLISKGQSVNMTDVNGQTPLMLSAHKVIGPEPTGFLLKFNPSLNVVDKIHQNTPLHWAVAAGNVNAVDKLLEAGSSLDIQNVKGETPLDMALQNKNQLIIHMLKTEAKMRANQKFRLWRWLQKCELFLLLMLSVITMWAIGYILDFNSDSWLLKGCLLVTLFFLTSLFPRFLVGYKNLVYLPTAFLLSSVFWIFMTWFILFFPDLAGAPFYFSFIFSIVAFLYFFYKTWATDPGFTKASEEEKKVNIITLAETGSLDFRTFCTSCLIRKPLRSLHCHVCNCCVARYDQHCLWTGRCIGFGNHHYYIFFLFFLSMVCGWIIYGSFIYLSSHCATTFKEDGLWTYLNQIVACSPWVLYILMLATFHFSWSTFLLLNQLFQIAFLGLTSHERISLQKQSKHMKQTLSLRKTPYNLGFMQNLADFFQCGCFGLVKPCVVDWTSQYTMVFHPAREKVLRSV

SEQ ID NO: 201128 - DNA, 1479 bp, Artificial Sequence
  derived and/or modified sequence
atggtgatcctgctgctgcagcacggcgccgaccccaccctgatcgacggcgagggcttcagcagcatccacctggccgtgctgttccagcacatgcccatcatcgcctacctgatcagcaagggccagagcgtgaacatgaccgacgtgaacggccagacccccctgatgctgagcgcccacaaggtgatcggccccgagcccaccggcttcctgctgaagttcaaccccagcctgaacgtggtggacaagatccaccagaacacccccctgcactgggccgtggccgccggcaacgtgaacgccgtggacaagctgctggaggccggcagcagcctggacatccagaacgtgaagggcgagacccccctggacatggccctgcagaacaagaaccagctgatcatccacatgctgaagaccgaggccaagatgagagccaaccagaagttcagactgtggagatggctgcagaagtgcgagctgttcctgctgctgatgctgagcgtgatcaccatgtgggccatcggctacatcctggacttcaacagcgacagctggctgctgaagggctgcctgctggtgaccctgttcttcctgaccagcctgttccccagattcctggtgggctacaagaacctggtgtacctgcccaccgccttcctgctgagcagcgtgttctggatcttcatgacctggttcatcctgttcttccccgacctggccggcgcccccttctacttcagcttcatcttcagcatcgtggccttcctgtacttcttctacaagacctgggccaccgaccccggcttcaccaaggccagcgaggaggagaagaaggtgaacatcatcaccctggccgagaccggcagcctggacttcagaaccttctgcaccagctgcctgatcagaaagcccctgagaagcctgcactgccacgtgtgcaactgctgcgtggccagatacgaccagcactgcctgtggaccggcagatgcatcggcttcggcaaccaccactactacatcttcttcctgttcttcctgagcatggtgtgcggctggatcatctacggcagcttcatctacctgagcagccactgcgccaccaccttcaaggaggacggcctgtggacctacctgaaccagatcgtggcctgcagcccctgggtgctgtacatcctgatgctggccaccttccacttcagctggagcaccttcctgctgctgaaccagctgttccagatcgccttcctgggcctgaccagccacgagagaatcagcctgcagaagcagagcaagcacatgaagcagaccctgagcctgagaaagaccccctacaacctgggcttcatgcagaacctggccgacttcttccagtgcggctgcttcggcctggtgaagccctgcgtggtggactggaccagccagtacaccatggtgttccaccccgccagagagaaggtgctgagaagcgtgtag

SEQ ID NO: 201129 - DNA, 1869 bp, Artificial Sequence
  derived and/or modified sequence
atggagggccccggcctgggcagccagtgcagaaaccacagccacggcccccacccccccggcttcggcagatacggcatctgcgcccacgagaacaaggagctggccaacgccagagaggccctgcccctgatcgaggacagcagcaactgcgacatcgtgaaggccacccagtacggcatcttcgagagatgcaaggagctggtggaggccggctacgacgtgagacagcccgacaaggagaacgtgagcctgctgcactgggccgccatcaacaacagactggacctggtgaagttctacatcagcaagggcgccgtggtggaccagctgggcggcgacctgaacagcacccccctgcactgggccatcagacagggccacctgcccatggtgatcctgctgctgcagcacggcgccgaccccaccctgatcgacggcgagggcttcagcagcatccacctggccgtgctgttccagcacatgcccatcatcgcctacctgatcagcaagggccagagcgtgaacatgaccgacgtgaacggccagacccccctgatgctgagcgcccacaaggtgatcggccccgagcccaccggcttcctgctgaagttcaaccccagcctgaacgtggtggacaagatccaccagaacacccccctgcactgggccgtggccgccggcaacgtgaacgccgtggacaagctgctggaggccggcagcagcctggacatccagaacgtgaagggcgagacccccctggacatggccctgcagaacaagaaccagctgatcatccacatgctgaagaccgaggccaagatgagagccaaccagaagttcagactgtggagatggctgcagaagtgcgagctgttcctgctgctgatgctgagcgtgatcaccatgtgggccatcggctacatcctggacttcaacagcgacagctggctgctgaagggctgcctgctggtgaccctgttcttcctgaccagcctgttccccagattcctggtgggctacaagaacctggtgtacctgcccaccgccttcctgctgagcagcgtgttctggatcttcatgacctggttcatcctgttcttccccgacctggccggcgcccccttctacttcagcttcatcttcagcatcgtggccttcctgtacttcttctacaagacctgggccaccgaccccggcttcaccaaggccagcgaggaggagaagaaggtgaacatcatcaccctggccgagaccggcagcctggacttcagaaccttctgcaccagctgcctgatcagaaagcccctgagaagcctgcactgccacgtgtgcaactgctgcgtggccagatacgaccagcactgcctgtggaccggcagatgcatcggcttcggcaaccaccactactacatcttcttcctgttcttcctgagcatggtgtgcggctggatcatctacggcagcttcatctacctgagcagccactgcgccaccaccttcaaggaggacggcctgtggacctacctgaaccagatcgtggcctgcagcccctgggtgctgtacatcctgatgctggccaccttccacttcagctggagcaccttcctgctgctgaaccagctgttccagatcgccttcctgggcctgaccagccacgagagaatcagcctgcagaagcagagcaagcacatgaagcagaccctgagcctgagaaagaccccctacaacctgggcttcatgcagaacctggccgacttcttccagtgcggctgcttcggcctggtgaagccctgcgtggtggactggaccagccagtacaccatggtgttccaccccgccagagagaaggtgctgagaagcgtgtag

SEQ ID NO: 201130 - DNA, 1479 bp, Artificial Sequence
  derived and/or modified sequence
atggtaattctgctgttgcagcacggggcagaccccaccctgattgacggagaaggtttctcctccatacatcttgcggtgctctttcagcatatgcccattatcgcctacctgatcagcaagggccagtccgttaatatgacagacgtaaatgggcaaacacctctgatgctgagtgcacacaaagtaatcgggccagaacccactggctttttacttaaattcaatccatcactgaatgtagtggataagatccaccaaaacacgccacttcactgggctgtggcggctggaaacgttaacgctgttgataaactcttggaggcagggagttctctggatatacaaaatgtgaagggcgagacaccgctggacatggccttgcagaataaaaaccagctgataatccatatgctcaagaccgaagccaaaatgcgggctaaccagaaatttcgcctgtggaggtggttgcagaaatgcgaactttttttgctgttgatgctgtcagtgatcacaatgtgggcgatcggctacatactggacttcaattcggattcgtggcttctaaagggatgtctgttggttacgctgttcttcttgacatccctgttcccgaggtttctggtgggttacaagaatctggtgtatctcccaactgccttcttgcttagctccgtgttctggatctttatgacgtggtttattttgttttttccagatctggccggagctccgttctacttcagcttcatctttagcatcgtggcattcctgtactttttttacaagacctgggccacagatccagggtttaccaaggccagcgaggaggagaaaaaggtcaatatcataaccctcgcagaaaccggctctctggacttccggaccttttgcacatcatgtctcatccggaagccactcagatcgctacactgtcacgtttgcaattgttgtgtggctagatacgaccagcattgcttgtggactggacggtgcattggtttcgggaatcatcactattatatattctttctgttttttctgagcatggtctgtggatggattatttatgggtcctttatctaccttagctcgcattgtgccacaacctttaaggaagacggactatggacgtatctgaaccagatcgtagcatgttctccatgggtgttgtacattctgatgctggcaactttccatttcagctggagcacctttctgctgttgaaccagctgttccaaatcgcatttctgggactgacctcacatgagagaattagcttgcaaaagcagagcaagcatatgaaacagaccctcagcctccggaaaaccccatacaatctcggcttcatgcagaacctggccgacttcttccagtgtgggtgcttcggcctcgtgaagccatgcgtcgtggattggacgtctcagtacacaatggtttttcatccagctcgtgagaaagtgttgaggtccgtgtag

SEQ ID NO: 201131 - DNA, 1869 bp, Artificial Sequence
  derived and/or modified sequence
atggagggaccgggcttggggtctcagtgtagaaatcactcacacgggccccaccctcccggctttgggcgctacggtatttgcgcacatgagaacaaagaacttgccaacgctagggaagcacttccactgatcgaggattcgtccaattgcgatatcgtcaaggccacccagtacgggatattcgagcggtgcaaggaactagttgaagccggctacgacgtcagacaacctgataaagaaaacgtgagtctgctgcactgggccgctatcaacaatcggttggacttggtcaagttctacatctctaagggcgcagttgtggaccaactgggaggcgacctgaatagcacgcctctgcactgggcaattcggcaagggcacttaccaatggtaatcctgttgcttcagcatggcgcggaccctaccctgatagatggggaaggcttctcttctattcacctagctgtcttgtttcaacatatgccaatcatagcttacttgatctccaagggccagtccgtgaacatgacagacgtgaacgggcaaacgccgcttatgttgtccgcacacaaggtgattgggccagagcctactgggttcttgctgaagtttaacccaagtctgaatgttgtggacaagattcaccaaaatacacccctgcattgggctgtagctgccggcaacgtcaacgctgtggacaaattgcttgaggctggttcatcgctcgacattcagaacgttaaaggtgagaccccacttgacatggcactacagaacaaaaatcaattgattattcacatgctaaagaccgaggccaaaatgagggccaatcagaaatttaggctgtggcggtggttgcagaagtgcgaactgttcctccttttgatgctctccgtgatcaccatgtgggcgattggttatatcctagacttcaacagtgattcctggctgctgaaaggctgtctgcttgtaaccctgttctttctgacatcattgtttcccagatttttagtgggttacaagaacttggtctacctccccacagccttcctcttatcgagtgtgttctggatctttatgacatggttcatcctgttctttccagacctcgccggggctccattttacttctcttttatcttttcgattgttgcatttctctatttcttctataagacctgggccacggatccaggattcaccaaagcatccgaggaagaaaaaaaagtgaatataatcaccctggccgagacagggagtttggacttccgcaccttttgcactagctgtcttattagaaagcctttgcgatccctgcactgccacgtctgcaactgttgtgtagcccgatacgaccagcactgcctatggacaggtcggtgcatcggatttggcaaccaccactattacattttcttcctgtttttcttgagcatggtctgcggctggattatctacggaagcttcatctacctgagcagccattgtgcaaccacattcaaggaggacggcctttggacctatctaaatcagattgtcgcttgtagtccatgggtgctttacattctgatgctggccacttttcatttttcatggagcacgttcttgttgctgaatcagctgtttcagatcgcattcctgggactcacctcacacgagcggatctcccttcagaaacaaagcaagcacatgaagcagacactgtccctgcggaagaccccttataacctcggctttatgcagaacctggcggatttcttccagtgcggttgcttcgggcttgttaaaccttgtgtggttgactggacatcacaatatactatggtctttcacccagctagagagaaggtgcttcgaagcgtatag

SEQ ID NO: 201132 - DNA, 1479 bp, Artificial Sequence
  derived and/or modified sequence
atggtgatcctgctgctgcagcacggggctgaccccaccctgattgatggagagggcttcagcagcatccacctggccgtgctcttccagcacatgcccatcatcgcctacctgatcagcaagggccagagcgtgaacatgacagatgtgaatggccagacccccctgatgctgagcgcccacaaggtgattggccctgagcccaccggcttcctgctgaagttcaaccccagcctgaatgtggtggacaagatccaccagaacacccccctgcactgggccgtggccgctggaaatgtgaatgctgtggacaagctgctggaggccggcagcagcctggacatccagaatgtgaagggggagacccccctggacatggccctgcagaacaagaaccagctgatcatccacatgctgaagacagaggccaagatgagggccaaccagaagttccggctgtggcgctggctgcagaagtgtgagctgttcctgctgctgatgctgagcgtcatcaccatgtgggccatcggctacatcctggacttcaacagcgacagctggctgctgaagggctgcctgctggtgaccctcttcttcctgaccagcctcttcccccgcttcctggtgggctacaagaacctggtgtacctgcccacagccttcctgctgagctctgtgttctggatcttcatgacctggttcatcctcttcttcccagacctggccggggcccccttctacttctccttcatcttcagcatcgtggccttcctgtacttcttctacaagacctgggccacagatcctggcttcaccaaggccagcgaggaggagaagaaggtgaacatcatcaccctggccgagaccggcagcctggacttccgcaccttctgcaccagctgcctgatcaggaagcccctgcggagcctgcactgccacgtgtgcaactgctgcgtggcccgctatgaccagcactgcctgtggacaggccgctgcattggatttggaaaccaccactactacatcttcttcctgttcttcctgtccatggtgtgtggctggatcatctacggcagcttcatctacctgagcagccactgtgccaccaccttcaaggaggatggcctgtggacctacctgaaccagatcgtggcctgcagcccctgggtgctgtacatcctgatgctggccaccttccacttctcctggagcaccttcctgctgctgaaccagctgttccagatcgccttcctgggcctgaccagccatgagcgcatcagcctgcagaagcagagcaagcacatgaagcagaccctgagcctgaggaagaccccctacaacctgggcttcatgcagaacctggccgacttcttccagtgtggctgcttcggcctggtgaagccctgtgtggtggactggaccagccagtacaccatggtgttccacccagcccgggagaaggtgctgcggtctgtgtag

SEQ ID NO: 201133 - DNA, 1869 bp, Artificial Sequence
  derived and/or modified sequence
atggagggccctggcctgggcagccagtgcaggaaccacagccacggcccccaccccccaggcttcggccgctatggcatctgtgcccacgagaacaaggagctggccaatgcccgggaggccctgcccctgattgaggacagcagcaactgtgacatcgtgaaggccacccagtatggcatctttgagcgctgcaaggagctggtggaggccggctatgatgtgcggcagcctgacaaggaaaatgtgtccctgctgcactgggccgccatcaacaaccggctggacctggtgaagttctacatcagcaaaggagctgtggtggaccagctgggcggggacctgaacagcacccccctgcactgggccatccggcagggccacctgcccatggtgatcctgctgctgcagcacggggctgaccccaccctgattgatggagagggcttcagcagcatccacctggccgtgctcttccagcacatgcccatcatcgcctacctgatcagcaagggccagagcgtgaacatgacagatgtgaatggccagacccccctgatgctgagcgcccacaaggtgattggccctgagcccaccggcttcctgctgaagttcaaccccagcctgaatgtggtggacaagatccaccagaacacccccctgcactgggccgtggccgctggaaatgtgaatgctgtggacaagctgctggaggccggcagcagcctggacatccagaatgtgaagggggagacccccctggacatggccctgcagaacaagaaccagctgatcatccacatgctgaagacagaggccaagatgagggccaaccagaagttccggctgtggcgctggctgcagaagtgtgagctgttcctgctgctgatgctgagcgtcatcaccatgtgggccatcggctacatcctggacttcaacagcgacagctggctgctgaagggctgcctgctggtgaccctcttcttcctgaccagcctcttcccccgcttcctggtgggctacaagaacctggtgtacctgcccacagccttcctgctgagctctgtgttctggatcttcatgacctggttcatcctcttcttcccagacctggccggggcccccttctacttctccttcatcttcagcatcgtggccttcctgtacttcttctacaagacctgggccacagatcctggcttcaccaaggccagcgaggaggagaagaaggtgaacatcatcaccctggccgagaccggcagcctggacttccgcaccttctgcaccagctgcctgatcaggaagcccctgcggagcctgcactgccacgtgtgcaactgctgcgtggcccgctatgaccagcactgcctgtggacaggccgctgcattggatttggaaaccaccactactacatcttcttcctgttcttcctgtccatggtgtgtggctggatcatctacggcagcttcatctacctgagcagccactgtgccaccaccttcaaggaggatggcctgtggacctacctgaaccagatcgtggcctgcagcccctgggtgctgtacatcctgatgctggccaccttccacttctcctggagcaccttcctgctgctgaaccagctgttccagatcgccttcctgggcctgaccagccatgagcgcatcagcctgcagaagcagagcaagcacatgaagcagaccctgagcctgaggaagaccccctacaacctgggcttcatgcagaacctggccgacttcttccagtgtggctgcttcggcctggtgaagccctgtgtggtggactggaccagccagtacaccatggtgttccacccagcccgggagaaggtgctgcggtctgtgtag

SEQ ID NO: 201134 - DNA, 1479 bp, Artificial Sequence
  derived and/or modified sequence
atggtgatcctgctgctgcagcacggcgccgaccccaccctgatcgatggtgaaggattctccagcatccatcttgccgtacttttccaacatatgcctattatcgcttacctcattagcaaagggcagtcagtgaacatgactgatgtaaatggacaaactccactgatgctcagtgctcacaaggtgatcggccccgagcccacgggattcctccttaagtttaacccctcactgaacgtagtagacaagattcatcaaaacacccccctgcattgggcagttgcagcaggcaatgtcaatgcggtcgacaaactgttggaagcagggagcagtctggacatccaaaatgtaaagggcgaaacgcctttagacatggctctgcaaaataaaaatcagcttatcatacacatgctgaaaacggaggctaagatgcgggctaatcagaaatttagattatggagatggctgcaaaaatgcgagctgtttctcctgctgatgttgagcgtgatcacaatgtgggcaataggctacatactagatttcaactctgatagctggcttttaaaggggtgtctcctcgtcaccctgttcttccttacatctctatttcccaggttccttgtgggctacaagaacctggtatatctccccaccgctttcctgttaagcagcgtgttttggatatttatgacctggttcattctgttcttcccggatctggcaggcgctccgttctacttctcatttatatttagcatcgtagccttcctgtattttttctacaagacatgggccacagaccccggtttcactaaggcgagtgaagaagagaaaaaagtcaacatcattacgctagcggaaaccggctctctggacttccggaccttctgtacctcctgcttgatacgtaaaccactgaggtccctgcattgccacgtctgcaactgctgtgtcgctaggtatgaccagcattgcctctggacaggcaggtgcataggtttcggtaatcatcactattacatttttttccttttttttctatcaatggtttgcggctggattatttatggaagtttcatctacctgtccagccattgcgcaactacctttaaggaagatggactgtggacttacttgaatcagattgttgcttgtagcccctgggtgctctatatactgatgctggccactttccatttctcctggagtacatttctcctactcaatcagctattccaaatcgctttcctgggattaacttcacacgaacgaattagtctgcagaagcagtctaaacacatgaaacagacgctctctctccggaagaccccatataatctgggtttcatgcagaatctggcggactttttccagtgtggatgcttcggactcgtcaagccttgtgtggtggactggaccagccagtacacaatggttttccaccctgcccgggaaaaagtcttgaggtcagtatag

SEQ ID NO: 201135 - DNA, 1869 bp, Artificial Sequence
  derived and/or modified sequence
atggagggccccggcctgggcagccagtgccggaaccacagccacggcccacatccgcctggctttgggcggtacgggatttgtgcacatgaaaataaggagttagccaacgcaagggaagctctaccactcattgaagattcatcgaactgcgacattgtgaaggccacacagtacgggattttcgaaagatgcaaagaactggtcgaggctggctacgacgtgcggcaacccgataaagagaacgtaagcctgctgcactgggcagccattaataatagactggacctcgtgaagttctacatctccaaaggcgcagtggtggaccagctcggaggggatctgaattctacacccctgcactgggccattcgtcaggggcatctaccaatggtgattttgctattacagcatggggccgaccctactctgattgacggtgaaggcttcagctcaatccacttagcagtgctgttccagcacatgcccattatcgcctaccttatcagtaagggccagtcggttaacatgactgatgtgaatggccagacgccacttatgctgagtgcacataaggtgattggaccggagcctactggttttctgctgaagtttaatccttccctcaacgtggttgataaaattcaccaaaacacccctctgcactgggctgttgcagccggcaatgtgaatgccgtggataaactgctggaggctgggtcctctttggacattcaaaatgtgaagggcgagacccctctggatatggcccttcagaataaaaatcagcttatcatccatatgctgaaaacagaggcaaagatgagagctaaccagaagttccgcctgtggcgttggctgcaaaagtgtgaattgttcctattgctgatgctgtccgtaatcaccatgtgggccattggatatatccttgacttcaacagtgactcctggttgctgaaaggatgcctcctcgtgaccctgttctttctcacatcattatttccccggttcctggtgggctacaagaacttagtgtacctgccgactgcattcctcctctcatcagtcttttggatcttcatgacttggttcattctgtttttcccggacctcgctggtgcacctttctactttagtttcatcttcagcatagtcgccttcctgtatttcttttataagacctgggcaacggatccaggattcactaaggcatcggaggaggaaaaaaaggtaaacatcatcaccctggccgagacaggtagcctggactttcgcaccttttgtacaagctgcttaatacgtaagccattgagatctctccactgtcatgtgtgtaactgctgcgttgcccgatacgatcagcactgcctgtggacaggcaggtgtataggtttcggaaaccaccactattatattttcttcttgttcttcctgtctatggtctgcggctggattatatacggctcctttatctacttgtcttcccactgtgctaccacctttaaagaggacggcctctggacttacctgaaccagattgtcgcctgttcaccgtgggtgctgtacatattaatgctggcaacattccactttagttggtctacattcctcctgctgaatcagctgttccagatagcctttctcggcttgactagccacgagagaattagtttgcaaaaacaaagcaaacacatgaaacagacactctcactccgcaagaccccgtacaaccttgggttcatgcagaatctggctgatttttttcagtgcgggtgttttggactggtgaaaccctgcgtggtggattggacaagccaatatacaatggtctttcaccctgccagagaaaaggtgcttcgcagcgtttag

SEQ ID NO: 201136 - DNA, 1479 bp, Artificial Sequence
  derived and/or modified sequence
atggttattcttttgctgcagcatggtgccgatccaaccttgatcgatggcgaaggcttcagcagcattcacttagctgtgctgttccagcacatgcctatcattgcctacctgatttctaaaggccagtcagtgaacatgaccgatgtgaacggacaaaccccactgatgttgagtgcacacaaagtgattggccctgagcctacaggctttttactgaaattcaacccaagtctcaatgtggtagacaaaatacatcagaatacccccctgcactgggcagtcgccgcaggaaacgtgaacgccgtggacaagctcctggaggccggatctagtctcgatattcagaatgtgaaaggcgagactcccctcgatatggcacttcagaataagaaccagttaataatacatatgctgaaaacggaggcaaagatgcgcgcaaaccagaaatttagattatggagatggctccaaaagtgcgagctgtttctcctgctgatgctgtctgttataacaatgtgggcaattggctacatcctggacttcaactccgactcctggcttctcaagggatgcctcctcgtgacactgttcttccttaccagtctgttccctcggtttttggtaggttacaagaacttggtctatcttccgacagcttttttgctgagttccgtgttctggatcttcatgacatggtttatactgtttttccctgacctcgccggagcgccattttacttctcctttatcttcagtatagtagcttttttgtatttcttctacaaaacatgggccacagatcctgggttcacaaaagcaagcgaagaggaaaagaaggtcaacatcatcactctggctgagactgggtccttggattttaggacattttgcacgtcctgtctgatccgaaagccactcagatctctgcactgccacgtgtgcaattgttgtgtggctcgatatgaccagcattgcctgtggacgggtcggtgcatcggattcgggaatcatcactactatatcttttttctctttttcctttccatggtgtgtggttggattatttacggatcatttatctacctctcctcacactgcgcgactacttttaaggaggatgggctgtggacgtatcttaaccagatcgtagcatgttccccctgggtcctttacattttaatgctggccacttttcatttctcttggtccacgttcttactcctgaatcaactcttccagatagcttttctgggcttgacttcacacgagaggatcagtctgcagaagcagagcaagcatatgaagcagaccctgagcttgcgtaagaccccttataatttgggatttatgcaaaatctcgccgatttcttccaatgcgggtgctttggactcgtgaaaccatgcgtcgtggattggacgagccaatataccatggtgttccatcctgctcgagagaaagtactgagatctgtgtag

SEQ ID NO: 201137 - DNA, 1869 bp, Artificial Sequence
  derived and/or modified sequence
atggagggtcccggactaggcagtcaatgtaggaaccattcccacgggccacacccaccaggctttggcaggtatggcatttgtgcccacgaaaacaaagagctggccaatgccagggaggcactgcctctcatcgaggactcctcaaactgtgacatagtgaaggctactcagtacgggatatttgaaagatgtaaagaactcgtcgaggctggatatgacgtacgccaacctgataaggaaaacgtatctctgctgcattgggctgccatcaataaccggctggatctggttaagttttacataagcaaaggcgctgtggtggaccaactgggtggggatttaaatagtaccccgctgcattgggccatcagacagggccatctcccaatggtgattctcctgcttcagcacggagcggaccctaccttgatcgatggagagggattttcaagcattcatcttgccgttcttttccagcatatgccaatcatcgcctacctcatatcaaagggccaatcggtgaatatgacagatgttaacgggcaaactcccctcatgctgagtgcgcacaaggtgataggtcctgagccgacaggatttctcctgaaattcaacccttctttgaatgtggtggacaagattcatcaaaacacaccattgcactgggctgtagcagccggaaacgtgaacgctgtggacaaactgctggaagccggaagctccctagacattcaaaatgtgaagggagagacgcctctggacatggctttgcaaaataagaaccaactcattatacacatgctgaaaactgaggctaaaatgcgggcaaatcagaaatttcgcctctggcgttggttgcaaaagtgcgagctgtttttgctgttgatgttatccgtgataacaatgtgggcaattgggtacatcctggatttcaacagcgattcttggctcttgaaaggatgcttgctggtgaccctgtttttcctgacctctctcttcccaagatttcttgtgggatacaaaaacctcgtctatctgccaacagccttccttctgtcatccgtgttttggatatttatgacttggtttattcttttcttcccagatctagccggtgcacccttctattttagcttcatttttagcattgtggcatttctgtacttcttctataagacttgggctaccgaccccggttttacgaaggcaagcgaagaagaaaagaaggtcaatattattacactggccgaaaccggttccttggactttaggaccttctgtactagctgcttaatacgaaagcccttaagaagccttcactgccatgtgtgtaattgttgtgtggcccgatacgaccagcactgcctatggaccggccgatgcatcggcttcggcaatcaccactactacatattcttcctgttctttctgtccatggtgtgtggttggatcatttacggctcatttatttatctgtcatcccattgtgccaccacttttaaagaggatggactttggacgtatcttaaccaaattgtggcatgcagtccctgggtactgtatatacttatgctggccacattccattttagttggagcacattcctgttgctgaatcaactatttcagatcgcctttctgggtctgacgtcgcatgagcggatctctctccaaaagcagtcaaaacatatgaagcagaccttgagcctgaggaagacaccctacaacctgggcttcatgcagaacttggctgatttttttcagtgcggctgtttcgggctagtgaaaccctgcgtggtggattggacatctcagtatacaatggtgttccaccctgccagagagaaagtcttgaggtccgtgtag

SEQ ID NO: 201138 - DNA, 2283 bp, Artificial Sequence
  derived and/or modified sequence
gggcgccagcaggaagtgggagaagaggcgacccaaggcgggctggcgggctggcggcagtcgctacttgcctagtagcctcagccgctgtgggctcctggggagatggaggggccggggctgggctcgcagatacggaatttttgaacgatgtaaagagttggtagaagcaggatatgatgtcaggcaaccagataaagaaaatgtgtcgcttcttcattgggctgctattaacaacagactggatcttgtaaagttttatatttcaaaaggtgctgttgtagatcagttgggtggagatttaaattcaactcctcttcactgggccatccgacaaggacatttacctatggtcatattattactccagcatggtgcagaccccactcttattgatggagagggattcagcagcatccacctggcagtattgtttcaacacatgcctattatagcatatctcatctcaaagggacagagtgtgaatatgacagatgtaaatgggcagacacctctcatgttatcagctcacaaagtaattgggccagaaccaactggatttcttttaaagtttaatccttctctcaatgtggttgataaaatacaccaaaacactccacttcactgggcagttgcagcaggaaatgttaatgcagttgataagcttttggaagctggttctagcctggatatccagaatgttaagggagaaacacctcttgatatggctctacaaaacaaaaatcagctcattattcatatgctaaaaacagaagccaaaatgagagccaaccaaaagttcagactttggaggtggctgcagaaatgcgagctcttcctgctgctgatgctttctgtgattaccatgtgggctattggatacatattggacttcaattcagattcttggcttttaaaaggatgtcttctagtaacactgttttttctgacatctttgtttccaaggttcttggttgggtataagaaccttgtatacttaccaacagcctttctgctaagttctgttttttggatatttatgacttggttcatcttattttttcctgatttagcaggagcccctttctatttcagtttcattttcagcatagtagcctttctatactttttctataagacttgggcaactgatccaggcttcactaaggcttctgaagaagaaaagaaagtgaatatcatcacccttgcagaaactggctctctggacttcagaacattttgtacatcatgtcttataaggaagccattaaggtcactccactgccatgtatgcaactgctgtgtggctcgatatgatcaacactgcctgtggactggacggtgcataggttttggcaaccatcactattacatattcttcttgtttttcctttccatggtatgtggctggattatatatggatctttcatctatttgtccagtcattgtgccacaacattcaaagaagatggattatggacttacctcaatcagattgtggcctgttccccttgggttttatatatcttgatgctagcaactttccatttctcatggtcaacatttttattattaaatcaactctttcagattgcctttctgggcctgacctcccatgagagaatcagcctgcagaagcagagcaagcatatgaaacagacgttgtccctcaggaagacaccatacaatcttggattcatgcagaacctggcagatttctttcagtgtggctgctttggcttggtgaagccctgtgtggtagattggacatcacagtacaccatggtctttcacccagccagggagaaggttcttcgctcagtatgaagaaaagcaacccaaaactctcaatctgatttgtttttgtttatgtcgatgccctgtagtttgaaagtgaagtaaagatttagaattcacctaagtccaaaggaaaacacgtggtttttaaagccattaggtaaaaaaagttctcaataaaggcattacaattttttaggtttagaaagatggacttttctgataaatcttggcagacatctaaaaaaaaaaccatatttttcacaagaaaatgcaagttactttttttggaaataatactcactgattatggataaaatggaatattttcagatactatattggctgtttcaaaatagtactattctttaaacttgtaatttttgctaagttatttgtctttgttgtatctataaatatgtaaaaaatatttaaatagatgtacctgttttgctttcacacttaataaaaaatttttttttgta

SEQ ID NO: 201139 - DNA, 2445 bp, Artificial Sequence
  derived and/or modified sequence
gcagcggcggaggtgagggcgccagcaggaagtgggagaagaggcgacccaaggcgggctggcgggctggcggcagtcgctacttgcctagtagcctcagccgctgtgggctcctggggagatggaggggccggggctgggctcgcagtgcaggaatcacagccatggcccccaccctccaggatttggtcgatatggcatctgtgcacatgaaaacaaagaacttgccaatgcaagagaagctcttcctcttatagaggactctagtaactgtgacattgtcaaagctactcaatacggaatttttgaacgatgtaaagagttggtagaagcaggatatgatgtcaggcaaccagataaagaaaatgtgtcgcttcttcattgggctgctattaacaacagactggatcttgtaaagttttatatttcaaaaggtgctgttgtagatcagttgggtggagatttaaattcaactcctcttcactgggccatccgacaaggacatttacctatggtcatattattactccagcatggtgcagaccccactcttattgatggagagggattcagcagcatccacctggcagtattgtttcaacacatgcctattatagcatatctcatctcaaagggacagagtgtgaatatgacagatgtaaatgggcagacacctctcatgttatcagctcacaaagtaattgggccagaaccaactggatttcttttaaagtttaatccttctctcaatgtggttgataaaatacaccaaaacactccacttcactgggcagttgcagcaggaaatgttaatgcagttgataagcttttggaagctggttctagcctggatatccagaatgttaagggagaaacacctcttgatatggctctacaaaacaaaaatcagctcattattcatatgctaaaaacagaagccaaaatgagagccaaccaaaagttcagactttggaggtggctgcagaaatgcgagctcttcctgctgctgatgctttctgtgattaccatgtgggctattggatacatattggacttcaattcagattcttggcttttaaaaggatgtcttctagtaacactgttttttctgacatctttgtttccaaggttcttggttgggtataagaaccttgtatacttaccaacagcctttctgctaagttctgttttttggatatttatgacttggttcatcttattttttcctgatttagcaggagcccctttctatttcagtttcattttcagcatagtagcctttctatactttttctataagacttgggcaactgatccaggcttcactaaggcttctgaagaagaaaagaaagtgaatatcatcacccttgcagaaactggctctctggacttcagaacattttgtacatcatgtcttataaggaagccattaaggtcactccactgccatgtatgcaactgctgtgtggctcgatatgatcaacactgcctgtggactggacggtgcataggttttggcaaccatcactattacatattcttcttgtttttcctttccatggtatgtggctggattatatatggatctttcatctatttgtccagtcattgtgccacaacattcaaagaagatggattatggacttacctcaatcagattgtggcctgttccccttgggttttatatatcttgatgctagcaactttccatttctcatggtcaacatttttattattaaatcaactctttcagattgcctttctgggcctgacctcccatgagagaatcagcctgcagaagcagagcaagcatatgaaacagacgttgtccctcaggaagacaccatacaatcttggattcatgcagaacctggcagatttctttcagtgtggctgctttggcttggtgaagccctgtgtggtagattggacatcacagtacaccatggtctttcacccagccagggagaaggttcttcgctcagtatgaagaaaagcaacccaaaactctcaatctgatttgtttttgtttatgtcgatgccctgtagtttgaaagtgaagtaaagatttagaattcacctaagtccaaaggaaaacacgtggtttttaaagccattaggtaaaaaaagttctcaataaaggcattacaattttttaggtttagaaagatggacttttctgataaatcttggcagacatctaaaaaaaaaaccatatttttcacaagaaaatgcaagttactttttttggaaataatactcactgattatggataaaatggaatattttcagatactatattggctgtttcaaaatagtactattctttaaacttgtaatttttgctaagttatttgtctttgttgtatctataaatatgtaaaaaatatttaaatagatgtacctgttttgctttcacacttaataaaaaatttttttttgta

SEQ ID NO: 201140 - protein, 211 aa, Artificial Sequence
  derived and/or modified sequence
MDAPGALAQTAAPGPGRKELKIVIVGDGGCGKTSLLMVYSQGSFPEHYAPSVFEKYTASVTVGSKEVTLNLYDTAGQEDYDRLRPLSYQNTHLVLICYDVMNPTSYDNVLIKWFPEVTHFCRGIPMVLIGCKTDLRKDKEQLRKLRAAQLEPITYMQGLSACEQIRAALYLECSAKFRENVEDVFREAAKVALSALKKAQRQKKRRLCLLL

SEQ ID NO: 201141 - protein, 113 aa, Artificial Sequence
  derived and/or modified sequence
MDAPGALAQTAAPGPGRKELKIVIVGDGGCGKTSLLMVYSQGSFPEHYAPSVFEKYTASVTVGSKEVTLNLYDTAGQEDYDRLRPLSYQNTHLVLICYDVMNPTSYDNVLIKV

SEQ ID NO: 201142 - DNA, 636 bp, Artificial Sequence
  derived and/or modified sequence
atggacgcccccggcgccctggcccagaccgccgcccccggccccggcagaaaggagctgaagatcgtgatcgtgggcgacggcggctgcggcaagaccagcctgctgatggtgtacagccagggcagcttccccgagcactacgcccccagcgtgttcgagaagtacaccgccagcgtgaccgtgggcagcaaggaggtgaccctgaacctgtacgacaccgccggccaggaggactacgacagactgagacccctgagctaccagaacacccacctggtgctgatctgctacgacgtgatgaaccccaccagctacgacaacgtgctgatcaagtggttccccgaggtgacccacttctgcagaggcatccccatggtgctgatcggctgcaagaccgacctgagaaaggacaaggagcagctgagaaagctgagagccgcccagctggagcccatcacctacatgcagggcctgagcgcctgcgagcagatcagagccgccctgtacctggagtgcagcgccaagttcagagagaacgtggaggacgtgttcagagaggccgccaaggtggccctgagcgccctgaagaaggcccagagacagaagaagagaagactgtgcctgctgctgtag

SEQ ID NO: 201143 - DNA, 342 bp, Artificial Sequence
  derived and/or modified sequence
atggacgcccccggcgccctggcccagaccgccgcccccggccccggcagaaaggagctgaagatcgtgatcgtgggcgacggcggctgcggcaagaccagcctgctgatggtgtacagccagggcagcttccccgagcactacgcccccagcgtgttcgagaagtacaccgccagcgtgaccgtgggcagcaaggaggtgaccctgaacctgtacgacaccgccggccaggaggactacgacagactgagacccctgagctaccagaacacccacctggtgctgatctgctacgacgtgatgaaccccaccagctacgacaacgtgctgatcaaggtgtag

SEQ ID NO: 201144 - DNA, 636 bp, Artificial Sequence
  derived and/or modified sequence
atggatgcccctggagcactggcacagactgcagccccaggcccaggcaggaaggaacttaagatcgtgattgtgggtgatggtgggtgcgggaagacttcattgctgatggtgtacagtcaaggatccttcccagaacattatgccccctcggtattcgaaaagtataccgcatctgttaccgtaggatcgaaagaggtcactctgaacctgtatgatactgccgggcaggaggattacgatagattgcgaccactaagttaccagaacacccatctggtcctcatctgctacgatgttatgaatccaacctcttatgacaatgttctcatcaaatggtttccagaggtaactcatttttgtcggggcattcctatggttctcatcggctgtaagacggacctgcggaaggacaaagagcaactcagaaaacttcgcgctgctcagttggaacccattacgtatatgcaggggctctccgcctgcgaacagattagggcagcactttacctggaatgttctgctaagtttcgggagaacgtggaggacgtgttccgggaggcagccaaggtagctctttctgcgctgaaaaaggcacagcgccaaaaaaagagacggctctgcctcttactgtag

SEQ ID NO: 201145 - DNA, 342 bp, Artificial Sequence
  derived and/or modified sequence
atggatgcccctggtgctctggcccaaacagcagccccaggtcccggacggaaggagctgaaaattgtcatcgtgggggatggcggttgtggcaaaacatcgctgctgatggtgtatagccaagggtccttcccggaacactatgcaccaagtgtgttcgagaagtataccgcgagtgtcactgtgggaagcaaagaggtgacacttaatctctatgatacggcaggtcaagaggattatgatcgtttacgacccctgtcttatcagaacacgcacctggttttgatctgctatgacgtgatgaatcctacgagctatgataatgtgctaatcaaagtctag

SEQ ID NO: 201146 - DNA, 636 bp, Artificial Sequence
  derived and/or modified sequence
atggatgcccctggggccctggcccagacagctgcccctggccctggcaggaaggagctgaagatcgtcatcgtgggagatggcggctgtgggaagaccagcctgctgatggtgtacagccagggcagcttccctgagcactacgcccccagcgtgtttgagaagtacacagcctctgtgacagtgggcagcaaggaggtgaccctgaacctgtatgacacagctggccaggaggactatgaccggctgcggcccctgagctaccagaacacccacctggtgctgatctgctatgatgtgatgaaccccaccagctatgacaacgtgctgatcaagtggttccctgaggtgacccacttctgccggggcatccccatggtgctgattggctgcaagacagacctgaggaaggacaaggagcagctgaggaagctgcgggccgcccagctggagcccatcacctacatgcagggcctgagcgcctgtgagcagatccgggccgccctgtacctggagtgcagcgccaagttcagagaaaatgtggaggatgtgttccgggaggccgccaaggtggccctgagcgccctgaagaaggcccagaggcagaagaagaggcggctgtgcctgctgctgtag

SEQ ID NO: 201147 - DNA, 342 bp, Artificial Sequence
  derived and/or modified sequence
atggatgcccctggggccctggcccagacagctgcccctggccctggcaggaaggagctgaagatcgtcatcgtgggagatggcggctgtgggaagaccagcctgctgatggtgtacagccagggcagcttccctgagcactacgcccccagcgtgtttgagaagtacacagcctctgtgacagtgggcagcaaggaggtgaccctgaacctgtatgacacagctggccaggaggactatgaccggctgcggcccctgagctaccagaacacccacctggtgctgatctgctatgatgtgatgaaccccaccagctatgacaacgtgctgatcaaggtgtag

SEQ ID NO: 201148 - DNA, 636 bp, Artificial Sequence
  derived and/or modified sequence
atggacgcccccggcgccctggcccagaccgccgcccccggccccggtaggaaagagttaaagattgtgatagtcggggatggcgggtgcggaaagacttcactactgatggtatatagtcagggctcctttccagagcactatgccccaagcgtgtttgagaagtatactgcctcagtcactgtgggatcaaaagaagtcaccctcaacctatatgacaccgccggtcaagaggattacgatcgacttcgccccctgagctaccagaacacccatctcgtgctcatttgctacgatgtcatgaatccaacatcgtatgataatgtccttattaaatggttccctgaagtcacacacttctgtcggggcatcccaatggttctgattggctgcaagacagacttgaggaaggacaaagaacagctccgcaagctgagggccgctcaacttgaacctatcacctacatgcaaggcctttccgcctgtgaacaaattcgtgccgccctttacttggagtgcagcgccaagttcagagagaatgtggaggacgtgtttagggaggcagctaaggtggccctctctgccctcaagaaggcccagaggcagaaaaaaaggaggttgtgcctcctcctctag

SEQ ID NO: 201149 - DNA, 342 bp, Artificial Sequence
  derived and/or modified sequence
atggacgcccccggcgccctggcccagaccgccgcccccggccccggcaggaaggaactgaaaattgtcatcgtaggtgatggaggctgtggaaagactagtttgctcatggtctacagccagggctcgtttccagaacactacgccccatccgtcttcgaaaaatacacagcatctgtcaccgtgggcagcaaagaggtgacacttaacctgtacgatacggccgggcaggaagactatgaccggcttcgccctctgtcttatcagaacacacatttggtattaatttgttacgacgtgatgaacccaacatcatacgataatgtgctcatcaaagtgtag

SEQ ID NO: 201150 - DNA, 636 bp, Artificial Sequence
  derived and/or modified sequence
atggatgcaccaggcgcactcgcccaaactgccgctccaggaccgggaaggaaggaactgaaaattgtgatcgtcggcgacggtggctgtggaaagacatccctgctgatggtgtactcacagggttcatttcctgagcattacgcgccttcagtgttcgaaaaatatacggcgagcgtcaccgttggaagtaaggaggtcaccctgaacctatatgacacagccggtcaggaagattacgacagactgcgcccactctcataccagaacacacatctggttctgatttgctatgatgttatgaaccccacatcatatgacaatgtgctgatcaagtggtttcctgaggtaacacacttttgtagaggtatccccatggtgttgatcggatgtaaaacagatttacggaaggacaaggaacagttgcgaaaactgcgggcagcgcagctggagcccatcacatatatgcagggactatccgcctgtgaacagatcagggctgctctttatctggagtgtagtgccaaatttcgggaaaacgtcgaggacgtgttccgggaggccgcaaaggtcgcactgagtgcactcaagaaggcccagagacaaaagaagagaagactgtgtctgttgttgtag

SEQ ID NO: 201151 - DNA, 342 bp, Artificial Sequence
  derived and/or modified sequence
atggacgccccaggcgcactggcccagactgctgcacccggtccagggcgaaaggagctgaagatcgttattgtgggggacggcggttgtggcaagacctcgctgctgatggtatatagtcagggctcatttccagaacattacgcccctagtgtgtttgaaaaatacacagctagcgtgaccgtcggatctaaggaagtaacccttaacttgtacgatacggccggtcaagaggattatgatcgcctgcgcccattgagctatcagaatactcacctggtacttatctgctatgatgtgatgaatccaacctcttacgataatgtcctgattaaggtctag

SEQ ID NO: 201152 - DNA, 3005 bp, Artificial Sequence
  derived and/or modified sequence
gtgcacgctggcgtccctggcccaggcgaggtgggcagacatgactctcgcgtcagcatcttccctggtgccaccgccgctacctcctgtggggaagctgaggccagaggcggacatgtgccaagccacaccgctggggcagtgcaaagttgaggggctcttcccggagctggaggccgggggcttctcgaacccggtgcggaggcacagccagccaatccgggagaccctgtctggccgcgccagccaatcagagggtccctgccgaaggcggagcctgctaatcaggggcacctggagtcgctgggcagccacgatcgggtctcgccggcgaggggcgcgacgtgacgcgcggagggtggcggtgggttgggggtgggagctttgctcgcagctgagccccgtttttccggtgctgcagtatccctgggactgagagctgaatacccacacccagggctgagaccttagcagaaaggaaactgaggctgggaggtcggccgggaggctgcctggcggaggcggcgctgctccgagtgggcggggctggttccggccccgccccgcccccgacctcttggctccgctagtgcccggcgcgccgccgccagtgctgcgggctccgggcaatggatgcccccggggccctggcccagaccgccgcccccggtccgggcaggaaggagctgaagatcgtgatcgtgggcgacggcggctgcggcaagacctcgctgctcatggtgtacagccagggctccttccccgagcactacgccccatcggtgttcgagaagtacacggccagcgtgaccgttggcagcaaggaggtgaccctgaacctctacgacacggccgggcaagaagactatgaccggctgcggcccctgtcctaccagaacacccacctcgtgctcatctgctatgacgtcatgaatcccaccagctacgacaacgtcctcatcaagtggttccctgaggtcacgcatttctgccgcgggatccccatggtgctcatcggctgcaagacagacctgaggaaggacaaggagcagctgcggaagctccgggccgcccagctggagcccatcacctacatgcagggcctgagcgcctgcgaacagatccgagctgctctctacctggaatgttccgccaagtttcgggagaatgtggaggacgtcttccgggaggccgccaaggtggctctcagcgctctgaagaaggcgcaacggcagaagaagcgccggctctgcctgctgctctgacccagggcagacagacctcacgacagcactgacagggcccgggggcccaggtgccgattgcaccagggaggctgccccatcccgaccctccagctcatggtgtctggggcctgcggctagactcttggaacattctggaactctctcctttcctggctggggctctgaccacaaactcccctccaggctgcccctgggacatggtggtgatgtgggtgcaggagccagtgtctgttgtcgggactcgcaagtgccctcatcacagccacccccaccacgagtgtctccccagtgcagactcaagttatgcttgaaatgaaaaagtctatctggtagtgggtaaacgtagacctggcactgttccacgcgggcgccccaagcctgccactcctgtgtccctgcctccctgggctcccgagataggcaccactgtatcctccagctccttccttccttcccccaggaacacggaggccaccgagggggctgggcctatcaggaggacacaggctgcagcctggcacccacccctcccatctccaccccacatggaagacttgtcttcaacttggccactgtctttgcagagctgggcacatgtgcccagggggcagaaaaaatggcttctcagttgttaaaagtataccctggaccacccatctgaccatctccttaaggtttcacccaaagcccccagtgtcagagacttgggatgggaagaacagtcggctcccagtgtggtcatgagcaagttttctgtggactgttccccccactgtggtaggacaggactggcccacttagtcctcaagctcccaacctgctgtccctcaagccccgcttctaccagcctgtggagttcaggaggcgagacatcctggcctcctttgagaactgatgggatctaccccctgtccacgcgggacagtttctcagaactggttcatagaccacctgtgtcaccaacagccagatacctaatccctgagcctcctttgggaaggtctggggccgagggtctgggaatttttttttttttttttttttgggacagagtctcattctgtcactcaggctagagtgcagtggcatgatcttggctcactgcaagctccacctcctgggttcaagcgattctcttgcctcagcctcctgagtagctgggactacatgcgcacaccaccacgtccggctaatttttgtatttttagtagagacagggtttcaccatgttggccaggctggtcttgaactcctgacctcgtgatccacccgccttagcctcccaaagtgctgggattacaggcgtgagccaccgtgcccggcccaggacttttaaaacaagcatcccaggggattccggtgcctaccagaagtcgcaagctgcttggctctggagggcgcctaggagtcggtgtcgcctaagatgggataatggcttcaggcaactcctagccttccccatatctcctgcctcagcccccctggcccagtgctggggcgtcagctaaacctgagcttccaagaagtcaggttgccaaaggaaggagccttctgagaccctccccaacccacccaggttcccaaggccctgccgtaccctggggaatcaaccaaggagttcttgttctcgaagaaccccaggcctcatgatggtctacggtagaggtccaacaactacagcctgtgggccacatctggccacagcctgatttgtaaataaagttttattggaacaca

SEQ ID NO: 201153 - DNA, 670 bp, Artificial Sequence
  derived and/or modified sequence
ggcgattgcccggcagagggcgtcagacgtccaccctgcagcccagggtcggggtgcgggtaagcggagcccagtccctcaccccgaacccgcgtgcacgctggcgtccctggcccaggcgagtatccctgggactgagagctgaatacccacacccagggctgagaccttagcagaaaggaaactgaggctgggaggtcggccgggaggctgcctggcggaggcggcgctgctccgagtgggcggggctggttccggccccgccccgcccccgacctcttggctccgctagtgcccggcgcgccgccgccagtgctgcgggctccgggcaatggatgcccccggggccctggcccagaccgccgcccccggtccgggcaggaaggagctgaagatcgtgatcgtgggcgacggcggctgcggcaagacctcgctgctcatggtgtacagccagggctccttccccgagcactacgccccatcggtgttcgagaagtacacggccagcgtgaccgttggcagcaaggaggtgaccctgaacctctacgacacggccgggcaagaagactatgaccggctgcggcccctgtcctaccagaacacccacctcgtgctcatctgctatgacgtcatgaatcccaccagctacgacaacgtcctcatcaaggtg

SEQ ID NO: 201154 - protein, 1135 aa, Artificial Sequence
  derived and/or modified sequence
MHQMNAKMHFRFVFALLIVSFNHDVLGKNLKYRIYEEQRVGSVIARLSEDVADVLLKLPNPSTVRFRAMQRGNSPLLVVNEDNGEISIGATIDREQLCQKNLNCSIEFDVITLPTEHLQLFHIEVEVLDINDNSPQFSRSLIPIEISESAAVGTRIPLDSAFDPDVGENSLHTYSLSANDFFNIEVRTRTDGAKYAELIVVRELDRELKSSYELQLTASDMGVPQRSGSSILKISISDSNDNSPAFEQQSYIIQLLENSPVGTLLLDLNATDPDEGANGKIVYSFSSHVSPKIMETFKIDSERGHLTLFKQVDYEITKSYEIDVQAQDLGPNSIPAHCKIIIKVVDVNDNKPEININLMSPGKEEISYIFEGDPIDTFVALVRVQDKDSGLNGEIVCKLHGHGHFKLQKTYENNYLILTNATLDREKRSEYSLTVIAEDRGTPSLSTVKHFTVQINDINDNPPHFQRSRYEFVISENNSPGAYITTVTATDPDLGENGQVTYTILESFILGSSITTYVTIDPSNGAIYALRIFDHEEVSQITFVVEARDGGSPKQLVSNTTVVLTIIDENDNVPVVIGPALRNNTAEITIPKGAESGFHVTRIRAIDRDSGVNAELSCAIVAGNEENIFIIDPRSCDIHTNVSMDSVPYTEWELSVIIQDKGNPQLHTKVLLKCMIFEYAESVTSTAMTSVSQASLDVSMIIIISLGAICAVLLVIMVLFATRCNREKKDTRSYNCRVAESTYQHHPKRPSRQIHKGDITLVPTINGTLPIRSHHRSSPSSSPTLERGQMGSRQSHNSHQSLNSLVTISSNHVPENFSLELTHATPAVEQVSQLLSMLHQGQYQPRPSFRGNKYSRSYRYALQDMDKFSLKDSGRGDSEAGDSDYDLGRDSPIDRLLGEGFSDLFLTDGRIPAAMRLCTEECRVLGHSDQCWMPPLPSPSSDYRSNMFIPGEEFPTQPQQQHPHQSLEDDAQPADSGEKKKSFSTFGKDSPNDEDTGDTSTSSLLSEMSSVFQRLLPPSLDTYSECSEVDRSNSLERRKGPLPAKTVGYPQGVAAWAASTHFQNPTTNCGPPLGTHSSVQPSSKWLPAMEEIPENYEEDDFDNVLNHLNDGKHELMDASELVAEINKLLQDVRQS

SEQ ID NO: 201155 - DNA, 3408 bp, Artificial Sequence
  derived and/or modified sequence
atgcatcagatgaatgcaaaaatgcacttccgattcgtgttcgctcttttgatcgtgtcctttaatcatgacgtcctggggaaaaacctcaagtatagaatatacgaggaacagcgggtggggagcgtgatcgccagacttagtgaggacgttgccgatgtactgctgaaactccccaatccgagcactgtacgcttccgggcaatgcagaggggcaattctcctctactcgtggtgaatgaagataacggggagatcagcattggtgctacaatcgaccgcgaacagttgtgccagaagaacctgaattgcagcattgaatttgacgttatcactctgcctactgagcacctgcagctgtttcatatagaggtcgaagtcctcgacatcaatgacaactccccccagttcagccgttcccttatccccattgagatatccgagagcgctgccgtcggtaccaggatcccacttgactctgcctttgatccggatgtgggcgaaaactcgctgcacacttactctttgagcgccaatgatttctttaatattgaggtgcggaccaggaccgacggcgcaaaatatgccgagttgattgtagtgagggaactggatcgtgaattgaagtcttcttacgaactccagcttaccgccagcgatatgggcgtgcctcagcgatctggaagcagcatcctgaagatcagcatttccgatagtaatgataattcacccgcctttgaacagcaaagttacataatacaattgctggagaatagccccgtgggtactctacttctagacctgaacgctactgatcctgatgaaggcgcgaatggcaaaatcgtgtactcattttcctctcatgtgagcccaaaaatcatggaaacctttaagattgatagtgaaagaggccacttaaccttgttcaagcaggtggattatgaaatcacgaagtcttatgaaatagacgtgcaggcgcaggatctgggccccaactccatcccagcccactgtaagattatcatcaaggtcgtagacgtgaatgacaataagccggagataaatattaacttaatgagcccaggcaaagaggagatatcctatattttcgagggggaccccatcgacacatttgtggccctcgtgcgggttcaggataaggacagtggcctgaatggcgagatcgtgtgcaagcttcacggtcacggacattttaaattgcaaaagacatatgaaaacaactatttgatacttacaaacgccacactggaccgggagaaaagatcagagtattccctaacagtcatcgccgaagaccggggcactccttccctaagcactgtgaaacactttacagtgcaaattaatgacatcaatgacaatcctccccactttcagcgaagccgctatgagttcgtgattagcgagaataactcccccggagcctacatcacgactgtgaccgccactgatcccgacttaggagagaacggccaggtcacttacacaattctcgaaagcttcatcctgggcagctcaatcactacctatgtgaccatagacccctccaatggggctatttatgccctaaggatattcgaccacgaagaagttagccagattacgttcgtcgtcgaggcccgtgatggaggctcacctaagcagctcgtgtctaatactacagttgtgctcacaatcatcgacgaaaacgacaatgtgcctgtggtcattggccccgcactccgcaataacacagccgagattacaattcccaagggagcggagtctgggtttcacgtgacaagaattcgcgcaatcgatagggatagcggggtgaacgctgagttgtcctgtgcgatagtggctgggaatgaggagaatatttttatcattgacccaaggagctgcgacatccacactaatgtttccatggactcagtcccatacacagagtgggaattgtcagtgatcattcaggacaaggggaaccctcagctgcatactaaagtgttgctgaagtgcatgattttcgaatacgccgagtcagtgacaagcacagccatgacctccgtttctcaggccagcctggatgtttcaatgattataatcataagcttaggagccatctgtgccgtccttttggtcatcatggtgctattcgccaccagatgcaatcgtgagaaaaaggacacgcgatcctacaattgccgggttgcggagagtacctatcagcaccacccaaaacggccctcacggcaaatacataagggggatataacactagttcctacaataaacgggacactgcccatccggtctcatcacagatcgtcaccaagcagctctcctactctggaaaggggccagatgggaagccgacaaagtcataactcgcaccaaagcctcaacagtctcgtcaccataagttccaatcacgtccccgaaaatttttcgctcgagcttacccacgccacaccagccgtggaacaggtaagtcagctgctgtcaatgctgcatcagggccagtaccagcctaggccttcctttagagggaataagtactctaggagctacaggtatgccctccaagatatggacaagttctcactgaaggactccggtcggggcgacagcgaagctggcgattctgactacgacctaggacgggactctcccattgaccgcctcttaggggagggtttttctgacttgtttttgactgatggaaggatccctgcggccatgaggctctgtacggaggagtgtcgggtgctcggtcactcagaccaatgctggatgccccccctcccttcgccgtcatctgattaccgcagcaacatgttcattcccggcgaggagtttcccacccagccccagcagcagcacccgcatcagagcctggaagatgatgcacagcctgccgacagcggagagaagaagaagtcattctcgacctttggcaaggatagccctaacgacgaggacaccggggatacttctacgtctagcctcctgtcagaaatgtcctctgtctttcagcgacttctccccccaagtctcgatacatacagcgagtgtagcgaggtggaccggagcaattccctggagcggagaaaagggcccctgcctgctaaaactgtgggctatccccagggagtggctgcctgggccgcctccacccatttccagaaccctacaacgaactgcggtccaccgctgggcacccactcttctgtgcagcccagctcaaagtggctccctgctatggaagaaattcctgagaattacgaggaggacgatttcgataatgttctgaatcatcttaacgatggcaagcacgagttgatggacgccagcgaattggttgccgagatcaataaactccttcaggacgtgaggcagagttag

SEQ ID NO: 201156 - DNA, 3408 bp, Artificial Sequence
  derived and/or modified sequence
atgcaccagatgaatgccaagatgcacttccgctttgtgtttgccctgctgattgtgtccttcaaccatgatgtgctgggcaagaacctgaagtaccgcatctatgaggagcagagggtgggcagcgtcatcgcccggctgtctgaagatgtggctgatgtgctgctgaagctgcccaaccccagcacagtgcgcttccgggccatgcagaggggcaacagccccctgctggtggtgaatgaagataatggagagatcagcatcggggccaccatcgaccgggagcagctgtgccagaagaacctgaactgcagcattgaatttgatgtgatcaccctgcccacagagcacctgcagctgttccacatcgaggtggaggtgctggacatcaatgacaacagcccccagttcagccgcagcctcatccccatcgagatcagcgagagcgctgctgtgggcacccgcatccccctggacagcgcctttgatcctgatgtgggggagaacagcctgcacacctacagcctgagcgccaatgacttcttcaacatcgaggtgaggaccaggacagatggagccaagtatgcagagctgattgtggtgcgggagctggaccgggagctgaagagcagctatgagctgcagctgacagccagtgacatgggcgtgccccagaggagcggcagcagcatcctgaagatcagcatcagtgacagcaatgacaacagccctgcctttgagcagcagagctacatcatccagctgctggagaacagccctgtgggcaccctgctgctggacctgaatgccacagatcctgatgagggcgccaacgggaagatcgtgtacagcttcagcagccacgtgagccccaagatcatggagaccttcaagattgattctgagcggggccacctgaccctcttcaagcaggtggactatgagatcaccaagagctatgaaattgatgtgcaggcccaggacctgggccccaacagcatcccagcccactgcaagatcatcatcaaggtggtggatgtgaatgacaacaagccagagatcaacatcaacctgatgagccctgggaaggaggagatctcctacatctttgaaggagaccccatcgacacctttgtggccctggtgcgggtgcaggacaaggacagcggcctgaatggagaaattgtgtgcaagctgcacggccacggccacttcaagctgcagaagacctatgagaacaactacctgatcctgaccaatgccaccctggaccgggagaagaggtctgagtacagcctgactgtgattgctgaggaccggggcacccccagcctgagcacagtgaagcacttcaccgtgcagatcaatgacatcaatgacaaccccccccacttccagaggagccgctatgaatttgtgatcagcgagaacaacagccctggggcctacatcaccaccgtgacagccacagatcctgacctgggggagaatggccaggtgacctacaccatcctggagagcttcatcctgggcagcagcatcaccacctacgtgaccatcgaccccagcaatggagccatctatgccctgcgcatctttgaccacgaggaggtgtcccagatcacctttgtggtggaggccagagatggcggcagccccaagcagctggtgagcaacaccaccgtggtgctgaccatcattgatgaaaatgacaacgtgcctgtggtgattggccctgccctgaggaacaacacagctgagatcaccatccccaagggagctgagagcggcttccacgtgacccgcatccgggccatcgaccgggacagcggcgtgaatgctgagctgagctgtgccatcgtggccggaaatgaggagaacatcttcatcatcgaccccaggagctgtgacatccacaccaacgtgtccatggacagcgtgccctacacagagtgggagctgagcgtcatcatccaggacaagggcaacccccagctgcacaccaaggtgctgctgaagtgcatgatctttgaatatgcagagagcgtgaccagcacagccatgacctctgtgtcccaggccagcctggatgtgtccatgatcatcatcatcagcctgggcgccatctgtgctgtgctgctggtgatcatggtgctgtttgccacccgctgcaaccgggagaagaaggacaccaggagctacaactgccgggtggccgagagcacctaccagcaccaccccaagaggcccagccggcagatccacaagggggacatcaccctggtgcccaccatcaatggcaccctgcccatccgcagccaccacaggagcagccccagcagcagccccaccctggagcggggccagatgggcagccggcagagccacaacagccaccagagcctgaacagcctggtgaccatcagcagcaaccacgtgcctgagaacttcagcctggagctgacccacgccaccccagctgtggagcaggtgtcccagctgctgtccatgctgcaccagggccagtaccagccccggcccagcttccggggcaacaagtacagccgcagctaccgctatgccctgcaggacatggacaagttcagcctgaaggacagcggccgcggggacagcgaggccggggacagcgactatgacctgggccgggacagccccatcgaccggctgctgggggagggcttcagtgacctcttcctgacagatggccgcatcccagctgccatgaggctgtgcacagaagaatgtcgggtgctgggccacagcgaccagtgctggatgccacccctgcccagccccagcagtgactaccgcagcaacatgttcatccctggagaggagttccccacccagccccagcagcagcacccccaccagagcctggaggatgatgcccagcctgctgacagcggggagaagaagaagagcttcagcaccttcggcaaggacagccccaatgatgaggacaccggggacaccagcaccagcagcctgctgtctgagatgagcagcgtcttccagaggctgctgccccccagcctggacacctacagtgaatgttctgaggtggacaggagcaacagcctggagaggaggaagggccccctgcctgccaagacagtgggctacccccagggcgtggccgcctgggccgccagcacccacttccagaaccccaccaccaactgtggcccccccctgggcacccacagctctgtgcagcccagcagcaagtggctgcctgccatggaggagatccctgagaactatgaggaggatgactttgacaacgtgctgaaccacctgaatgatggcaagcatgagctgatggatgccagcgagctggtggccgagatcaacaagctgctgcaggatgtgcggcagagctag

SEQ ID NO: 201157 - DNA, 3408 bp, Artificial Sequence
  derived and/or modified sequence
atgcaccagatgaacgccaagatgcacttccggttcgtgttcgccctgctcattgtgtccttcaatcacgacgtcctcggaaaaaacctgaaatataggatatatgaagaacaacgggtgggaagcgtgatagccaggctgtcagaagatgtcgctgacgttttgctcaagcttccgaatccgagtacagtgcgctttagagcgatgcaaagaggaaatagcccgctgctggttgtcaacgaggacaacggagaaatatcaattggggccaccatagacagagagcagctatgtcagaaaaatttgaattgctcaattgagttcgatgtcatcaccctccccaccgagcacttgcaactgtttcacatcgaggtggaagtcctagatatcaatgataactccccacagttttccaggtctctgatccctatcgaaatttcggaatcagcagcagtgggtacccgcatacctctggatagcgcctttgacccggacgtcggggaaaacagtcttcacacctactccttatccgcgaacgacttttttaatatcgaagtacggaccagaactgacggagcaaaatacgctgagttgattgtggtccgggagctagatcgggagcttaaaagtagttacgaactgcaactgaccgcttcagatatgggggtaccgcagagatctggcagcagcatactaaaaatcagtatctccgattcaaacgacaatagtcctgccttcgaacaacagtcttacatcattcagctgctggagaattctcctgttggtacattgctgctggacctgaacgcgacggaccctgatgaaggcgccaatgggaaaatagtctactccttttcttctcacgtttctccaaaaatcatggagacctttaaaatcgattcagagcgtggccatcttacactcttcaagcaggtcgattacgaaattacaaaatcatatgaaatagacgtgcaggcccaggatctgggtccaaatagcatcccagcccattgtaagatcatcataaaggttgttgatgtgaacgacaataagccagaaataaacatcaacctgatgagccccggcaaagaagagatcagttatatctttgagggagaccccatcgacaccttcgtggcactggtaagggtacaggacaaggattccggtctgaatggagaaatagtgtgtaaactccacggccacgggcattttaaattgcagaaaacgtatgaaaacaattaccttattctgaccaacgccaccctggatcgagaaaaaagaagcgaatactcattaacagtgattgccgaggaccgtggcacccccagtctctctaccgtgaaacatttcactgtccagatcaatgatattaatgataatcctcctcattttcagcgctcccggtatgaattcgtgatatcagaaaacaatagcccaggggcctatattaccacagttacagccacagatcccgatctgggagaaaacggacaggtgacctatactatactggagagttttatactcgggtcctcaatcactacttacgtgacaatcgacccaagcaacggggctatctacgctcttcggattttcgatcacgaagaagtcagccagattacatttgtggtggaagcgcgggacggagggtctccaaagcagttggtgagtaataccaccgttgtgttgacaataatagacgagaatgacaacgtgccggtggtcattgggcctgcattgaggaacaataccgctgaaattaccatccccaaaggtgccgagagcggttttcatgttacccgcatcagggcaatagacagggacagcggtgtgaatgccgagttaagctgcgcaattgtggccgggaatgaggagaatatctttattatcgatccccgaagctgcgatatccatacaaatgtcagcatggatagcgtgccgtatacggagtgggaattgtccgttatcattcaggataaggggaacccccagctccatacgaaagtactgctgaagtgcatgatatttgagtacgctgagtccgtgacatccacggccatgactagcgttagccaggccagtctggatgtcagtatgatcatcatcatcagtcttggggccatttgcgcagtcttgctagtcattatggtgctcttcgctactagatgcaaccgggaaaagaaagatacacggagctacaattgcagagtggctgaatcaacttatcaacatcatcctaaacgacccagtcgccaaatccacaagggagatatcaccctggtgcccactatcaatggcaccctacccattagaagccatcatcgaagttctcctagttcctcacccactctggagaggggacagatggggagccgacagtcacacaattcccatcaaagtctgaactcccttgtgaccatctctagcaatcatgttcccgagaactttagcctggaactaacccacgctactcccgcggtggagcaggtgagtcaacttttgagcatgctgcatcaagggcagtaccagccccgcccttcatttcgggggaacaaatactctcggagttacagatacgccctgcaggacatggacaagttctccttgaaggattctggtaggggcgactccgaggcaggcgacagtgattatgatctgggtcgcgactctcctattgatcgcctactgggtgaaggcttctccgatcttttcctaacagacggtaggatccccgccgcaatgaggttgtgcactgaggaatgccgggtcctgggtcactccgatcaatgttggatgccccccctgccaagccccagcagcgattaccggagtaacatgtttatccccggagaagagttccccacccagccccagcagcagcatccacaccagagccttgaggacgatgcccagccagccgactcaggcgagaagaagaaaagcttctcaacattcggcaaagactcccctaatgatgaggacacgggggataccagcaccagctcgctgttgtccgagatgtcttctgtcttccagcgtctcctgccacctagcttggatacttattccgagtgttccgaggttgatcgctccaattctctggagcgcaggaaaggccctctgcccgccaaaactgttggataccctcaaggcgtggccgcatgggcggcttccacccactttcaaaaccccacaaccaattgcggcccacccttggggacccattcctctgtgcagccgtcatcaaaatggcttcctgccatggaagagatccctgagaattacgaagaggacgatttcgataatgttctgaatcatctcaacgatggaaaacatgagctgatggatgcgagcgagcttgtggcagagattaacaagctgctccaggacgtgcgtcaatcttag

SEQ ID NO: 201158 - DNA, 3408 bp, Artificial Sequence
  derived and/or modified sequence
atgcatcagatgaatgctaaaatgcactttcgcttcgttttcgcactcctgatagtgagttttaatcacgatgtgctgggaaagaatctgaagtatcgcatctacgaagaacagcgcgtaggctcagtcatcgctcgcttatccgaggacgtcgctgacgtgctactgaagctgccaaatccaagcaccgttaggtttagggccatgcagcgtgggaatagtcctctgttagtagtaaacgaggacaacggggaaatatcaatcggggcaacaattgacagggaacaactgtgccagaaaaatctgaattgtagcatcgaatttgacgtaattaccttgccaaccgaacacttacagctgttccatatcgaagtggaagtcttagacatcaatgacaatagcccgcaattcagcaggtcacttatccccatcgagattagtgaatctgccgctgtgggtacgagaatccccttggacagcgcattcgaccctgacgtcggtgagaactctcttcacacctattccctgtccgcaaatgatttcttcaatattgaggtccgaacacgaacagatggcgcaaaatatgctgagctcatcgtagtcagagagctggatcgggaacttaagtcatcttatgagctgcagctcactgcgtcagatatgggggtgcctcaaagatctggcagtagcatccttaaaatttcaatttctgattccaatgacaattctccggcatttgaacagcagagctacattatccagcttctcgaaaatagcccggtgggcactctgttgttggatctgaatgcgactgaccctgacgagggcgcaaacggtaagattgtgtattcctttagtagtcatgtctcacccaagattatggagacttttaaaatagatagtgagaggggccacctaaccctcttcaaacaggtggactacgaaatcaccaagagctacgaaattgatgtccaagctcaggacctcgggccaaattcgatccccgcacactgtaagattatcataaaagtagttgacgtcaatgataacaagccggagataaatatcaaccttatgagtcccggtaaagaagaaataagttatatcttcgaaggggaccctattgatacatttgtagctttggtgcgagtgcaagataaagattcagggctaaatggcgagattgtgtgtaagctgcatgggcacggacatttcaaactgcagaagacatatgagaataactatctgatacttaccaatgctaccttggacagagaaaagaggtccgaatattcactcacagtaattgccgaagaccggggaacgccttctctgtccactgtgaaacactttaccgtacagattaacgatatcaacgataacccacctcatttccagaggtcccgttacgagtttgtaatatctgagaacaactcccccggtgcatacattacgacagtcactgcaacagacccagatttaggggaaaacggacaggtgacttataccattcttgaatcctttatcctgggatctagcatcaccacctacgtcacgatcgaccctagcaacggcgctatctatgccctgcgtattttcgaccacgaggaggtctctcagattacatttgtggtggaggccagagatggtggtagtccaaagcagcttgtgagtaacaccaccgttgtgctcactattattgacgaaaatgataacgtccccgttgtgatcgggcctgcgctgcggaataacaccgccgagatcactattccaaaaggcgcagagtcaggctttcatgtgactaggattcgagccattgatcgggattctggagtgaacgcggagttgtcttgcgcaattgtagctggcaatgaggagaatatcttcatcattgacccccgtagctgcgacattcatactaacgtgagtatggactccgttccctacacggaatgggaactctcagtaataatacaggacaaggggaatccccaactccacacaaaggtgcttctcaagtgtatgatattcgagtacgctgaatccgtgacctctacagctatgacctcggtgtcacaagcatcgttagatgtttcgatgatcattattatcagtcttggcgcaatttgtgccgtacttctcgtcatcatggtgctattcgctaccagatgtaatcgcgagaagaaggacaccagaagctacaattgcagggtcgcggaatctacatatcagcatcatccaaaaaggccctcccgacagatccacaagggggatataacactggtccccactatcaatggtacactcccgatacgctcccaccaccgatcatctccctcatcatccccaacattggagcgtggccagatgggctctagacagagccacaactcccatcagagtcttaacagccttgtgactatctccagtaatcatgtgcctgagaatttctcccttgagctcacccacgcaacaccagcggtcgaacaggtttcccaattgttatctatgctccatcaaggccagtatcagccgcgtccttcttttcggggaaacaaatatagccggtcctacaggtacgctttgcaggacatggataaattttctttaaaggattccggcagaggggacagtgaagccggtgacagcgattacgacctcggaagagattctcccattgaccggctattaggagagggcttctccgacctgtttctgactgatggcaggatccccgcagccatgcgcctgtgcaccgaagaatgcagggtactcggacacagcgatcagtgttggatgcccccattgccctctccctcgtctgattataggagcaacatgttcattcccggtgaggagttcccaacccaaccacagcagcagcacccgcatcagagcctcgaagacgacgctcagccggcagattcgggcgagaagaaaaaatcattttccacctttggaaaggacagtccaaatgacgaggatactggcgatacctcgacatcctcactgctaagcgagatgagctccgtctttcagaggttgttacctccatcactggatacctacagtgagtgcagcgaagtagatcggtccaacagtcttgagaggcgcaagggccctctcccagccaaaacggttgggtatccacaaggcgtagccgcatgggcagcttcgacgcactttcagaatccaaccactaattgcggaccgccactcggtacccacagcagcgtgcagcccagtagtaagtggctgccagccatggaagaaattccagaaaactatgaggaagacgacttcgataacgtgctgaaccatctgaacgatggcaaacacgaattaatggatgcgagcgagctggtagctgaaatcaataaactgttacaggatgtccgacagagctag

SEQ ID NO: 201159 - DNA, 5906 bp, Artificial Sequence
  derived and/or modified sequence
gcaatcacgggtgtttagtctgcagccgagcagctaaagggagaaagaatcgctcaggaaagacacactgcagactccaccggcaccctgcaatagatggattccgactacacaagggagaaaacgcggaggtgacactctcctgcctggaaagaggacgaacgaccaaacaaacgcaaggactggactccatgccgaaggtatctggaagtcgtgacacggtgtgtataaaacaaaagtttgcgagctgttaattgctgtgctgtgttattaagagacgctttcaagtttcaagtaccaaatgtagctttacgttgccaaaggaagttgaggcaattgctttgctgttttaacttgctctgtgagggaaatctcataaactgaccaatgcaccaaatgaatgctaaaatgcactttaggtttgtttttgcacttctgatagtatctttcaaccacgatgtactgggcaagaatttgaaatacaggatttatgaggaacagagggttggatcagtaattgcaagactatcagaggatgtggctgatgttttattgaagcttcctaatccttctactgttcgatttcgagccatgcagaggggaaattctcctctacttgtagtaaacgaggataatggggaaatcagcataggggctacaattgaccgtgaacaactgtgccagaaaaacttgaactgttccatagagtttgatgtgatcactctacccacagagcatctgcagcttttccatattgaagttgaagtgctggatattaatgacaattctccccagttttcaagatctctcatacctattgagatatctgagagtgcagcagttgggactcgcattcccctggacagtgcatttgatccagatgttggggaaaattccctccacacatactcgctctctgccaatgatttttttaatatcgaggttcggaccaggactgatggagccaagtatgcagaactcatagtggtcagagagttagatcgggagctgaagtcaagctacgagcttcagctcactgcctcagacatgggagtacctcagaggtctggctcatccatactaaaaataagcatttcagactccaatgacaacagccctgcttttgagcagcaatcttatataatacaactcttagaaaactccccggttggcactttgctcttagatctgaatgccacggatccagatgagggcgctaatgggaaaattgtatattccttcagcagtcatgtgtctcccaaaattatggagacttttaaaattgattctgaaagaggacatttgactcttttcaagcaagtggattatgaaatcaccaaatcctatgagattgatgttcaggctcaagatttgggtccaaattcaatcccagcccattgcaaaattataattaaggttgtggatgttaatgacaataaacctgaaattaacatcaacctcatgtcccctggaaaagaagaaatatcttatatttttgaaggggatcctattgatacatttgttgctttggtcagagttcaggacaaggattctgggctgaatggagaaatagtttgtaagcttcatggacatggtcactttaaacttcagaagacatatgaaaacaattatttaatcttaactaatgccacactggatagagaaaagagatctgagtatagtttgactgtaatcgctgaggacagggggacacccagtctctctacagtgaaacattttacagttcaaatcaatgatatcaatgacaatccaccccacttccagagaagccgatatgaatttgtaatttcagaaaataactcaccaggggcatatatcaccactgttacagccacagatcctgatcttggagaaaatgggcaagtgacatacaccatcttggagagttttattctaggaagttccataactacatatgtaaccattgacccatctaatggagccatctatgccctcagaatctttgatcatgaagaagtgagtcagatcacttttgtggtagaagcaagagatggaggaagcccgaagcaactggtaagcaataccacagttgtgctcaccatcattgacgaaaatgacaacgttcctgtggttatagggcctgcattgcgtaataatacggcagaaatcaccattcccaaaggggctgaaagtggctttcatgtcacaagaataagggcaattgacagagactctggtgtgaatgctgaactcagctgcgccatagtagcaggtaatgaggagaatatcttcataattgatccacgatcatgtgacatccataccaacgttagcatggattctgttccctacacagaatgggagctgtcagttatcattcaggacaaaggcaatcctcagctacataccaaagtccttctgaagtgcatgatctttgaatatgcagagtcggtgacaagtacagcaatgacttcagtaagccaggcatccttggatgtctccatgataataattatttccttaggagcaatttgtgcagtgttgctggttattatggtgctatttgcaactaggtgtaaccgcgagaagaaagacactagatcctataactgcagggtggccgaatcaacttaccagcaccacccaaaaaggccatcccggcagattcacaaaggggacatcacattggtgcctaccataaatggcactctgcccatcagatctcatcacagatcgtctccatcttcatctcctaccttagaaagagggcagatgggcagccggcagagtcacaacagtcaccagtcactcaacagtttggtgacaatctcatcaaaccacgtgccagagaatttctcattagaactcacccacgccactcctgctgttgagcaggtctctcagcttctttcaatgcttcaccaggggcaatatcagccaagaccaagttttcgaggaaacaaatattccaggagctacagatatgcccttcaagacatggacaaatttagcttgaaagacagtggccgtggtgacagtgaggcaggagacagtgattatgatttggggcgagattctccaatagataggctgttgggtgaaggattcagcgacctgtttctcacagatggaagaattccagcagctatgagactctgcacggaggagtgcagggtcctgggacactctgaccagtgctggatgccaccactgccctcaccgtcttctgattataggagtaacatgttcattccaggggaagaattcccaacgcaaccccagcagcagcatccacatcagagtcttgaggatgacgctcagcctgcagattccggtgaaaagaagaagagtttttccacctttggaaaggactccccaaacgatgaggacactggggataccagcacatcatctctgctctcggaaatgagcagtgtgttccagcgtctcttaccgccttccctggacacctattctgaatgcagtgaggtggatcggtccaactccctggagcgcaggaagggacccttgccagccaaaactgtgggttacccacagggggtagcggcatgggcagccagtacgcattttcaaaatcccaccaccaactgtgggccgccacttggaactcactccagtgtgcagccttcttcaaaatggctgccagccatggaggagatccctgaaaattatgaggaagatgattttgacaatgtgctcaaccacctcaatgatgggaaacacgaactcatggatgccagtgaactggtggcagagattaacaaactgcttcaagatgtccgccagagctaggagattttagcgaagcatttttgtttccatgtatatggaaatagggaacaacaacaacaacaaaaaaccctgaaagaactggcattgccaaatagttgcatttatcataaatgtgtctgtgtatattgaatattaaatactgtattttcgtatgtacacaatgcaagtgtgattattttaatctgtattttaaaaatacatttgtaccttatatttatgtgtaatttaacaaacaaattttatttttttactcccatgacagacatgtttttcctagtcgtgtagaaactagccactgttcaaatctgatacactattcaaccacaaagtgtaaaggcactgcttagattagttttgttggggaagaattattatgttgtatgaacaaccccactgaagcattatacaattcttaattccattaagtgatcccactttttttcaataactttttagaaattaagaatcattaaaattgttaagctattttattgttattttctctactttctactagccccaatagttgaactcttataggaaaatcgaaagataaagtgaaagtttatttcaggactgagaaatatcttgaaggttatttattagatgactatctcaaatgaactttttatagacaatgatgaaaacagaattaaagtcaatgtttcctgactcccaggcccctactattccaggccatcacactggcctgttccggagaatatttctctcacaatattattatctacttataattatggtaaacaataaattttattccatccttgtagtatgaaacatgctccaaggaaatggaatctgtcctttaaatggataacagtatgtgttctaatggcataaaatattactggataaaaacagttgtgtcagtgtctctcctaaggtagtaaatataattgacttattctgaacccattctattttgaatctcccctttcctctcacaatacttgaacattttaatcttttggaatattgtctttctttgttataactattcatttttagcttttgtctccagtgcatgatctcatatttttgcttttatttttagtataagaacatttataaaatcatatttttgttactgcaattgttttatttgttgtgtggcaaatgagaaatcctttatttattgtgctgtgatctctctgtgtggaatgccttggtgagagagatgcttattatgactattatcatttctgaccaagcttctattaatgttatttctaataatacactatcttgattgtactctccagaaaatttttctgtcagtgaaaataaaagaaaaattaaagtaaagctaaggaactgtctataagtcagagtcctgttcctacatatttgttcaaaagcttggcatgcagcaggcccttcctgagcgggtgattcagtgttgagtttcaaataataaacaggcagcattcagttggctgggcgaacaagaaaaacacaatggaaaaggaatgagtttgagacttgtaatgggaatgaaagtagtaagccatattccagctaaataagttaaatgcatttggggaataaagaaaaaagagtaagcaagcaataattgcttgaatatttttcaaattacaacaaaaaaaaatactttcttaggacattttgtattaaattgtgcaggataaaaaggtatccttacaatgtttccaggaggcaagaatattatcgtccctggcttgctagtcaggaattgaaacactgggaaagttaagtaactgaaaagtgactaaaattcagatatttgaattctcaaatgagtaccacattaaatagaatatattacctctttcaacaggcacattttcctttataggagagattgcaattacaagtgaaatttcagtatatttttcagtagattacacacacaaacgctaaccatatttaaatgcattctgcctttcaacttcacttcctttcagtatatattaccattaagaaaaagacttttatatcctcactgttcttaatttaaagcaccagcagtaatatgggaagctatgctgaaaaccgctattttgaataatgtgaaataaataaaatgcaatatttcattcaacacaaaa

SEQ ID NO: 201160 - DNA, 3408 bp, Artificial Sequence
  derived and/or modified sequence
atgcaccagatgaacgccaagatgcacttcagattcgtgttcgccctgctgatcgtgagcttcaaccacgacgtgctgggcaagaacctgaagtacagaatctacgaggagcagagagtgggcagcgtgatcgccagactgagcgaggacgtggccgacgtgctgctgaagctgcccaaccccagcaccgtgagattcagagccatgcagagaggcaacagccccctgctggtggtgaacgaggacaacggcgagatcagcatcggcgccaccatcgacagagagcagctgtgccagaagaacctgaactgcagcatcgagttcgacgtgatcaccctgcccaccgagcacctgcagctgttccacatcgaggtggaggtgctggacatcaacgacaacagcccccagttcagcagaagcctgatccccatcgagatcagcgagagcgccgccgtgggcaccagaatccccctggacagcgccttcgaccccgacgtgggcgagaacagcctgcacacctacagcctgagcgccaacgacttcttcaacatcgaggtgagaaccagaaccgacggcgccaagtacgccgagctgatcgtggtgagagagctggacagagagctgaagagcagctacgagctgcagctgaccgccagcgacatgggcgtgccccagagaagcggcagcagcatcctgaagatcagcatcagcgacagcaacgacaacagccccgccttcgagcagcagagctacatcatccagctgctggagaacagccccgtgggcaccctgctgctggacctgaacgccaccgaccccgacgagggcgccaacggcaagatcgtgtacagcttcagcagccacgtgagccccaagatcatggagaccttcaagatcgacagcgagagaggccacctgaccctgttcaagcaggtggactacgagatcaccaagagctacgagatcgacgtgcaggcccaggacctgggccccaacagcatccccgcccactgcaagatcatcatcaaggtggtggacgtgaacgacaacaagcccgagatcaacatcaacctgatgagccccggcaaggaggagatcagctacatcttcgagggcgaccccatcgacaccttcgtggccctggtgagagtgcaggacaaggacagcggcctgaacggcgagatcgtgtgcaagctgcacggccacggccacttcaagctgcagaagacctacgagaacaactacctgatcctgaccaacgccaccctggacagagagaagagaagcgagtacagcctgaccgtgatcgccgaggacagaggcacccccagcctgagcaccgtgaagcacttcaccgtgcagatcaacgacatcaacgacaaccccccccacttccagagaagcagatacgagttcgtgatcagcgagaacaacagccccggcgcctacatcaccaccgtgaccgccaccgaccccgacctgggcgagaacggccaggtgacctacaccatcctggagagcttcatcctgggcagcagcatcaccacctacgtgaccatcgaccccagcaacggcgccatctacgccctgagaatcttcgaccacgaggaggtgagccagatcaccttcgtggtggaggccagagacggcggcagccccaagcagctggtgagcaacaccaccgtggtgctgaccatcatcgacgagaacgacaacgtgcccgtggtgatcggccccgccctgagaaacaacaccgccgagatcaccatccccaagggcgccgagagcggcttccacgtgaccagaatcagagccatcgacagagacagcggcgtgaacgccgagctgagctgcgccatcgtggccggcaacgaggagaacatcttcatcatcgaccccagaagctgcgacatccacaccaacgtgagcatggacagcgtgccctacaccgagtgggagctgagcgtgatcatccaggacaagggcaacccccagctgcacaccaaggtgctgctgaagtgcatgatcttcgagtacgccgagagcgtgaccagcaccgccatgaccagcgtgagccaggccagcctggacgtgagcatgatcatcatcatcagcctgggcgccatctgcgccgtgctgctggtgatcatggtgctgttcgccaccagatgcaacagagagaagaaggacaccagaagctacaactgcagagtggccgagagcacctaccagcaccaccccaagagacccagcagacagatccacaagggcgacatcaccctggtgcccaccatcaacggcaccctgcccatcagaagccaccacagaagcagccccagcagcagccccaccctggagagaggccagatgggcagcagacagagccacaacagccaccagagcctgaacagcctggtgaccatcagcagcaaccacgtgcccgagaacttcagcctggagctgacccacgccacccccgccgtggagcaggtgagccagctgctgagcatgctgcaccagggccagtaccagcccagacccagcttcagaggcaacaagtacagcagaagctacagatacgccctgcaggacatggacaagttcagcctgaaggacagcggcagaggcgacagcgaggccggcgacagcgactacgacctgggcagagacagccccatcgacagactgctgggcgagggcttcagcgacctgttcctgaccgacggcagaatccccgccgccatgagactgtgcaccgaggagtgcagagtgctgggccacagcgaccagtgctggatgccccccctgcccagccccagcagcgactacagaagcaacatgttcatccccggcgaggagttccccacccagccccagcagcagcacccccaccagagcctggaggacgacgcccagcccgccgacagcggcgagaagaagaagagcttcagcaccttcggcaaggacagccccaacgacgaggacaccggcgacaccagcaccagcagcctgctgagcgagatgagcagcgtgttccagagactgctgccccccagcctggacacctacagcgagtgcagcgaggtggacagaagcaacagcctggagagaagaaagggccccctgcccgccaagaccgtgggctacccccagggcgtggccgcctgggccgccagcacccacttccagaaccccaccaccaactgcggcccccccctgggcacccacagcagcgtgcagcccagcagcaagtggctgcccgccatggaggagatccccgagaactacgaggaggacgacttcgacaacgtgctgaaccacctgaacgacggcaagcacgagctgatggacgccagcgagctggtggccgagatcaacaagctgctgcaggacgtgagacagagctag

SEQ ID NO: 201161 - protein, 245 aa, Artificial Sequence
  derived and/or modified sequence
MAGLELLSDQGYRVDGRRAGELRKIQARMGVFAQADGSAYIEQGNTKALAVVYGPHEIRGSRARALPDRALVNCQYSSATFSTGERKRRPHGDRKSCEMGLQLRQTFEAAILTQLHPRSQIDIYVQVLQADGGTYAACVNAATLAVLDAGIPMRDFVCACSAGFVDGTALADLSHVEEAAGGPQLALALLPASGQIALLEMDARLHEDHLERVLEAAAQAARDVHTLLDRVVRQHVREASILLGD

SEQ ID NO: 201162 - DNA, 738 bp, Artificial Sequence
  derived and/or modified sequence
atggcaggcttggagcttctgtccgatcaaggctatagggtcgatggacggagggcaggagaactgagaaaaattcaggcccggatgggagtttttgcgcaggccgacgggagtgcctacatcgaacagggaaacaccaaggctcttgcagtcgtgtacgggcctcatgaaatacgggggagtagagcccgcgctctaccggatcgagccctggtgaattgtcagtacagctcagccacattttcgactggggagagaaagcgccgccctcacggcgatcgcaagagctgcgagatggggctccaacttcgccagacgttcgaggcggcaattctgacgcagctgcaccctcgctcacagattgacatttatgtgcaggtgttacaggctgacgggggtacttacgccgcctgcgttaacgcagccaccctggcagtgctggacgccgggataccaatgagagacttcgtctgtgcatgtagcgccggctttgtcgacggtacagccttggcagacttgagccatgttgaagaagccgcaggagggccgcagctggccctggccttgctgcctgcttccggacagattgccctgttagaaatggatgcccgtctacatgaagatcacttagagcgggttcttgaggcagccgcccaggctgcccgagatgtacacactcttctcgatagggttgtacggcagcacgtcagggaagccagcattctgctcggggactag

SEQ ID NO: 201163 - DNA, 738 bp, Artificial Sequence
  derived and/or modified sequence
atggccggcctggagctgctgagtgaccagggctacagagtggatggaagaagagctggggagctgaggaagatccaggccaggatgggcgtgtttgcccaggctgatggcagcgcctacatcgagcagggcaacaccaaggccctggccgtggtgtatggcccccatgagatccggggcagccgggcccgggccctgcctgaccgggccctggtgaactgccagtacagcagcgccaccttcagcactggagagaggaagaggcggccccatggagacaggaagagctgtgagatgggcctgcagctgcggcagacctttgaagctgccatcctgacccagctgcaccccaggagccagattgacatctacgtgcaggtgctgcaggctgatggcggcacctacgccgcctgtgtgaatgctgccaccctggccgtgctggatgctggcatccccatgagggactttgtgtgtgcctgcagcgctggctttgtggatggaacagccctggccgacctgagccacgtggaggaggccgccggcggcccccagctggccctggccctgctgcctgccagcggccagatcgccctgctggagatggatgcccggctgcacgaggaccacctggagcgggtgctggaggccgccgcccaggccgccagagatgtgcacaccctgctggacagagtggtgcggcagcacgtgcgggaggccagcatcctgctgggggactag

SEQ ID NO: 201164 - DNA, 738 bp, Artificial Sequence
  derived and/or modified sequence
atggccggcctggagctgctgagcgaccagggctaccgggtggacgggagaagagccggcgaattgagaaagatccaggcccgcatgggggtgtttgctcaggctgatgggtccgcttacatcgaacagggtaacacaaaggcacttgctgtggtgtatggcccccacgaaattcgcggctcgcgcgcacgggcgttgcctgacagggcgctggtgaactgtcagtactcaagtgctaccttctccacaggcgaacgcaagaggcgaccacacggtgatcgcaagagttgtgaaatgggcctgcagctgaggcagacattcgaggcggctatactcacacagctacatcccaggtcccagattgacatctatgtgcaagtgctgcaagccgatggcggcacttacgcagcatgcgttaacgctgcaaccctcgctgtgctggacgcggggataccgatgagagatttcgtgtgtgcctgtagcgcggggtttgtggatggcaccgcactagccgatctgtcccacgtcgaagaagcagctgggggtccccagctcgctttagccctgctgcccgctagcggccagattgccctgttggaaatggacgctagacttcacgaggaccacttggaaagggtcttagaagccgctgctcaggcagctcgggacgtgcacacccttttagacagggtggtacggcagcacgttcgtgaagcctcaatcttgctcggagactag

SEQ ID NO: 201165 - DNA, 738 bp, Artificial Sequence
  derived and/or modified sequence
atggccggactggagctgctcagcgaccagggctatagggtggatgggcgaagggccggtgaactgcgcaagatccaagctagaatgggtgtctttgcgcaggcagatggaagtgcttacatcgagcaagggaatacgaaggccctggctgttgtgtacggaccacacgagattcgtggcagtcgcgctagggccctcccggatagagctctggtgaactgtcagtactcctccgcaaccttctctaccggggaacgcaagcgtcgccctcatggggatcgtaagagttgtgagatgggactgcagctgcggcagacatttgaggccgctatcctcacccaactgcatcccaggagccagatcgatatctacgtgcaggtcttgcaggctgacggcggaacgtacgcagcttgcgtgaatgccgcaaccctggctgtactggatgcaggcatccccatgcgcgatttcgtgtgcgcctgttctgcaggcttcgtggacggcaccgctctggccgacttgagtcatgtggaagaggccgctggaggcccacaacttgccctggccctgctgcccgcatccgggcagatagctctgctggagatggatgccagattacacgaagaccatctggaaagagtgcttgaggcagccgcacaggctgctcgtgacgttcacactcttttggaccgcgtggtaaggcaacacgtccgcgaggcttctatcctcctaggtgactag

SEQ ID NO: 201166 - DNA, 887 bp, Artificial Sequence
  derived and/or modified sequence
acctccggaaaccgtagattccgggcggtcggagccgccgggagctgtagttctcccgcggctcagagaagtaggcagagagcggacctggcggccgggcagcatggcggggctggagctcttgtcggaccagggctaccgggtggacgggcggcgcgccggggagctgcgcaagatccaggcgcggatgggcgtgttcgcgcaggctgacggctcggcctacattgagcagggcaacaccaaggcactggctgtggtctacggcccgcacgagatccggggctcccgggctcgagccctgccggacagggccctagtgaactgtcaatatagttcagcgaccttcagcacaggtgagcgcaagcgacggccacatggggaccgtaagtcctgtgagatgggcctgcagctccgccagactttcgaagcagccatcctcacacagctgcacccacgctcccagattgatatctatgtgcaggtgctacaggcagatggtgggacctatgcagcttgtgtgaatgcagccacgctggcagtgctggatgccgggatacccatgagagactttgtgtgtgcgtgctcagctggcttcgtggacggcacagccctggcggacctcagccatgtggaggaagcagctggtggcccccagctggccctggccctgctgccagcctcaggacagattgcgctgcttgagatggatgcccggctgcacgaggaccacctggagcgggtgttggaggctgctgcccaggctgcccgagatgtgcacaccctcttagatcgagtggtccggcagcatgtgcgtgaggcctctatcttgctgggggactgaccacccagccacccatgtccagaataaaaccctcctctgcccacac

SEQ ID NO: 201167 - DNA, 738 bp, Artificial Sequence
  derived and/or modified sequence
atggccggcctggagctgctgagcgaccagggctacagagtggacggcagaagagccggcgagctgagaaagatccaggccagaatgggcgtgttcgcccaggccgacggcagcgcctacatcgagcagggcaacaccaaggccctggccgtggtgtacggcccccacgagatcagaggcagcagagccagagccctgcccgacagagccctggtgaactgccagtacagcagcgccaccttcagcaccggcgagagaaagagaagaccccacggcgacagaaagagctgcgagatgggcctgcagctgagacagaccttcgaggccgccatcctgacccagctgcaccccagaagccagatcgacatctacgtgcaggtgctgcaggccgacggcggcacctacgccgcctgcgtgaacgccgccaccctggccgtgctggacgccggcatccccatgagagacttcgtgtgcgcctgcagcgccggcttcgtggacggcaccgccctggccgacctgagccacgtggaggaggccgccggcggcccccagctggccctggccctgctgcccgccagcggccagatcgccctgctggagatggacgccagactgcacgaggaccacctggagagagtgctggaggccgccgcccaggccgccagagacgtgcacaccctgctggacagagtggtgagacagcacgtgagagaggccagcatcctgctgggcgactag

SEQ ID NO: 201168 - protein, 424 aa, Artificial Sequence
  derived and/or modified sequence
MAAVATCGSVAASTGSAVATASKSNVTSFQRRGPRASVTNDSGPRLVSIAGTRPSVRNGQLLVSTGLPALDQLLGGGLAVGTVLLIEEDKYNIYSPLLFKYFLAEGIVNGHTLLVASAKEDPANILQELPAPLLDDKCKKEFDEDVYNHKTPESNIKMKIAWRYQLLPKMEIGPVSSSRFGHYYDASKRMPQELIEASNWHGFFLPEKISSTLKVEPCSLTPGYTKLLQFIQNIIYEEGFDGSNPQKKQRNILRIGIQNLGSPLWGDDICCAENGGNSHSLTKFLYVLRGLLRTSLSACIITMPTHLIQNKAIIARVTTLSDVVVGLESFIGSERETNPLYKDYHGLIHIRQIPRLNNLICDESDVKDLAFKLKRKLFTIERLHLPPDLSDTVSRSSKMDLAESAKRLGPGCGMMAGGKKHLDF

SEQ ID NO: 201169 - DNA, 1275 bp, Artificial Sequence
  derived and/or modified sequence
atggccgccgtagcgacctgcggtagtgtggccgcatccaccggcagcgctgtggctacggccagtaagtctaatgtcactagtttccagcgcaggggtccccgggccagcgtaaccaacgacagtggcccccgactagtgagtatcgccggaaccagaccgtctgttcgtaacggtcagctgctagtatcaaccggactgccagctttggaccaactgcttgggggcggcctcgccgtgggaacagtactgctgattgaggaggataagtacaacatctatagcccgctgttgttcaaatactttctcgcagagggcatagtcaacggacatacactgctggttgcctctgccaaagaagacccagccaatattttgcaggaacttcctgcccctttgctggacgacaagtgcaaaaaggagtttgacgaagatgtttataatcacaagactcccgagtcaaatattaaaatgaaaatcgcctggcgctaccagctgttgcccaaaatggagattggacctgtctcttccagcaggtttggacattattatgacgcaagtaaaaggatgccccaggaactgatagaagcctccaactggcatggcttcttcctgcccgaaaagattagcagcaccttaaaagtcgaaccttgctcacttacaccagggtatacgaagttgctgcagttcatacagaacatcatctatgaagaaggcttcgacggctcaaacccccagaagaagcagcgcaacattctgaggatcgggattcagaacctgggttcaccactgtggggggatgatatttgctgtgctgagaacggtggaaattctcattctttgaccaaattcctatacgtcctccgcggactcctccgcaccagcctctcagcctgtatcatcaccatgccaacacaccttattcaaaacaaggcgatcattgctcgtgttacaacgctgagcgacgtggtagtcggactggagagtttcattggttcagagcgggaaaccaatccactgtacaaagattatcacggtctgatccacatacgacagataccccgacttaataacctcatctgcgatgaaagcgatgtgaaagatttagcgtttaagctgaaaagaaaactgtttaccatcgaacgtctgcatctgccaccggatttaagcgataccgtctccagatccagcaaaatggacctcgccgagtctgcaaaaaggctgggccctggctgtggcatgatggccggcggcaaaaaacatctggacttctag

SEQ ID NO: 201170 - DNA, 1275 bp, Artificial Sequence
  derived and/or modified sequence
atggctgctgtggccacctgtggctctgtggccgccagcacaggcagcgctgtggccacagccagcaagagcaatgtgaccagcttccagaggcggggcccccgggcctctgtgaccaatgacagcggcccccggctggtgtccattgctggcacccggcccagcgtgagaaatggccagctgctggtgtccacaggcctgcctgccctggaccagctgctgggcggcggcctggccgtgggcaccgtgctgctgattgaggaggacaagtacaacatctacagccccctgctcttcaagtacttcctggccgagggcatcgtgaatggccacaccctgctggtggccagcgccaaggaggaccctgccaacatcctgcaggagctgcctgcccccctgctggatgacaagtgcaagaaggagtttgatgaagatgtgtacaaccacaagaccccagagagcaacatcaagatgaagatcgcctggagataccagctgctgcccaagatggagatcggccctgtgagcagcagccgcttcggccactactatgatgccagcaagaggatgccccaggagctgattgaggccagcaactggcacggcttcttcctgcctgagaagatcagcagcaccctgaaggtggagccctgcagcctgaccccaggctacaccaagctgctgcagttcatccagaacatcatctatgaggagggctttgatggcagcaacccccagaagaagcagaggaacatcctgagaattggcatccagaacctgggcagccccctgtggggagatgacatctgctgtgctgaaaatggaggcaacagccacagcctgaccaagttcctgtatgtgctgcggggcctgctgcggaccagcctgagcgcctgcatcatcaccatgcccacccacctgatccagaacaaggccatcatcgcccgggtgaccaccctgagtgatgtggtggtgggcctggagagcttcatcggcagcgagcgggagaccaaccccctgtacaaggactaccacggcctcatccacatccggcagatcccccggctgaacaacctgatctgtgatgaaagtgatgtgaaggacctggccttcaagctgaagaggaagctgttcaccatcgagcggctgcacctgcccccagacctgagtgacacagtgagccgcagcagcaagatggacctggccgagagcgccaagaggctgggccctggctgcggcatgatggccggcggcaagaagcacctggacttctag

SEQ ID NO: 201171 - DNA, 1275 bp, Artificial Sequence
  derived and/or modified sequence
atggccgccgtggccacctgcggcagcgtggccgccagcaccggctccgcagtcgccacagcttcaaaatcaaatgttacctctttccagagacggggtccacgcgccagtgtcacgaatgatagtggtccaaggcttgtgagcatcgccggaaccagaccctccgtgcgaaatggtcagctgctcgtgtcaactggcctgccggcgttggaccagctgcttggcgggggactcgcggttggcactgtgctgctcatcgaggaggataaatataacatctactctccccttctgtttaagtatttcttagccgaggggattgtcaatgggcataccctgctagtcgcttctgccaaagaggatccagccaacattctgcaggagctgcccgcccctctgttagatgacaaatgtaaaaaagagtttgatgaagacgtatacaaccacaaaacaccagagagcaatatcaaaatgaaaatcgcatggcggtaccagcttttaccgaaaatggagatcggccccgtttctagtagcaggtttggccactactatgatgccagtaaacggatgccccaggaactcatcgaggcatccaactggcatgggttctttctgcctgaaaagattagctccaccctgaaggtggaaccatgttccctgacaccagggtatacgaaattactgcagtttatccagaatatcatatacgaggaggggttcgacggatcaaacccgcaaaagaaacagagaaacattctgagaattggaattcagaacctgggatccccactctggggggatgacatttgttgcgccgaaaacggcggcaatagccattcactcaccaagtttttatatgtactgagagggctcctccggactagtttgagtgcatgtattattactatgcccactcacctcatccagaacaaggcgataatcgcacgcgtaacaaccctgtccgatgtcgttgttggcctggaatcattcattgggtcagagagggagactaatcccctctacaaggattaccacggcttgattcatattagacaaattccaaggctgaataatctgatatgcgacgaatcagatgtgaaggatcttgcctttaaattaaaacgcaaactgttcactatcgagagactccaccttcctccagatctgagtgataccgtaagtcgtagttctaaaatggatctggccgaaagcgccaagaggttaggccctgggtgtgggatgatggcaggcgggaagaagcacctggacttctag

SEQ ID NO: 201172 - DNA, 1275 bp, Artificial Sequence
  derived and/or modified sequence
atggccgctgttgcaacctgcggctcagtggccgcatcaacaggtagcgccgtcgcaaccgcttctaagtctaatgtcacgtcttttcagaggcgcggaccgagagcgtcagtgacaaacgacagtggccctcgtctggtaagcatagcgggtacaaggccatcggttaggaacggccagcttttggtttcaacaggcctgccagccctggaccaattgctcggcggtggtctcgccgtcggcacggtgctgcttattgaagaagacaagtataacatctatagccctttactgtttaagtactttcttgctgaaggcattgtcaatggacacactttacttgtagcttctgctaaagaagatcctgccaatattctacaggaattaccagccccactgctggacgataagtgtaaaaaagagtttgacgaagacgtatacaatcacaaaacccctgagagcaatatcaagatgaaaattgcttggcgatatcagctactcccaaagatggaaattggccctgtttcttccagtcgcttcggacattattacgatgcgtccaagagaatgccacaagagcttatcgaggctagcaattggcacggcttctttctgcccgaaaaaattagtagtaccctgaaagttgaaccctgctctctgaccccaggatacaccaaactccttcagttcatacaaaatataatttacgaggaaggattcgacggctctaaccctcagaagaagcagcgcaatattttgcggatcggaatacaaaacctagggtctcctctttggggcgatgatatctgctgcgcggaaaacggtggcaactcccactcccttaccaagtttctctatgtccttcgtggtctgcttaggacctccctgagcgcgtgcattatcactatgccaactcacctaatccagaataaggcgataatcgccagggttacgaccctgtccgacgtcgtggtcggcctggagtcgtttattggcagtgagcgggagacaaacccactctataaagattaccatggcctcatccatatcagacaaatcccccgactgaataatttgatttgcgacgaaagcgatgtcaaagacctcgcttttaaactgaagagaaagctgtttacaatcgagaggctgcacttaccaccagatctgtccgatactgtttctcgttccagcaaaatggacctcgccgaaagtgccaagcggttggggccaggctgtggcatgatggccggtggaaaaaagcacctcgacttttag

SEQ ID NO: 201173 - DNA, 1275 bp, Artificial Sequence
  derived and/or modified sequence
atggccgccgtggccacctgcggcagcgtggccgccagcaccggcagcgccgtggccaccgccagcaagagcaacgtgaccagcttccagagaagaggccccagagccagcgtgaccaacgacagcggccccagactggtgagcatcgccggcaccagacccagcgtgagaaacggccagctgctggtgagcaccggcctgcccgccctggaccagctgctgggcggcggcctggccgtgggcaccgtgctgctgatcgaggaggacaagtacaacatctacagccccctgctgttcaagtacttcctggccgagggcatcgtgaacggccacaccctgctggtggccagcgccaaggaggaccccgccaacatcctgcaggagctgcccgcccccctgctggacgacaagtgcaagaaggagttcgacgaggacgtgtacaaccacaagacccccgagagcaacatcaagatgaagatcgcctggagataccagctgctgcccaagatggagatcggccccgtgagcagcagcagattcggccactactacgacgccagcaagagaatgccccaggagctgatcgaggccagcaactggcacggcttcttcctgcccgagaagatcagcagcaccctgaaggtggagccctgcagcctgacccccggctacaccaagctgctgcagttcatccagaacatcatctacgaggagggcttcgacggcagcaacccccagaagaagcagagaaacatcctgagaatcggcatccagaacctgggcagccccctgtggggcgacgacatctgctgcgccgagaacggcggcaacagccacagcctgaccaagttcctgtacgtgctgagaggcctgctgagaaccagcctgagcgcctgcatcatcaccatgcccacccacctgatccagaacaaggccatcatcgccagagtgaccaccctgagcgacgtggtggtgggcctggagagcttcatcggcagcgagagagagaccaaccccctgtacaaggactaccacggcctgatccacatcagacagatccccagactgaacaacctgatctgcgacgagagcgacgtgaaggacctggccttcaagctgaagagaaagctgttcaccatcgagagactgcacctgccccccgacctgagcgacaccgtgagcagaagcagcaagatggacctggccgagagcgccaagagactgggccccggctgcggcatgatggccggcggcaagaagcacctggacttctag

SEQ ID NO: 201174 - DNA, 1784 bp, Artificial Sequence
  derived and/or modified sequence
agagttcctattgggttaacactggaggctctaagatggcggcagtggcaacctgcggtagtgttgccgcgagtactgggtctgcagtggcgacagccagcaagagcaacgtcaccagtttccagaggaggggtcctagagccagcgtgaccaacgacagcggccctcgactggtgtccattgcgggcacgcgaccgtcggtgcggaatggacagctgctggtatcaaccgggctcccagccctagaccagctcttaggtggaggtttagccgttggaacagttcttctaattgaggaggataaatataatatttactcacctttgctcttcaagtatttcctggcagaaggaattgtcaatgggcatactttgttggttgcatctgctaaagaggatcctgccaacattttacaggaacttccagcaccattacttgatgataaatgtaaaaaggaatttgatgaagatgtatacaatcataaaacaccagaatctaatattaagatgaaaatagcttggcgttaccagttattacccaagatggagattggaccagtatcatcttcaagatttggtcactattatgatgcatcaaaaagaatgccacaagaactaattgaggcttcaaattggcatggattttttcttccagagaaaatatcttcaactctcaaagtagaaccctgttctttgacccctggctacacaaagctgcttcagtttatccagaacatcatttatgaggaaggatttgatggatccaatcctcagaaaaaacagagaaacattttaagaataggaattcagaatcttggctcacctttatggggagacgatatttgctgtgcagaaaatggtggcaacagtcacagccttaccaagttcctctatgttctccgtggtcttctgagaacctctctttcagcctgcatcatcacaatgccaacacatctgatccagaataaagccattattgcccgtgtcacaaccttgtcagatgtagtagttggtctggaatcatttattggttctgagagagaaactaacccattgtataaggattatcatggattgattcatatacggcagattcctcggcttaataacttgatctgtgatgaatcagatgtcaaagacttagcttttaaattaaaaaggaagctattcaccattgagcgactgcatttgcctccagacttgtcagacacagtgagccgctcaagcaaaatggatctggcagaatccgccaagcggctgggcccaggctgtggcatgatggccggaggcaagaagcacctggacttctagggattcctccttagtcgctgcatgcagaattctatgacactctaattatgattgctaatagcttatgtaaatatttttcttaacaatttgaccctccactccttgaaaaacacaggattataaaatggtgccgccatttctcattttttaactttttacagaactagcacagcagaaatacttttaaatttttccttcatgctctagagaaaataattttatttttaaataaacgccaaaaaatgtcaaaatctcaagattcctgacagtggtcattcgtgtgtgtactaaggcatttagtgtcatggtaaagtgcatgtcacagcaggtagcatacaaaacatgatgaaattcaagattgtatgtgaaaacatactttctctttattacagaaacagtcacttgccaccaaaaatgctgttttttaaatgaaaatgtgtttactaatatataaaataaatttgcatttatgta

SEQ ID NO: 201175 - protein, 1007 aa, Artificial Sequence
  derived and/or modified sequence
MGSGGDSLLGGRGSLPLLLLLIMGGMAQDSPPQILVHPQDQLFQGPGPARMSCQASGQPPPTIRWLLNGQPLSMVPPDPHHLLPDGTLLLLQPPARGHAHDGQALSTDLGVYTCEASNRLGTAVSRGARLSVAVLREDFQIQPRDMVAVVGEQFTLECGPPWGHPEPTVSWWKDGKPLALQPGRHTVSGGSLLMARAEKSDEGTYMCVATNSAGHRESRAARVSIQEPQDYTEPVELLAVRIQLENVTLLNPDPAEGPKPRPAVWLSWKVSGPAAPAQSYTALFRTQTAPGGQGAPWAEELLAGWQSAELGGLHWGQDYEFKVRPSSGRARGPDSNVLLLRLPEKVPSAPPQEVTLKPGNGTVFVSWVPPPAENHNGIIRGYQVWSLGNTSLPPANWTVVGEQTQLEIATHMPGSYCVQVAAVTGAGAGEPSRPVCLLLEQAMERATQEPSEHGPWTLEQLRATLKRPEVIATCGVALWLLLLGTAVCIHRRRRARVHLGPGLYRYTSEDAILKHRMDHSDSQWLADTWRSTSGSRDLSSSSSLSSRLGADARDPLDCRRSLLSWDSRSPGVPLLPDTSTFYGSLIAELPSSTPARPSPQVPAVRRLPPQLAQLSSPCSSSDSLCSRRGLSSPRLSLAPAEAWKAKKKQELQHANSSPLLRGSHSLELRACELGNRGSKNLSQSPGAVPQALVAWRALGPKLLSSSNELVTRHLPPAPLFPHETPPTQSQQTQPPVAPQAPSSILLPAAPIPILSPCSPPSPQASSLSGPSPASSRLSSSSLSSLGEDQDSVLTPEEVALCLELSEGEETPRNSVSPMPRAPSPPTTYGYISVPTASEFTDMGRTGGGVGPKGGVLLCPPRPCLTPTPSEGSLANGWGSASEDNAASARASLVSSSDGSFLADAHFARALAVAVDSFGFGLEPREADCVFIDASSPPSPRDEIFLTPNLSLPLWEWRPDWLEDMEVSHTQRLGRGMPPWPPDSQISSQRSQLHCRMPKAGASPVDYS

SEQ ID NO: 201176 - DNA, 3024 bp, Artificial Sequence
  derived and/or modified sequence
atgggcagtgggggcgactccctcttgggaggaagggggtctctgcctctgttactgctgctgattatgggaggcatggcccaggacagccccccacagatcctggtgcaccctcaggatcagctgttccaggggcctggtcccgcccggatgtcatgtcaggcttcaggtcagccacccccaaccatcagatggttattgaacggccaaccactgagtatggtgccacctgaccctcatcacctcctgcctgacgggaccctcttactgcttcagccgccggcaagggggcacgcacatgacggccaggccctaagcacagatctaggagtatatacctgcgaggcctctaatcgactaggcaccgccgtcagtaggggggcccgccttagcgtcgccgtcttgcgagaggacttccaaattcagccccgggatatggtggctgtggttggcgaacaatttacgctggaatgtggacctccatggggccatcccgagccaaccgtgtcttggtggaaggacggcaaacctctggctttacaacccggacgccataccgtgagcggtggctcactgctgatggcccgggcggagaagtccgacgaaggcacatatatgtgcgtggccacaaacagcgccggacatcgcgagtctcgggccgcacgcgtgtccatacaggaaccacaggactatactgagcccgtggaattgctggcggtgcggatccagctggaaaacgttactttgttgaacccagatcccgctgaaggtcccaaacctcggccagcagtctggctgagctggaaggtgagcggaccggctgctccagcccagtcatacacagccttgttccgcacccagacagcgcccggaggacagggggctccctgggctgaggaactgctcgctggttggcagtccgctgagctgggcggtctgcactgggggcaggattacgaattcaaggtgcgtccatcaagcgggcgcgcgagaggtcctgattctaacgtgttgctgctgcgcctgcctgaaaaggttcctagcgcaccgccacaggaggtgacgcttaagcctggtaacgggacagttttcgtatcatgggtgcctcctcccgccgagaatcataatggcatcatccgcgggtatcaggtctggtctctcggtaacacctcccttccccctgccaattggactgtggtaggggagcagacccagctggagatcgcaacgcatatgccgggttcctattgcgtccaggttgcagctgttacaggcgctggagccggggagccatccagacccgtgtgtctcctattggagcaggccatggagcgtgccacgcaggaaccctcagagcacggcccgtggaccctcgagcagctcagggccacactgaagagacctgaagttattgccacttgtggcgtggctttgtggcttctcctgctgggcactgcagtatgcattcatcggagacggcgcgcccgcgtccacctcggccccggcctttaccgctacacaagcgaggacgctatattgaaacaccgcatggaccactctgattctcagtggttggcagatacctggagatccactagcgggagcagggatctgtctagcagcagtagtctgagcagtcgcctgggggcagatgctcgggacccactagattgccggcggagtctcctctcgtgggattctagatcgccaggagtccccctgctgccagataccagtacgttttacggcagcctcatcgcggagctccctagcagcacgcctgcacgcccatccccacaggttcctgccgtcaggcgtctcccaccgcagctggcccaactaagctccccatgtagctcatctgattccctttgttctcgccgcggactctctagtccgcgcttgtcgctcgcacccgctgaagcctggaaggccaagaagaagcaggagttgcaacatgcgaatagttcacctctgctgagaggatcacactctctggagctgcgagcctgcgagttaggtaacagagggtcaaagaacctttcccagtcccccggggctgtcccacaggccctcgttgcatggcgagccctcggcccgaagcttctgtcatcgtccaatgagctggtgacgcgccacctgcctccagctcctctcttcccgcacgagaccccacccacacagtctcaacaaactcagccacccgtggcgccacaggccccctcaagcattctcctgcctgcagctcctatcccaatcctgagtccttgctcaccgcctagcccgcaagctagcagcttgtctggtccctctccagcttcaagccgactatcaagtagctctcttagtagccttggcgaggaccaagacagcgtactgactcccgaggaagtcgccctatgcttggagctctctgaaggcgaggaaactcctcgaaattcggtttccccaatgccgagagctcccagccctccaactacctacggctatatcagcgtgcccaccgcgtccgaattcaccgatatgggtcgaaccggaggaggcgtaggcccaaaggggggtgttcttctgtgtccacccagaccttgcctgacgcctactccatcagaagggtctctggccaatggatggggctccgcctccgaggacaatgctgcaagtgcccgcgccagcctggtttctagcagtgacggcagctttctggccgacgcccatttcgcccgcgccttggccgtggctgttgattcgttcggtttcggccttgaacctcgcgaggcggactgtgtctttatagacgcttcatcaccaccaagcccacgagatgaaatttttctcactccaaacctcagcctacccctgtgggagtggcggcctgattggttggaggatatggaggtcagtcacacccagcgtctgggccgcggcatgcccccatggcccccagactcccaaataagtagtcagaggagccaactgcattgtaggatgcccaaagcaggtgcatcaccggttgattacagctag

SEQ ID NO: 201177 - DNA, 2106 bp, Artificial Sequence
  derived and/or modified sequence
atgggttccggaggcgacagcctcttgggcggcaggggcagcctccccctgctcctgctgctgatcatggtattaagagaggattttcaaatccaacccagggacatggtggcggtggtgggcgagcagtttactctcgaatgcgggcctccatggggtcaccccgagccaacagtctcttggtggaaggacggcaagcccctggccttgcagcctggaaggcacacggtatctggtgggagcctgctcatggctagggccgagaaaagcgacgagggaacgtacatgtgcgttgccacgaatagcgcggggcacagagagtcccgtgctgcccgggttagtatccaggagcctcaggactatacagagcccgtggagctgttggccgtcaggattcagctggaaaatgtcacgctcctgaacccggatcctgctgagggaccaaagccgagacctgccgtctggttaagctggaaggttagtggccccgccgcgccagcccagagttatacagcattgttccgcacgcagaccgcacctggggggcaaggcgccccatgggctgaggagttgctcgcagggtggcagtcagcggaactcggcggccttcattggggtcaggactatgagttcaaggtgagacctagcagcggcagggcgcgggggccagacagtaatgtgctgttgttacggttacctgagaaggttccatccgccccgcctcaggaagttactctgaaacccggcaacggtaccgtctttgtatcttgggtgcccccccctgccgaaaaccacaacggaatcattagggggtatcaggtgtggagccttgggaataccagcctaccacccgcaaattggacagttgtgggcgagcagacacagctggaaatcgccacgcacatgcccggttcttattgcgtacaggtggcggccgtcacaggtgccggtgcgggagagccctcccggcctgtctgcctcttgctggagcaagcaatggagcgcgctacacaagaaccaagcgagcatgggccctggaccctggagcaacttagagcaacacttaaacggcccgaggtgattgctacctgtggcgtggccttatggttgttactgcttggcaccgctgtctgcattcacaggcggaggagagcaagagtgcacctgggccccggcctgtatcgttacactagtgaagacgccattttaaagcatcgcatggatcattccgatagccagtggcttgccgacacgtggagaagtacctcgggctctagggacttgtcttcgagtagctcgctttcctctagacttggagcagatgctagagacccgcttgactgcagacggagtttactctcatgggactcgaggtcaccaggcgtgccgctgctcccggatacttctaccttttacggaagcctgatagctgagctgccctcatccacaccagctcgtccaagcccgcaggtgccagcagtcagacggctcccgccgcagctggcccagttgtcatccccatgcagcagctcagactctctgtgctccaggaggggtctgagcagtccaaggctgtctttggcccctgcggaagcttggaaggctaaaaagaaacaggagctgcagcatgcgaactccagtccactcctgcggggctctcactctttggaactaagagcatgcgaactgggcaacagaggtagcaagaatttgagccaaagtccaggcgcagttccacaggcattagtcgcgtggcgtgcccttgggcctaagcttctcagttcttccaacgagctcgttaccagacatctaccacctgctcccctctttcctcacgaaacccctccgacccagtctcagcagacgcagcctcctgtggcaccacaggcaccaagcagcatcctgctgcctgcagctcccattccgatcttaagtccgtgttctccaccatcaccacaggcctcatctctgagtgggcccagccccgcctccagcagactctcatcttcctctctcagcagtctcggcgaagatcaggattccgtgctcactccagaggaggtcgctctatgccttgaattgtcagagggagaagagaccccctag

SEQ ID NO: 201178 - DNA, 2589 bp, Artificial Sequence
  derived and/or modified sequence
atggttgccgttgttggcgaacagtttactctggagtgcggccccccttggggacaccctgagccgacagtcagttggtggaaagatggcaaacccctggcactccaacccgggcggcatactgtgagcggtggaagcctgctcatggctagggcagagaaatcggacgaaggaacatatatgtgcgtcgcgaccaacagcgctggccatcgcgaaagtagagccgctcgggtttcgatccaggaacctcaggactatacagagcccgtggagctgctggcggtcagaatccagctcgagaatgttaccctgctgaacccagatccagccgaaggtcccaaacctcgccctgcagtgtggctgtcttggaaagtgtccggacctgccgcgcctgcccagagttataccgccctgttcagaacgcaaacagctcccggaggtcaaggtgcaccgtgggccgaagaactgctcgcgggatggcagagtgctgagttagggggcctgcactggggccaagactacgagtttaaagtgcgcccctcctccggtcgggcaagaggccccgacagcaacgtgcttctcctgcgtctccctgagaaggtacccagcgcccctccccaagaggtcactttgaaacccggaaatggtactgtttttgtgagctgggtaccaccccctgccgaaaaccacaatgggattattcgcggttatcaggtatggtccctcggaaacacctctctgccccctgcgaactggaccgtagtaggcgagcaaacacagctcgagattgccactcatatgcctggtagttactgcgtccaggttgcagcagtcaccggtgcaggggcaggtgagccatcccgtcccgtgtgtctgttgttagaacaggctatggagcgcgccacacaggagccttccgagcatggcccatggacactcgagcagctgagggccacactgaagaggcccgaggtgatagcaacttgtggtgtggccctttggttactgctgctcggcactgcggtgtgtattcatcgcagaaggagggctagagtgcatcttggacccggactctaccgctataccagcgaggatgctattctgaagcatagaatggaccacagcgactcacaatggctcgccgacacatggcggtccacttctggcagccgggacctctcttctagctcgagcctgtctagccgacttggggcagacgcccgtgaccccctcgactgtcgcaggtcgttattgtcgtgggactcccgttccccaggggtaccccttttgcctgatacctccacgttctacggttcactcatcgcagaactgccctcttccacgcctgccagaccttccccacaggttcctgccgtgaggaggctccctcctcagctggcacagctgagctctccttgctcctcctccgactccctttgctcaagacgtggccttagttccccaagactgtcgctggccccagctgaggcatggaaagccaagaaaaaacaggagctgcagcacgccaactctagtcccctgctgaggggctcacactcgctggaactcagggcttgcgaattgggcaataggggctcaaagaatctttcccagagccccggagcggtgccacaggcccttgtagcatggagggccctgggcccgaagttgcttagtagtagcaacgaacttgtaacccgccatcttccgcccgccccgttatttccacatgaaactcctccaacacagagtcagcagacacagcccccagtggctccgcaggccccctcaagcatccttctgcccgcggctccgatcccgatcctctcgccttgcagccctcctagcccgcaagctagcagtctttcggggcccagtcccgccagctcccggctcagtagttcatcattatcgtcactcggtgaggatcaggacagtgtgctgaccccagaggaagtggccctctgtttagaattatccgaaggcgaagaaacacccagaaattccgtgtctccaatgccaagggccccttccccccccacaacttacggctacatctcagtgcccacagcaagcgagtttaccgatatggggaggacaggaggcggtgtcggccctaaaggaggtgttctcttgtgtcccccccggccatgtctcacgccaacacctagcgagggcagcctcgcaaacggctggggctccgcctccgaagacaatgcagcatccgcccgggcttcactagtctcttctagtgacggaagcttcctggccgacgcccattttgccagggcactcgcagtggccgtagactcttttggattcggtcttgagccgagagaggcagactgtgtgtttatcgacgcgagttctcctccctcgcctagagatgagattttcctcacccccaacctctcattaccgctgtgggaatggaggccagattggctggaggacatggaagtgtcccacacccagaggctgggacgcggtatgcccccatggccaccagactcccagatcagtagccagcggagccagcttcattgtcgcatgccgaaagcgggagcttcccctgtggactacagttag

SEQ ID NO: 201179 - DNA, 3024 bp, Artificial Sequence
  derived and/or modified sequence
atgggcagcggcggggacagcctgctgggcggccggggcagcctgcccctgctgctgctgctgatcatgggcggcatggcccaggacagccccccccagatcctggtgcacccccaggaccagctgttccagggccctggccctgccaggatgagctgccaggccagcggccagcccccacccaccatccgctggctgctgaatggccagcccctgtccatggtgcccccagacccccaccacctgctgcctgatggcaccctgctgctgctgcagcccccagcccggggccacgcccatgatggccaggccctgagcacagacctgggcgtgtacacctgtgaggccagcaaccggctgggcacagctgtgtccagaggagcccggctgtctgtggccgtgctgcgggaggacttccagatccagccccgggacatggtggccgtggtgggggagcagttcaccctggagtgtggccccccctggggccaccctgagcccaccgtgtcctggtggaaggatggcaagcccctggccctgcagcccggccgccacacagtgtctgggggcagcctgctgatggcccgggcagagaagagtgatgagggcacctacatgtgtgtggccaccaacagcgctggccaccgggagagccgggccgcccgggtgtccatccaggagccccaggactacacagagcctgtggagctgctggccgtgcgcatccagctggagaatgtgaccctgctgaacccagaccctgctgagggccccaagcccaggcctgctgtgtggctgtcctggaaggtgtctggccctgctgccccagcccagagctacacagccctcttccgcacccagacagcccctgggggccagggcgccccctgggccgaggagctgctggccggctggcagagcgctgagctgggcggcctgcactggggccaggactatgagttcaaggtgcggcccagcagcggccgggcccggggccctgacagcaatgtgctgctgctgcggctgcctgagaaggtgcccagcgccccaccccaggaggtgaccctgaagccaggaaatggcaccgtgtttgtgtcctgggtgcccccacctgctgagaaccacaacggcatcatccggggctaccaggtgtggagcctgggcaacaccagcctgcccccagccaactggacagtggtgggggagcagacccagctggagatcgccacccacatgcctggcagctactgtgtgcaggtggccgctgtgactggagctggggccggggagcccagcaggcctgtgtgcctgctgctggagcaggccatggagcgggccacccaggagcccagcgagcacggcccctggaccctggagcagctgcgggccaccctgaagaggcctgaggtgattgccacctgtggggtggccctgtggctgctgctgctgggcacagctgtgtgcatccacagaagaagaagagcccgggtgcacctgggccctggcctgtaccgctacaccagtgaagatgccatcctgaagcacaggatggaccacagcgacagccagtggctggccgacacctggaggagcaccagcggcagccgggacctgagcagcagcagcagcctgagcagccggctgggcgcagatgcccgggaccccctggactgcagaagaagcctgctgtcctgggacagccgcagccctggggtgcccctgctgcctgacaccagcaccttctacggcagcctgattgctgagctgcccagcagcaccccagcccggcccagcccccaggtgcctgctgtgcggcggctgcccccccagctggcccagctgagcagcccctgcagcagcagtgacagcctgtgcagcagaagaggcctgagcagcccccggctgagcctggccccagctgaggcctggaaggccaagaagaagcaggagctgcagcacgccaacagcagccccctgctgcggggcagccacagcctggagctgcgggcctgtgagctgggcaacagaggcagcaagaacctgagccagagccctggagctgtgccccaggccctggtggcctggagggccctgggccccaagctgctgagcagcagcaatgagctggtgaccaggcacctgcccccagcccccctcttcccccatgagaccccacccacccagagccagcagacccagccccctgtggccccccaggcccccagcagcatcctgctgcctgctgcccccatccccatcctgagcccctgcagcccccccagcccccaggccagcagcctgagcggccccagccctgccagcagccggctgagcagcagcagcctgagcagcctgggggaggaccaggacagcgtgctgaccccagaggaggtggccctgtgcctggagctgtctgagggggaggagacccccaggaacagcgtgagccccatgccccgggcccccagcccccccaccacctacggctacatctctgtgcccacagccagcgagttcacagacatgggccgcactggaggcggcgtgggccccaagggcggcgtgctgctgtgccccccccggccctgcctgacccccaccccatctgagggcagcctggccaacggctggggcagcgccagcgaggacaatgctgccagcgcccgggccagcctggtgagcagcagtgatggcagcttcctggctgatgcccactttgcccgggccctggccgtggccgtggacagctttggatttggcctggagccccgggaggccgactgtgtgttcattgatgccagcagcccccccagccccagagatgagatcttcctgacccccaacctgagcctgcccctgtgggagtggaggccagactggctggaggacatggaggtgagccacacccagaggctgggccggggcatgccaccctggcccccagacagccagatcagcagccagaggagccagctgcactgcaggatgcccaaggccggggccagccctgtggactacagctag

SEQ ID NO: 201180 - DNA, 2106 bp, Artificial Sequence
  derived and/or modified sequence
atgggcagcggcggggacagcctgctgggcggccggggcagcctgcccctgctgctgctgctgatcatggtgctgcgggaggacttccagatccagccccgggacatggtggccgtggtgggggagcagttcaccctggagtgtggccccccctggggccaccctgagcccaccgtgtcctggtggaaggatggcaagcccctggccctgcagcccggccgccacacagtgtctgggggcagcctgctgatggcccgggcagagaagagtgatgagggcacctacatgtgtgtggccaccaacagcgctggccaccgggagagccgggccgcccgggtgtccatccaggagccccaggactacacagagcctgtggagctgctggccgtgcgcatccagctggagaatgtgaccctgctgaacccagaccctgctgagggccccaagcccaggcctgctgtgtggctgtcctggaaggtgtctggccctgctgccccagcccagagctacacagccctcttccgcacccagacagcccctgggggccagggcgccccctgggccgaggagctgctggccggctggcagagcgctgagctgggcggcctgcactggggccaggactatgagttcaaggtgcggcccagcagcggccgggcccggggccctgacagcaatgtgctgctgctgcggctgcctgagaaggtgcccagcgccccaccccaggaggtgaccctgaagccaggaaatggcaccgtgtttgtgtcctgggtgcccccacctgctgagaaccacaacggcatcatccggggctaccaggtgtggagcctgggcaacaccagcctgcccccagccaactggacagtggtgggggagcagacccagctggagatcgccacccacatgcctggcagctactgtgtgcaggtggccgctgtgactggagctggggccggggagcccagcaggcctgtgtgcctgctgctggagcaggccatggagcgggccacccaggagcccagcgagcacggcccctggaccctggagcagctgcgggccaccctgaagaggcctgaggtgattgccacctgtggggtggccctgtggctgctgctgctgggcacagctgtgtgcatccacagaagaagaagagcccgggtgcacctgggccctggcctgtaccgctacaccagtgaagatgccatcctgaagcacaggatggaccacagcgacagccagtggctggccgacacctggaggagcaccagcggcagccgggacctgagcagcagcagcagcctgagcagccggctgggcgcagatgcccgggaccccctggactgcagaagaagcctgctgtcctgggacagccgcagccctggggtgcccctgctgcctgacaccagcaccttctacggcagcctgattgctgagctgcccagcagcaccccagcccggcccagcccccaggtgcctgctgtgcggcggctgcccccccagctggcccagctgagcagcccctgcagcagcagtgacagcctgtgcagcagaagaggcctgagcagcccccggctgagcctggccccagctgaggcctggaaggccaagaagaagcaggagctgcagcacgccaacagcagccccctgctgcggggcagccacagcctggagctgcgggcctgtgagctgggcaacagaggcagcaagaacctgagccagagccctggagctgtgccccaggccctggtggcctggagggccctgggccccaagctgctgagcagcagcaatgagctggtgaccaggcacctgcccccagcccccctcttcccccatgagaccccacccacccagagccagcagacccagccccctgtggccccccaggcccccagcagcatcctgctgcctgctgcccccatccccatcctgagcccctgcagcccccccagcccccaggccagcagcctgagcggccccagccctgccagcagccggctgagcagcagcagcctgagcagcctgggggaggaccaggacagcgtgctgaccccagaggaggtggccctgtgcctggagctgtctgagggggaggagaccccctag

SEQ ID NO: 201181 - DNA, 2589 bp, Artificial Sequence
  derived and/or modified sequence
atggtggccgtggtgggggagcagttcaccctggagtgtggccccccctggggccaccctgagcccaccgtgtcctggtggaaggatggcaagcccctggccctgcagcccggccgccacacagtgtctgggggcagcctgctgatggcccgggcagagaagagtgatgagggcacctacatgtgtgtggccaccaacagcgctggccaccgggagagcagagctgcccgggtgtccatccaggagccccaggactacacagagcctgtggagctgctggccgtgcgcatccagctggagaatgtgaccctgctgaacccagaccctgctgagggccccaagcccaggcctgctgtgtggctgtcctggaaggtgtctggccctgctgccccagcccagagctacacagccctcttccgcacccagacagcccctgggggccagggcgccccctgggccgaggagctgctggccggctggcagagcgctgagctgggcggcctgcactggggccaggactatgagttcaaggtgcggcccagcagcggccgggcccggggccctgacagcaatgtgctgctgctgcggctgcctgagaaggtgcccagcgccccaccccaggaggtgaccctgaagccaggaaatggaacagtgtttgtgtcctgggtgcccccacctgctgagaaccacaacggcatcatccggggctaccaggtgtggagcctgggcaacaccagcctgcccccagccaactggacagtggtgggggagcagacccagctggagatcgccacccacatgcctggcagctactgtgtgcaggtggccgctgtgactggagctggagctggggagcccagcaggcctgtgtgcctgctgctggagcaggccatggagcgggccacccaggagcccagcgagcacggcccctggaccctggagcagctgcgggccaccctgaagaggcctgaggtgattgccacctgtggggtggccctgtggctgctgctgctgggcacagctgtgtgcatccacagaagaagaagagcccgggtgcacctgggccctggcctgtaccgctacaccagtgaagatgccatcctgaagcacaggatggaccacagcgacagccagtggctggccgacacctggaggagcaccagcggcagccgggacctgagcagcagcagcagcctgagcagccggctgggcgcagatgcccgggaccccctggactgccgccgcagcctgctgtcctgggacagccgcagccctggggtgcccctgctgcctgacaccagcaccttctacggcagcctgattgctgagctgcccagcagcaccccagcccggcccagcccccaggtgcctgctgtgcggcggctgcccccccagctggcccagctgagcagcccctgcagcagcagtgacagcctgtgcagccggcggggcctgagcagcccccggctgagcctggccccagctgaggcctggaaggccaagaagaagcaggagctgcagcacgccaacagcagccccctgctgcggggcagccacagcctggagctgcgggcctgtgagctgggcaacagaggcagcaagaacctgagccagagccctggagctgtgccccaggccctggtggcctggagggccctgggccccaagctgctgagcagcagcaatgagctggtgaccaggcacctgcccccagcccccctcttcccccatgagaccccacccacccagagccagcagacccagccccctgtggccccccaggcccccagcagcatcctgctgcctgctgcccccatccccatcctgagcccctgcagcccccccagcccccaggccagcagcctgagcggccccagccctgccagcagccggctgagcagcagcagcctgagcagcctgggggaggaccaggacagcgtgctgaccccagaggaggtggccctgtgcctggagctgtctgagggggaggagaccccaagaaattctgtgagccccatgccccgggcccccagcccccccaccacctacggctacatctctgtgcccacagccagcgagttcacagacatgggccgcactggaggaggagtgggccccaagggcggcgtgctgctgtgccccccccggccctgcctgacccccacccccagcgagggcagcctggccaacggctggggcagcgcctctgaagataatgctgccagcgcccgggccagcctggtgagcagcagtgatggcagcttcctggctgatgcccactttgcccgggccctggccgtggccgtggacagctttggcttcggcctggagccccgggaggccgactgtgtgttcattgatgccagcagcccccccagccccagagatgagatcttcctgacccccaacctgagcctgcccctgtgggagtggaggccagactggctggaggacatggaggtgagccacacccagaggctgggccggggcatgccaccctggcccccagacagccagatcagcagccagaggagccagctgcactgcaggatgcccaaggccggggccagccctgtggactacagctag

SEQ ID NO: 201182 - DNA, 3024 bp, Artificial Sequence
  derived and/or modified sequence
atgggcagcggcggcgacagcctgctgggcggccggggcagcctgccgctactgctgctattgatcatgggggggatggctcaggactcaccccctcaaatcctggtgcatccccaggaccagctgttccagggccctgggccagcacgcatgagctgccaagcatcaggtcagcctccaccaacgatcaggtggcttctgaacggtcaacccctgtcgatggtgccaccagatcctcatcacctgctccccgacggtaccctactgctgctacaaccccccgccaggggtcacgcccatgacggccaagcacttagcactgatctaggagtgtacacttgcgaagcctctaatcgactaggcactgctgtaagccgcggtgctcggctctccgtagccgtgctgagagaggacttccaaattcaacctcgggacatggtcgctgtggtcggtgaacagttcacactggaatgtggccctccttgggggcacccagaacctaccgtgtcctggtggaaggatggaaaacctttggctctgcagcccggccggcataccgtgtccggcgggagcctgctgatggcccgggccgaaaagtcagatgagggcacatacatgtgtgtcgcaaccaattctgcagggcatcgggagtcgcgcgcggcccgggtatctatacaggaacctcaggactataccgaacccgttgagctactcgccgttcgaattcaactggagaatgtgacactgttgaacccagaccctgctgagggtcccaagccacggcctgcagtgtggctgagctggaaagtgagcgggcccgctgcacccgctcaaagctataccgccctgttcagaactcagactgcacccggtgggcaaggagctccctgggccgaggagttactcgctggatggcagtctgcagagctgggggggttacattggggacaggactatgagtttaaggtgagacccagcagtgggcgggccaggggccccgattcaaacgtgctcttgctgcgcctgcctgagaaagtccccagtgcccccccacaggaagtgaccctgaaacctggaaacggaacagtgttcgttagctgggtcccaccacccgcagagaatcacaatggaattatccgcggctaccaggtatggtctcttggcaacacctccctgcccccagccaactggaccgttgtaggtgaacagactcagctggagatcgccacgcatatgcctggatcatactgtgtccaggtggccgcagtgacaggtgcaggggccggggaaccatctaggcctgtttgcctactccttgagcaggcaatggagcgtgcaacccaggagcccagtgagcatggcccatggacactggagcaacttcgcgcgaccctcaagaggccagaagtcattgccacgtgcggtgtcgcattatggctcttgctgctgggaacagccgtctgcattcacaggaggcgaagagcccgagtccacctgggtcctggcttgtacaggtataccagcgaggatgccatccttaaacatcggatggatcactcggactcacagtggttagccgatacatggaggtctaccagcgggtcccgcgatttgagctcctcttcttctctgagtagtaggcttggtgccgatgctagggatccactggactgtcgtcggtccctgctgagctgggatagtcgttcacccggggttcccctcttgcccgacacaagcacattctacggatctcttattgccgaactgccctcaagtactccggcgcggccctcccctcaggtccccgcagttaggcggttacctcctcaactcgcccaactctcatctccctgttcatcctccgattctttgtgttcgagacgagggctaagttctccgcgtttatccctcgcacccgcagaagcttggaaagcgaaaaagaaacaggagctccagcacgctaattcaagcccactcctcagggggagccacagtctggaattgcgcgcatgcgagcttggcaatagaggatctaaaaatctcagccagtcccccggcgcagttcctcaggcgctggtagcatggcgagcactgggtcctaaacttcttagcagctcaaatgagctggtgaccaggcatctgccgccggcgcccttgtttccccatgagacccctccgacccagagtcagcagacccagcctcccgtggccccccaagcgcctagtagcatccttctacctgccgctcctatccccatcctctccccctgtagcccaccgtccccccaggccagcagtctttctggcccgtcacctgccagttcaagattgtctagctcaagtctgagcagcctcggagaggatcaggactcagttctcacacccgaagaggtggctttgtgtctcgagctatctgaaggcgaggaaacaccccgaaattccgtcagtccaatgcccagagccccatcccctccaaccacatatgggtacatctctgttcccactgcctccgaattcaccgacatgggcaggacaggcgggggcgtgggccccaaggggggggtcctcctgtgccctccccggccgtgtctaacacccacacccagcgaaggcagcctagcgaacggctggggaagcgcatccgaagataacgcagcaagtgcccgagcgtcactggtaagctcctctgacggttctttcttggcagacgcccactttgcgagggccctggcagtagccgtggacagcttcgggttcggtctggagcccagagaagccgattgtgtgtttattgacgcctcaagccccccttcacccagagacgaaatctttttaacaccaaacttatcccttcccctctgggagtggcgtcctgattggctagaagatatggaagtaagccatacgcagagacttggtagggggatgcctccttggcctcctgactcacagatttcctctcagcggtcacagctccactgtcgcatgcctaaagctggtgcaagtccggtggattatagctag

SEQ ID NO: 201183 - DNA, 2106 bp, Artificial Sequence
  derived and/or modified sequence
atgggcagcggcggcgacagcctgctgggcggccggggcagcctgccccttctgttgttgttgatcatggtgctgagagaggatttccaaatccagccaagggatatggttgccgtggtgggagaacagttcaccctggaatgcggtcccccgtggggacatcctgagcccactgtgagttggtggaaagatggcaaacctctggcgctgcagcctggtcgccacaccgtgtcggggggctccttgttgatggctagagccgagaagagcgacgaaggcacctacatgtgtgtggccaccaactcagctggtcatagggagagccgggccgcccgagtgagcatacaggaaccccaagattataccgaacccgtggaattattggctgttcgcattcagttggagaatgttacgttgctgaaccccgaccccgccgagggcccgaagccgaggcccgcagtgtggctaagctggaaagtgtccggtcctgctgctccagctcagtcatacactgctctgtttcgaacacagacagcacccggcggtcaaggagccccctgggcagaggaacttctggctggctggcagtccgccgaacttggcggcctgcactggggacaggattatgagttcaaggtgcgcccttcaagcgggcgggcacgggggcctgactccaacgtcctcttgctcagacttcctgagaaagttccatcagcccctccacaggaggtgacactcaagcccgggaacgggaccgttttcgtcagttgggtgccaccacctgctgagaatcataacggaatcatccgcggatatcaggtgtggtccctcggtaacactagcttacctccggctaactggaccgtagtcggcgagcagacccaactcgaaattgctacccacatgcctgggtcttattgtgtgcaggtcgcggcggtcaccggggccggggcaggggagccatcacggccggtgtgcctcctcctcgaacaggccatggagagagctacccaggaaccaagcgaacacggtccatggaccctagagcaacttcgagccactctgaaaagaccagaggtgatcgccacttgcggagtcgctctgtggcttctcctcctcggcaccgccgtatgcatccaccggcggcgccgggcacgcgtgcacctaggaccagggctttacaggtatacctcagaagacgccatattaaagcatcgaatggatcatagcgacagccaatggctcgcagatacatggcgcagtactagcggttctcgcgacttatctagcagctcttccttgtccagcagactgggtgcagacgctcgcgaccccctggattgcagacgctcgctgctatcctgggactcaagatcaccaggagtacccctgctcccagatacttccaccttttatggatccctcatagcggagcttccatccagtacccccgcacgcccatccccccaggtcccagcggtccggcgcctgcccccacagctggcacagctatcatcaccctgtagttccagcgactccctctgttcaagacgtggtctgagtagtccgcgtctaagccttgcccccgctgaggcttggaaggccaagaaaaagcaggaactgcagcacgccaactcctctccgttgctccgaggaagtcattcccttgaactgagagcctgtgagctcggcaatcgcggttccaaaaatctctctcagagcccgggtgcggttccacaagccctggtagcatggcgggcgcttggtccgaaacttctgagtagcagcaatgagctagtgacccggcacttgccccccgcacctctgttcccccatgaaacccctcctactcagtcgcaacagacacaacctcccgttgccccccaggccccaagcagcatcctgctgcccgctgcgcccataccaattctgagtccatgtagccctcccagcccccaagctagctccctcagcggccctagtcccgccagcagccggctgtccagctctagcctatcatctctaggagaagaccaggacagcgtgctgacaccagaggaggttgctctttgcttggaactgagcgaaggagaggaaaccccctag

SEQ ID NO: 201184 - DNA, 2589 bp, Artificial Sequence
  derived and/or modified sequence
atggtggccgtggtgggcgagcagttcaccctggagtgcggccccccatggggtcacccagagcctacagtgtcatggtggaaggatggaaagcccctagctctccagcccggccgccataccgtctccggcggcagtctgcttatggcacgagctgaaaaatctgatgagggcacctatatgtgtgtggcaacaaattctgccgggcaccgggaatcccgcgcagccagagtgtccatccaagagccacaggactacacagagcccgtcgagctgcttgccgtgcgtatccagctggaaaatgtgaccctgctcaatccggatcctgcagagggtcctaagccacggcccgctgtatggctgagttggaaggtttcaggtcctgcagcgcctgcacagagttatacggcccttttcaggactcagacagctcccgggggacagggggccccctgggcagaagaactccttgccgggtggcaatcagctgaactgggaggattacactggggacaggattacgagttcaaagtgcgacccagcagcggaagggcccgtgggccagatagcaatgtccttctgctgcgattgcccgaaaaggtgccttccgctcctcctcaggaggtgaccttgaaacccgggaatggcacggtcttcgtgtcctgggtgcctcccccagccgaaaatcataacggcatcataaggggctaccaagtctggagcttaggcaacactagtctgccaccagcaaactggactgtggtcggcgaacagacgcagctcgaaattgccacccacatgcctggaagttactgcgtgcaagttgctgccgtgactggggccggcgcgggagaacccagcaggcctgtgtgtctgctcttggagcaagctatggaaagggccactcaagagcctagtgagcacgggccttggactttggaacagttacgggctaccctgaagcggccagaagtgatcgcgacttgtggcgtggccttgtggttgctgctgctcggaaccgccgtctgcatacacaggagacgacgagcacgagtgcatctggggcctggactatataggtacacaagcgaggatgctatcctcaaacataggatggatcactccgacagccagtggttggctgatacatggcgctcaaccagtgggtctcgggatctctcctcgagtagcagcctgagctcccggcttggcgcagatgcgcgcgaccccctggactgtaggaggtccttgctcagctgggactcaaggtctcccggagtgcctctgttgcccgacacttccactttctacggttctcttatagccgaactcccttcctctaccccagcacgccccagtcctcaggtccctgctgtgaggcgtttgccacctcagctggcccaactttcatctccctgttccagcagcgactccctttgcagtcggaggggtctatcatccccgcgcttgagtctagctccagccgaagcatggaaggcaaagaaaaagcaggagttgcagcatgccaactcttctccactccttaggggcagccacagcttggagctgcgcgcctgcgagctggggaatagaggttctaaaaatctctctcaatctcccggggcagtaccccaggctctggtggcatggcgcgcacttgggcctaaactgctgagttctagcaacgagctggtcaccaggcatctgcctcccgcccccctctttccacacgagacccccccaacccagtcacagcaaactcaaccaccagtggcccctcaggcaccctcctctattctattaccggcagccccaattcctattctgtcaccatgctctcccccatctccccaggccagcagcctttctggaccgtcacccgcctcatccagactttcttcgtcttcactgtcttcattgggcgaagaccaggatagcgtgcttaccccagaggaggttgcactgtgcttagagctgagcgagggggaggaaacacctagaaattcagtgtctcccatgccacgtgcgccctcccctcctacaacctacgggtacatttcagtgccaacagcctccgagtttacagatatgggcaggaccgggggcggtgtgggacccaaagggggggttctcctttgccctcccaggccctgcctgaccccaacccccagtgagggatcgctggccaacggctggggttctgcgtctgaagataatgccgcttcagcccgcgcatcactggtgagctcatcggacggcagttttcttgctgatgctcattttgctcgggccttagctgttgcagtggacagttttgggtttggtctggagcccagagaggccgattgcgtcttcattgacgcgtcatctccccctagcccgagggacgagatcttcttgactcccaacctaagcctgcctttgtgggagtggaggcctgattggctggaagacatggaggtgtctcacacgcagagattgggtaggggaatgccaccttggcctcccgacagccagatctcttcacagagatcccagctgcactgcaggatgcccaaggccggagcctcccccgtggactactcctag

SEQ ID NO: 201185 - DNA, 3024 bp, Artificial Sequence
  derived and/or modified sequence
atggggtctggcggagatagtctgctggggggtaggggctccctgcctctgctcctcctgctgatcatgggaggaatggcccaagactctccccctcagatcctcgtgcacccacaggaccagcttttccagggtccaggcccagccaggatgtcatgtcaggcctccggacagccccctcccaccatacggtggctcctaaacggtcagcccctgtccatggtgccccctgatcctcaccacctcctgcccgacggaacgctcctacttctgcagcccccagccagaggccatgctcacgatggtcaggcgctctctactgatctgggggtgtacacctgtgaagcttctaacagactgggtactgccgtcagtcggggagcaagactatcagtggcggtactaagagaggattttcagatccagccgcgtgatatggtggcagtggttggagagcagttcacgctggaatgtggaccaccctgggggcaccctgagcctactgttagttggtggaaggatggaaaacctttagctctgcaaccaggcaggcatactgtgtccgggggatccctcctcatggcgagagcagaaaaatcagacgagggaacttacatgtgtgtcgcgactaactccgctggtcaccgggagagccgcgctgcacgggttagtatacaggagccgcaggactatacggagcccgtggagctcctcgcagtccgcattcagcttgagaatgtgacgctgctgaatcccgatcctgccgaagggcctaaaccaaggcccgctgtgtggttgtcatggaaggtcagtggcccagcggctccggcacagtcttataccgcactgtttaggacccagacagcccctggcggacagggcgcaccttgggccgaagagttgttagccggatggcaatctgccgagctgggcggtctccactggggccaggactatgagtttaaggtgagacccagcagcggacgcgctagagggccagacagcaacgttctgctcctgcggctgcccgaaaaagtacccagcgcaccaccccaggaagtaaccttgaaacctgggaatgggaccgtattcgtgtcctgggtcccgcctcctgcggagaaccacaacggtattattcgtgggtatcaggtatggagtttgggcaacacgagtttacccccagccaactggaccgttgtgggtgagcagacacagcttgaaatagccacccacatgcccggttcgtactgcgttcaggtggcggctgtcacaggagcgggtgctggtgagcccagccgacctgtctgcctgctcttggagcaggcaatggagagggcaactcaggagcccagcgagcacggcccatggacgctcgaacagctccgcgctaccttgaaaaggccagaagtcattgctacctgcggggtagcgctatggctgctcctgttgggaacagctgtatgcatacaccgtcggaggagggcccgtgtgcatcttggacccggattgtaccgatatacatccgaggacgccattcttaaacacaggatggatcactctgatagtcaatggttggccgatacatggcgatctacatctggaagccgggatttgagctctagctctagcctgagcagccgcctaggcgctgacgctcgggatcctctggattgccggcgttcactgttgagttgggattctagatctccaggggtgcctctgttgcctgacacgagcactttttatggttcactgattgccgaactgccttccagtactcccgctcgtccaagccctcaagtgcctgcggtccgccgactccctccgcaactggcccagctttcttccccgtgttcctcctccgattctctgtgctcacgtcgaggcctgagcagtcccagattgagcttggcacctgccgaggcctggaaagccaaaaaaaaacaggaattgcaacatgcaaattcaagccccttgctgaggggaagtcactcattggagctgagagcctgcgagttgggtaaccgtggcagtaagaacttgtcacagtcaccaggcgctgtgccacaggccctggtagcctggagagcacttggtcctaaacttttatcttccagcaacgagctcgtaactcgtcatttaccccctgccccactgtttccccacgaaacacccccaacacagtcccagcagacccagcctcccgtagcgccacaagccccatcaagtatccttcttcccgctgctccaatccctatattgtccccgtgctctccgcctagccctcaggccagcagcctgtctggcccttctcctgcgtcaagccggctgtcatcatcgtccctgtcatccttaggcgaggaccaggacagcgtgttgacccctgaagaagttgcactctgcctggaactctccgaaggagaggagactcccagaaatagcgtctctcccatgccaagagctcccagtccacctacaacctacgggtatatcagtgtgcccaccgcctctgagtttaccgatatgggacgcactggcggaggcgtaggaccaaagggaggagttttgctgtgcccccctaggccatgcctgactccaactcctagcgaagggtcactggctaatggatggggctccgcctcagaagacaatgcagccagcgccagggcatcacttgtcagcagtagtgacggctctttcctggccgacgcccacttcgccagggccctggcggtggctgtggatagctttggcttcggcctcgaaccccgagaggctgattgcgtcttcatagatgcctcttccccaccatcaccacgagatgagatcttcctaacaccaaacctgtccctgccattatgggaatggcgcccagactggcttgaggacatggaagtcagtcacactcaaaggttaggtcgaggaatgcctccatggccacccgattcacagattagttcccagagatctcaactccactgccgcatgcctaaagccggtgccagcccagtggattactcttag

SEQ ID NO: 201186 - DNA, 2106 bp, Artificial Sequence
  derived and/or modified sequence
atgggtagcgggggtgacagcctgctcggcggtcggggaagcctgcccttactgcttttacttatcatggtccttagagaggacttccagatccaaccacgcgacatggtggcggtggtcggggagcagtttacgctggagtgcggtccgccatggggacaccctgagcccacagtttcctggtggaaggatgggaagcccttggctctccagcccggtcgccataccgttagtggcggaagcttgctgatggccagggccgagaagtcagatgagggaacatatatgtgcgtggccacgaatagtgcaggccatcgagaaagcagagcggctagggtcagcatccaggagcctcaggattataccgagccagtcgagttactggccgtgcgcatccagctggagaacgtgaccttgctgaacccagatccagcagaggggccaaagcccaggccggcagtttggctgagctggaaagtgagcgggccagcagcccctgcacagtcctacacagcgttgtttcggactcagacagcgcctgggggacagggagctccctgggccgaagaactgctggcaggctggcagagcgcagaacttgggggactccattggggacaggattacgagttcaaagttagaccttccagcgggcgagccaggggaccagattccaacgtgctgctgctacgcttgcccgagaaagtcccctctgcaccaccgcaggaagtcacactgaaacccggaaatggtaccgtgttcgtcagttgggtgcccccaccagcagagaaccataatggcatcattcgcggataccaagtgtggagtcttggcaatacttctctgccgccagctaactggactgtcgtgggggaacagacacagctcgaaatcgctacacatatgccagggagttattgtgtacaagtagctgctgtcacaggcgcaggtgccggtgaaccatctcggccagtctgcctgctattagagcaagcaatggaaagggccacacaggagccctcagagcacggtccctggaccctagagcagctcagagccaccctgaaacgacctgaggtgatcgccacctgtggcgtggctctgtggctgctccttctcgggactgccgtctgtatccaccgcagacgcagagcccgtgtccatcttggacccggactgtacagatatactagcgaggatgccatcctaaaacaccgcatggaccattccgactcacaatggttagcagatacctggagatccacatccgggagcagggacctttcatcgtcctcttccctcagcagtagattaggagctgacgctcgggatccgctggattgtcggaggtctctactttcatgggactcccgttcccctggggtcccgctccttcctgatactagtaccttttacgggtcactgatcgccgaactccccagttcaacccccgctcgcccatccccccaggtgcccgcagtcagacgcctaccccctcagctggcacagttaagttcaccctgcagttccagcgacagcctttgtagtcgccgtggtctgtcatctccacggctatccttggcaccagctgaggcatggaaagctaaaaagaagcaggagctgcaacatgccaactccagtccccttctacgaggtagtcactccctggagctgcgcgcttgtgaactcgggaaccggggtagcaagaacctgtctcagagtccgggagccgtgccacaggctcttgtcgcgtggagagctctcgggcctaagcttctgtcctcgtccaacgagctcgtcacacgccatctgccccctgcaccattgtttccacacgagacgccccctacacaaagccagcaaactcagcctccggttgctcctcaggccccaagcagcattcttctgcctgcagcgcctatccctattctgtccccgtgttcaccccctagtcctcaggccagtagccttagcggacctagcccggctagctctcgtctgtctagcagcagccttagcagcctgggggaggatcaggacagcgttctgacacccgaagaagtcgctctgtgcctggagctgagcgagggtgaggagaccccatag

SEQ ID NO: 201187 - DNA, 2589 bp, Artificial Sequence
  derived and/or modified sequence
atggtggcagtggtcggcgagcagtttaccctcgagtgtggccctccatgggggcaccctgagccaactgttagttggtggaaagacggaaaacccctggctctccaacccggtagacatacagtgagcggaggtagcttgctgatggccagagcagagaaatccgacgaagggacttacatgtgtgtggccacgaatagcgcgggacacagggaaagtagagctgcacgagtttccattcaggagccacaggattacactgagcctgtcgaactgctcgcagttcgcatccagttggaaaacgtgacactgctgaatccagacccagcagaaggaccaaagcccagacctgccgtgtggctgtcgtggaaagtctcaggaccggctgctcccgcacagtcatacaccgccctatttcggactcagacagcacctggcggacagggcgcaccttgggcagaggagttattggccggatggcagagtgctgagctgggcggtctacattgggggcaggattatgagttcaaggtgaggccatcaagcggcagggctcgcggacccgacagcaatgtgctgttgttgcgattaccagaaaaagtgcccagcgcccctccacaggaagttactcttaaacctggaaatggaacggtgtttgtgtcctgggtaccccctccagcagagaaccataacgggatcatccgcggttaccaggtgtggagcctcggcaatacctctcttcctcctgctaattggaccgtagtgggtgagcagacccagctcgagattgcgacgcacatgcctggatcgtactgtgtacaggtggctgcagtgaccggagccggtgctggggaaccgagcaggcctgtttgcctcctgctggaacaggcaatggaacgcgcaacccaagaaccttctgaacacggcccatggacactggaacagctcagagctacccttaagagaccagaggtcatcgctacttgtggcgtcgcactatggctgttacttctcggtaccgcggtatgcattcatcgacggagaagggctcgcgttcatctgggacctgggctgtatcggtatacaagcgaggacgccattctaaaacaccgcatggaccacagtgacagccaatggttggctgacacttggcgcagcaccagcggctcaagagacctctcgagctcgagctctctgtcttcgaggcttggggctgatgctagggaccccctcgattgtagaagaagcctgctgtcgtgggattcccggtcgccaggggtgccgcttcttccagatacgagtactttttatggcagcttgatagctgagctgccttcctcaacacctgccaggccttctcctcaggtgcccgcagtgagaagactccccccacaactggcgcagctgagttccccctgtagtagctcagacagcctgtgctccaggcgaggcctctcgtcacccaggctgtcactggccccagctgaggcttggaaagccaagaagaaacaggaactccaacacgccaacagttctcctttgctccggggatcacatagtctggagctccgcgcatgtgagctagggaaccgcggaagcaagaacctgtctcagtcccctggtgctgttccacaggctctggtggcatggcgtgcgcttggaccgaaactgttatcttccagcaacgaactggtaacgcgtcatctcccgccagcccctctctttccacatgagacaccgcctacacagtctcagcaaactcagcccccagtagctccacaggccccttcatccatcttgttacccgctgctccaatccccatcttgtccccgtgctcacccccatcaccacaggcgtcttccctgtcaggcccatcacctgcttcctcacgcctgagctccagtagcctctcttctctgggtgaagatcaagacagtgttctcaccccggaagaggtcgctctctgtttggagctgagtgagggcgaagaaactcccagaaatagcgtatccccgatgcctagagccccttctccacccacaacatacgggtatatttcggtgcccaccgctagtgaattcaccgacatggggcgaactggagggggtgtaggcccaaagggcggagtgctgctgtgtcccccaaggccttgccttaccccaacgcccagtgagggctccctggcgaacggctggggatctgcttctgaagataatgccgctagtgccagagccagtctggtcagctcgtcagacggtagcttcctagcagatgctcacttcgcacgggctcttgcagtcgcagttgactccttcggctttggtctcgaacctagggaggccgactgcgtatttatagatgcatcatctcccccttcacccagagacgaaattttcctgactccaaatctcagcctgccgctttgggaatggcgccctgattggctggaagacatggaggtctctcacacacagagactgggccgtggaatgcccccttggccgccagatagccagatttctagccagcggagtcagctgcactgccgcatgcccaaagccggtgccagtccagttgattactcctag

SEQ ID NO: 201188 - DNA, 4710 bp, Artificial Sequence
  derived and/or modified sequence
acttcactcagcctccccagcctgcagccccactgccctctgtcttcagcttcttgctgtgtcctgagactcctggggttttcactcttctctagcaggtgtcaaagggataaggattgggatccagggataagatttaaatagaggattaaggctctgatcggagttttggttagtgtaaggataccctgtaagaaatccccgagtagatcatgagataaagcttagcgctgaagttagggtcgggggttatagctaaatggtcgaggtcagagagtttctcgcctctggtctcctcccagttctccaaggcactgagggccaggcaggaagcatcggtttcctcaaagccgcttccctcctggggcagagtctcggtcacaaacaaccaccaccggcccaccccgcccctccttccctcttcactgtgagctcagagcagcaggacaaagtgctcgggacaaggacatagggctgagagtagccatgggctctggaggagacagcctcctggggggcaggggttccctgcctctgctgctcctgctcatcatgggaggcatggctcaggactccccgccccagatcctagtccacccccaggaccagctgttccagggccctggccctgccaggatgagctgccaagcctcaggccagccacctcccaccatccgctggttgctgaatgggcagcccctgagcatggtgcccccagacccacaccacctcctgcctgatgggacccttctgctgctacagccccctgcccggggacatgcccacgatggccaggccctgtccacagacctgggtgtctacacatgtgaggccagcaaccggcttggcacggcagtcagcagaggcgctcggctgtctgtggctgtcctccgggaggatttccagatccagcctcgggacatggtggctgtggtgggtgagcagtttactctggaatgtgggccgccctggggccacccagagcccacagtctcatggtggaaagatgggaaacccctggccctccagcccggaaggcacacagtgtccggggggtccctgctgatggcaagagcagagaagagtgacgaagggacctacatgtgtgtggccaccaacagcgcaggacatagggagagccgcgcagcccgggtttccatccaggagccccaggactacacggagcctgtggagcttctggctgtgcgaattcagctggaaaatgtgacactgctgaacccggatcctgcagagggccccaagcctagaccggcggtgtggctcagctggaaggtcagtggccctgctgcgcctgcccaatcttacacggccttgttcaggacccagactgccccgggaggccagggagctccgtgggcagaggagctgctggccggctggcagagcgcagagcttggaggcctccactggggccaagactacgagttcaaagtgagaccatcctctggccgggctcgaggccctgacagcaacgtgctgctcctgaggctgccggaaaaagtgcccagtgccccacctcaggaagtgactctaaagcctggcaatggcactgtctttgtgagctgggtcccaccacctgctgaaaaccacaatggcatcatccgtggctaccaggtctggagcctgggcaacacatcactgccaccagccaactggactgtagttggtgagcagacccagctggaaatcgccacccatatgccaggctcctactgcgtgcaagtggctgcagtcactggtgctggagctggggagcccagtagacctgtctgcctccttttagagcaggccatggagcgagccacccaagaacccagtgagcatggtccctggaccctggagcagctgagggctaccttgaagcggcctgaggtcattgccacctgcggtgttgcactctggctgctgcttctgggcaccgccgtgtgtatccaccgccggcgccgagctagggtgcacctgggcccaggtctgtacagatataccagtgaggatgccatcctaaaacacaggatggatcacagtgactcccagtggttggcagacacttggcgttccacctctggctctcgggacctgagcagcagcagcagcctcagcagtcggctgggggcggatgcccgggacccactagactgtcgtcgctccttgctctcctgggactcccgaagccccggcgtgcccctgcttccagacaccagcactttttatggctccctcatcgctgagctgccctccagtaccccagccaggccaagtccccaggtcccagctgtcaggcgcctcccaccccagctggcccagctctccagcccctgttccagctcagacagcctctgcagccgcaggggactctcttctccccgcttgtctctggcccctgcagaggcttggaaggccaaaaagaagcaggagctgcagcatgccaacagttccccactgctccggggcagccactccttggagctccgggcctgtgagttaggaaatagaggttccaagaacctttcccaaagcccaggagctgtgccccaagctctggttgcctggcgggccctgggaccgaaactcctcagctcctcaaatgagctggttactcgtcatctccctccagcacccctctttcctcatgaaactcccccaactcagagtcaacagacccagcctccggtggcaccacaggctccctcctccatcctgctgccagcagcccccatccccatccttagcccctgcagtccccctagcccccaggcctcttccctctctggccccagcccagcttccagtcgcctgtccagctcctcactgtcatccctgggggaggatcaagacagcgtgctgacccctgaggaggtagccctgtgcttggaactcagtgagggtgaggagactcccaggaacagcgtctctcccatgccaagggctccttcaccccccaccacctatgggtacatcagcgtcccaacagcctcagagttcacggacatgggcaggactggaggaggggtggggcccaaggggggagtcttgctgtgcccacctcggccctgcctcacccccacccccagcgagggctccttagccaatggttggggctcagcctctgaggacaatgccgccagcgccagagccagccttgtcagctcctccgatggctccttcctcgctgatgctcactttgcccgggccctggcagtggctgtggatagctttggtttcggtctagagcccagggaggcagactgcgtcttcatagatgcctcatcacctccctccccacgggatgagatcttcctgacccccaacctctccctgcccctgtgggagtggaggccagactggttggaagacatggaggtcagccacacccagcggctgggaagggggatgcctccctggccccctgactctcagatctcttcccagagaagtcagctccactgtcgtatgcccaaggctggtgcttctcctgtagattactcctgaaccgtgtccctgagacttcccagacgggaatcagaaccacttctcctgtccacccacaagacctgggctgtggtgtgtgggtcttggcctgtgtttctctgcagctggggtccaccttcccaagcctccagagagttctccctccacgattgtgaaaacaaatgaaaacaaaattagagcaaagctgacctggagccctcagggagcaaaacatcatctccacctgactcctagccactgctttctcctctgtgccatccactcccaccaccaggttgttttggcctgaggagcagccctgcctgctgctcttcccccaccatttggatcacaggaagtggaggagccagaggtgcctttgtggaggacagcagtggctgctgggagagggctgtggaggaaggagcttctcggagccccctctcagccttacctgggcccctcctctagagaagagctcaactctctcccaacctcaccatggaaagaaaataattatgaatgccactgaggcactgaggccctacctcatgccaaacaaagggttcaaggctgggtctagcgaggatgctgaaggaagggaggtatgagaccgtaggtcaaaagcaccatcctcgtactgttgtcactatgagcttaagaaatttgataccataaaatggtaaagacttgagttctgtgagatcattccccggagcaccatttttaggggagcacctggagagatggcaagaatttcctgagttaggcagggatcaggcattcattgacactcagggagtgtcacacatttctgttctgcaattaaagggagaatgaggttcatccaccaaattttaagcagaatataggaagggcaggggtggggagtttcagggtctgctggtcctggcaacttatattaaatccacctcctcaagataagccttagggatatttatggctgagggaagtgggatggtctaaggcatggggaagggtgattggctgtggggaaaatgaagtaataggttcattctgcccaagtgtacttggggttcatggcatttcataaggacatttgtgtagaaaattgttttgctggctgggcacggtggctcacgcctgtaatcccagcactttgggaggcggaggtaggcagatcatgaggtcaggagatcgagaccatcctggctaacatggtgaaaccccgtctctact

SEQ ID NO: 201189 - DNA, 3932 bp, Artificial Sequence
  derived and/or modified sequence
aaagtgctcgggacaaggacatagggctgagagtagccatgggctctggaggagacagcctcctggggggcaggggttccctgcctctgctgctcctgctcatcatggtcctccgggaggatttccagatccagcctcgggacatggtggctgtggtgggtgagcagtttactctggaatgtgggccgccctggggccacccagagcccacagtctcatggtggaaagatgggaaacccctggccctccagcccggaaggcacacagtgtccggggggtccctgctgatggcaagagcagagaagagtgacgaagggacctacatgtgtgtggccaccaacagcgcaggacatagggagagccgcgcagcccgggtttccatccaggagccccaggactacacggagcctgtggagcttctggctgtgcgaattcagctggaaaatgtgacactgctgaacccggatcctgcagagggccccaagcctagaccggcggtgtggctcagctggaaggtcagtggccctgctgcgcctgcccaatcttacacggccttgttcaggacccagactgccccgggaggccagggagctccgtgggcagaggagctgctggccggctggcagagcgcagagcttggaggcctccactggggccaagactacgagttcaaagtgagaccatcctctggccgggctcgaggccctgacagcaacgtgctgctcctgaggctgccggaaaaagtgcccagtgccccacctcaggaagtgactctaaagcctggcaatggcactgtctttgtgagctgggtcccaccacctgctgaaaaccacaatggcatcatccgtggctaccaggtctggagcctgggcaacacatcactgccaccagccaactggactgtagttggtgagcagacccagctggaaatcgccacccatatgccaggctcctactgcgtgcaagtggctgcagtcactggtgctggagctggggagcccagtagacctgtctgcctccttttagagcaggccatggagcgagccacccaagaacccagtgagcatggtccctggaccctggagcagctgagggctaccttgaagcggcctgaggtcattgccacctgcggtgttgcactctggctgctgcttctgggcaccgccgtgtgtatccaccgccggcgccgagctagggtgcacctgggcccaggtctgtacagatataccagtgaggatgccatcctaaaacacaggatggatcacagtgactcccagtggttggcagacacttggcgttccacctctggctctcgggacctgagcagcagcagcagcctcagcagtcggctgggggcggatgcccgggacccactagactgtcgtcgctccttgctctcctgggactcccgaagccccggcgtgcccctgcttccagacaccagcactttttatggctccctcatcgctgagctgccctccagtaccccagccaggccaagtccccaggtcccagctgtcaggcgcctcccaccccagctggcccagctctccagcccctgttccagctcagacagcctctgcagccgcaggggactctcttctccccgcttgtctctggcccctgcagaggcttggaaggccaaaaagaagcaggagctgcagcatgccaacagttccccactgctccggggcagccactccttggagctccgggcctgtgagttaggaaatagaggttccaagaacctttcccaaagcccaggagctgtgccccaagctctggttgcctggcgggccctgggaccgaaactcctcagctcctcaaatgagctggttactcgtcatctccctccagcacccctctttcctcatgaaactcccccaactcagagtcaacagacccagcctccggtggcaccacaggctccctcctccatcctgctgccagcagcccccatccccatccttagcccctgcagtccccctagcccccaggcctcttccctctctggccccagcccagcttccagtcgcctgtccagctcctcactgtcatccctgggggaggatcaagacagcgtgctgacccctgaggaggtagccctgtgcttggaactcagtgagggtgaggagactcccaggaacagcgtctctcccatgccaagggctccttcaccccccaccacctatgggtacatcagcgtcccaacagcctcagagttcacggacatgggcaggactggaggaggggtggggcccaaggggggagtcttgctgtgcccacctcggccctgcctcacccccacccccagcgagggctccttagccaatggttggggctcagcctctgaggacaatgccgccagcgccagagccagccttgtcagctcctccgatggctccttcctcgctgatgctcactttgcccgggccctggcagtggctgtggatagctttggtttcggtctagagcccagggaggcagactgcgtcttcatagatgcctcatcacctccctccccacgggatgagatcttcctgacccccaacctctccctgcccctgtgggagtggaggccagactggttggaagacatggaggtcagccacacccagcggctgggaagggggatgcctccctggccccctgactctcagatctcttcccagagaagtcagctccactgtcgtatgcccaaggctggtgcttctcctgtagattactcctgaaccgtgtccctgagacttcccagacgggaatcagaaccacttctcctgtccacccacaagacctgggctgtggtgtgtgggtcttggcctgtgtttctctgcagctggggtccaccttcccaagcctccagagagttctccctccacgattgtgaaaacaaatgaaaacaaaattagagcaaagctgacctggagccctcagggagcaaaacatcatctccacctgactcctagccactgctttctcctctgtgccatccactcccaccaccaggttgttttggcctgaggagcagccctgcctgctgctcttcccccaccatttggatcacaggaagtggaggagccagaggtgcctttgtggaggacagcagtggctgctgggagagggctgtggaggaaggagcttctcggagccccctctcagccttacctgggcccctcctctagagaagagctcaactctctcccaacctcaccatggaaagaaaataattatgaatgccactgaggcactgaggccctacctcatgccaaacaaagggttcaaggctgggtctagcgaggatgctgaaggaagggaggtatgagaccgtaggtcaaaagcaccatcctcgtactgttgtcactatgagcttaagaaatttgataccataaaatggtaaagacttgagttctgtgagatcattccccggagcaccatttttaggggagcacctggagagatggcaagaatttcctgagttaggcagggatcaggcattcattgacactcagggagtgtcacacatttctgttctgcaattaaagggagaatgaggttcatccaccaaattttaagcagaatataggaagggcaggggtggggagtttcagggtctgctggtcctggcaacttatattaaatccacctcctcaagataagccttagggatatttatggctgagggaagtgggatggtctaaggcatggggaagggtgattggctgtggggaaaatgaagtaataggttcattctgcccaagtgtacttggggttcatggcatttcataaggacatttgtgtagaaaattgttttgctggctgggcacggtggctcacgcctgtaatcccagcactttgggaggcggaggtaggcagatcatgaggtcaggagatcgagaccatcctggctaacatggtgaaaccccgtctctact

SEQ ID NO: 201190 - DNA, 3071 bp, Artificial Sequence
  derived and/or modified sequence
cttccctcttcactgtgagctcagagcagcaggacaaagtgctcgggacaaggacatagggctgagagtagccatgggctctggaggagacagcctcctggggggcaggggttccctgcctctgctgctcctgctcatcatggccccctgcccggggacatgcccacgatggccaggccctgtccacagacctgggtgtctacacatgtgaggccagcaaccggcttggcacggcagtcagcagaggcgctcggctgtctgtggctgtcctccgggaggatttccagatccagcctcgggacatggtggctgtggtgggtgagcagtttactctggaatgtgggccgccctggggccacccagagcccacagtctcatggtggaaagatgggaaacccctggccctccagcccggaaggcacacagtgtccggggggtccctgctgatggcaagagcagagaagagtgacgaagggacctacatgtgtgtggccaccaacagcgcaggacatagggagagccgcgcagcccgggtttccatccaggagccccaggactacacggagcctgtggagcttctggctgtgcgaattcagctggaaaatgtgacactgctgaacccggatcctgcagagggccccaagcctagaccggcggtgtggctcagctggaaggtcagtggccctgctgcgcctgcccaatcttacacggccttgttcaggacccagactgccccgggaggccagggagctccgtgggcagaggagctgctggccggctggcagagcgcagagcttggaggcctccactggggccaagactacgagttcaaagtgagaccatcctctggccgggctcgaggccctgacagcaacgtgctgctcctgaggctgccggaaaaagtgcccagtgccccacctcaggaagtgactctaaagcctggcaatggcactgtctttgtgagctgggtcccaccacctgctgaaaaccacaatggcatcatccgtggctaccaggtctggagcctgggcaacacatcactgccaccagccaactggactgtagttggtgagcagacccagctggaaatcgccacccatatgccaggctcctactgcgtgcaagtggctgcagtcactggtgctggagctggggagcccagtagacctgtctgcctccttttagagcaggccatggagcgagccacccaagaacccagtgagcatggtccctggaccctggagcagctgagggctaccttgaagcggcctgaggtcattgccacctgcggtgttgcactctggctgctgcttctgggcaccgccgtgtgtatccaccgccggcgccgagctagggtgcacctgggcccaggtctgtacagatataccagtgaggatgccatcctaaaacacaggatggatcacagtgactcccagtggttggcagacacttggcgttccacctctggctctcgggacctgagcagcagcagcagcctcagcagtcggctgggggcggatgcccgggacccactagactgtcgtcgctccttgctctcctgggactcccgaagccccggcgtgcccctgcttccagacaccagcactttttatggctccctcatcgctgagctgccctccagtaccccagccaggccaagtccccaggtcccagctgtcaggcgcctcccaccccagctggcccagctctccagcccctgttccagctcagacagcctctgcagccgcaggggactctcttctccccgcttgtctctggcccctgcagaggcttggaaggccaaaaagaagcaggagctgcagcatgccaacagttccccactgctccggggcagccactccttggagctccgggcctgtgagttaggaaatagaggttccaagaacctttcccaaagcccaggagctgtgccccaagctctggttgcctggcgggccctgggaccgaaactcctcagctcctcaaatgagctggttactcgtcatctccctccagcacccctctttcctcatgaaactcccccaactcagagtcaacagacccagcctccggtggcaccacaggctccctcctccatcctgctgccagcagcccccatccccatccttagcccctgcagtccccctagcccccaggcctcttccctctctggccccagcccagcttccagtcgcctgtccagctcctcactgtcatccctgggggaggatcaagacagcgtgctgacccctgaggaggtagccctgtgcttggaactcagtgagggtgaggagactcccaggaacagcgtctctcccatgccaagggctccttcaccccccaccacctatgggtacatcagcgtcccaacagcctcagagttcacggacatgggcaggactggaggaggggtggggcccaaggggggagtcttgctgtgcccacctcggccctgcctcacccccacccccagcgagggctccttagccaatggttggggctcagcctctgaggacaatgccgccagcgccagagccagccttgtcagctcctccgatggctccttcctcgctgatgctcactttgcccgggccctggcagtggctgtggatagctttggtttcggtctagagcccagggaggcagactgcgtcttcatagatgcctcatcacctccctccccacgggatgagatcttcctgacccccaacctctccctgcccctgtgggagtggaggccagactggttggaagacatggaggtcagccacacccagcggctgggaagggggatgcctccctggccccctgactctcagatctcttcccagagaagtcagctccactgtcgtatgcccaaggctggtgcttctcctgtagattactcctgaaccgtgtccctgagacttcccagacgggaatcagaaccacttctcctgtccacccacaagacctgggctgtggtgtgtgggtcttggcctgtgtttctctgcagctggggtccaccttcccaagcctccagagagttctccctccacgattgtgaaaacaaatgaaaacaaaattagagc

SEQ ID NO: 201191 - DNA, 3024 bp, Artificial Sequence
  derived and/or modified sequence
atgggcagcggcggcgacagcctgctgggcggcagaggcagcctgcccctgctgctgctgctgatcatgggcggcatggcccaggacagccccccccagatcctggtgcacccccaggaccagctgttccagggccccggccccgccagaatgagctgccaggccagcggccagcccccccccaccatcagatggctgctgaacggccagcccctgagcatggtgccccccgacccccaccacctgctgcccgacggcaccctgctgctgctgcagccccccgccagaggccacgcccacgacggccaggccctgagcaccgacctgggcgtgtacacctgcgaggccagcaacagactgggcaccgccgtgagcagaggcgccagactgagcgtggccgtgctgagagaggacttccagatccagcccagagacatggtggccgtggtgggcgagcagttcaccctggagtgcggccccccctggggccaccccgagcccaccgtgagctggtggaaggacggcaagcccctggccctgcagcccggcagacacaccgtgagcggcggcagcctgctgatggccagagccgagaagagcgacgagggcacctacatgtgcgtggccaccaacagcgccggccacagagagagcagagccgccagagtgagcatccaggagccccaggactacaccgagcccgtggagctgctggccgtgagaatccagctggagaacgtgaccctgctgaaccccgaccccgccgagggccccaagcccagacccgccgtgtggctgagctggaaggtgagcggccccgccgcccccgcccagagctacaccgccctgttcagaacccagaccgcccccggcggccagggcgccccctgggccgaggagctgctggccggctggcagagcgccgagctgggcggcctgcactggggccaggactacgagttcaaggtgagacccagcagcggcagagccagaggccccgacagcaacgtgctgctgctgagactgcccgagaaggtgcccagcgcccccccccaggaggtgaccctgaagcccggcaacggcaccgtgttcgtgagctgggtgcccccccccgccgagaaccacaacggcatcatcagaggctaccaggtgtggagcctgggcaacaccagcctgccccccgccaactggaccgtggtgggcgagcagacccagctggagatcgccacccacatgcccggcagctactgcgtgcaggtggccgccgtgaccggcgccggcgccggcgagcccagcagacccgtgtgcctgctgctggagcaggccatggagagagccacccaggagcccagcgagcacggcccctggaccctggagcagctgagagccaccctgaagagacccgaggtgatcgccacctgcggcgtggccctgtggctgctgctgctgggcaccgccgtgtgcatccacagaagaagaagagccagagtgcacctgggccccggcctgtacagatacaccagcgaggacgccatcctgaagcacagaatggaccacagcgacagccagtggctggccgacacctggagaagcaccagcggcagcagagacctgagcagcagcagcagcctgagcagcagactgggcgccgacgccagagaccccctggactgcagaagaagcctgctgagctgggacagcagaagccccggcgtgcccctgctgcccgacaccagcaccttctacggcagcctgatcgccgagctgcccagcagcacccccgccagacccagcccccaggtgcccgccgtgagaagactgcccccccagctggcccagctgagcagcccctgcagcagcagcgacagcctgtgcagcagaagaggcctgagcagccccagactgagcctggcccccgccgaggcctggaaggccaagaagaagcaggagctgcagcacgccaacagcagccccctgctgagaggcagccacagcctggagctgagagcctgcgagctgggcaacagaggcagcaagaacctgagccagagccccggcgccgtgccccaggccctggtggcctggagagccctgggccccaagctgctgagcagcagcaacgagctggtgaccagacacctgccccccgcccccctgttcccccacgagaccccccccacccagagccagcagacccagccccccgtggccccccaggcccccagcagcatcctgctgcccgccgcccccatccccatcctgagcccctgcagcccccccagcccccaggccagcagcctgagcggccccagccccgccagcagcagactgagcagcagcagcctgagcagcctgggcgaggaccaggacagcgtgctgacccccgaggaggtggccctgtgcctggagctgagcgagggcgaggagacccccagaaacagcgtgagccccatgcccagagcccccagcccccccaccacctacggctacatcagcgtgcccaccgccagcgagttcaccgacatgggcagaaccggcggcggcgtgggccccaagggcggcgtgctgctgtgcccccccagaccctgcctgacccccacccccagcgagggcagcctggccaacggctggggcagcgccagcgaggacaacgccgccagcgccagagccagcctggtgagcagcagcgacggcagcttcctggccgacgcccacttcgccagagccctggccgtggccgtggacagcttcggcttcggcctggagcccagagaggccgactgcgtgttcatcgacgccagcagcccccccagccccagagacgagatcttcctgacccccaacctgagcctgcccctgtgggagtggagacccgactggctggaggacatggaggtgagccacacccagagactgggcagaggcatgcccccctggccccccgacagccagatcagcagccagagaagccagctgcactgcagaatgcccaaggccggcgccagccccgtggactacagctag

SEQ ID NO: 201192 - DNA, 2106 bp, Artificial Sequence
  derived and/or modified sequence
atgggcagcggcggcgacagcctgctgggcggcagaggcagcctgcccctgctgctgctgctgatcatggtgctgagagaggacttccagatccagcccagagacatggtggccgtggtgggcgagcagttcaccctggagtgcggccccccctggggccaccccgagcccaccgtgagctggtggaaggacggcaagcccctggccctgcagcccggcagacacaccgtgagcggcggcagcctgctgatggccagagccgagaagagcgacgagggcacctacatgtgcgtggccaccaacagcgccggccacagagagagcagagccgccagagtgagcatccaggagccccaggactacaccgagcccgtggagctgctggccgtgagaatccagctggagaacgtgaccctgctgaaccccgaccccgccgagggccccaagcccagacccgccgtgtggctgagctggaaggtgagcggccccgccgcccccgcccagagctacaccgccctgttcagaacccagaccgcccccggcggccagggcgccccctgggccgaggagctgctggccggctggcagagcgccgagctgggcggcctgcactggggccaggactacgagttcaaggtgagacccagcagcggcagagccagaggccccgacagcaacgtgctgctgctgagactgcccgagaaggtgcccagcgcccccccccaggaggtgaccctgaagcccggcaacggcaccgtgttcgtgagctgggtgcccccccccgccgagaaccacaacggcatcatcagaggctaccaggtgtggagcctgggcaacaccagcctgccccccgccaactggaccgtggtgggcgagcagacccagctggagatcgccacccacatgcccggcagctactgcgtgcaggtggccgccgtgaccggcgccggcgccggcgagcccagcagacccgtgtgcctgctgctggagcaggccatggagagagccacccaggagcccagcgagcacggcccctggaccctggagcagctgagagccaccctgaagagacccgaggtgatcgccacctgcggcgtggccctgtggctgctgctgctgggcaccgccgtgtgcatccacagaagaagaagagccagagtgcacctgggccccggcctgtacagatacaccagcgaggacgccatcctgaagcacagaatggaccacagcgacagccagtggctggccgacacctggagaagcaccagcggcagcagagacctgagcagcagcagcagcctgagcagcagactgggcgccgacgccagagaccccctggactgcagaagaagcctgctgagctgggacagcagaagccccggcgtgcccctgctgcccgacaccagcaccttctacggcagcctgatcgccgagctgcccagcagcacccccgccagacccagcccccaggtgcccgccgtgagaagactgcccccccagctggcccagctgagcagcccctgcagcagcagcgacagcctgtgcagcagaagaggcctgagcagccccagactgagcctggcccccgccgaggcctggaaggccaagaagaagcaggagctgcagcacgccaacagcagccccctgctgagaggcagccacagcctggagctgagagcctgcgagctgggcaacagaggcagcaagaacctgagccagagccccggcgccgtgccccaggccctggtggcctggagagccctgggccccaagctgctgagcagcagcaacgagctggtgaccagacacctgccccccgcccccctgttcccccacgagaccccccccacccagagccagcagacccagccccccgtggccccccaggcccccagcagcatcctgctgcccgccgcccccatccccatcctgagcccctgcagcccccccagcccccaggccagcagcctgagcggccccagccccgccagcagcagactgagcagcagcagcctgagcagcctgggcgaggaccaggacagcgtgctgacccccgaggaggtggccctgtgcctggagctgagcgagggcgaggagaccccctag

SEQ ID NO: 201193 - DNA, 2589 bp, Artificial Sequence
  derived and/or modified sequence
atggtggccgtggtgggcgagcagttcaccctggagtgcggccccccctggggccaccccgagcccaccgtgagctggtggaaggacggcaagcccctggccctgcagcccggcagacacaccgtgagcggcggcagcctgctgatggccagagccgagaagagcgacgagggcacctacatgtgcgtggccaccaacagcgccggccacagagagagcagagccgccagagtgagcatccaggagccccaggactacaccgagcccgtggagctgctggccgtgagaatccagctggagaacgtgaccctgctgaaccccgaccccgccgagggccccaagcccagacccgccgtgtggctgagctggaaggtgagcggccccgccgcccccgcccagagctacaccgccctgttcagaacccagaccgcccccggcggccagggcgccccctgggccgaggagctgctggccggctggcagagcgccgagctgggcggcctgcactggggccaggactacgagttcaaggtgagacccagcagcggcagagccagaggccccgacagcaacgtgctgctgctgagactgcccgagaaggtgcccagcgcccccccccaggaggtgaccctgaagcccggcaacggcaccgtgttcgtgagctgggtgcccccccccgccgagaaccacaacggcatcatcagaggctaccaggtgtggagcctgggcaacaccagcctgccccccgccaactggaccgtggtgggcgagcagacccagctggagatcgccacccacatgcccggcagctactgcgtgcaggtggccgccgtgaccggcgccggcgccggcgagcccagcagacccgtgtgcctgctgctggagcaggccatggagagagccacccaggagcccagcgagcacggcccctggaccctggagcagctgagagccaccctgaagagacccgaggtgatcgccacctgcggcgtggccctgtggctgctgctgctgggcaccgccgtgtgcatccacagaagaagaagagccagagtgcacctgggccccggcctgtacagatacaccagcgaggacgccatcctgaagcacagaatggaccacagcgacagccagtggctggccgacacctggagaagcaccagcggcagcagagacctgagcagcagcagcagcctgagcagcagactgggcgccgacgccagagaccccctggactgcagaagaagcctgctgagctgggacagcagaagccccggcgtgcccctgctgcccgacaccagcaccttctacggcagcctgatcgccgagctgcccagcagcacccccgccagacccagcccccaggtgcccgccgtgagaagactgcccccccagctggcccagctgagcagcccctgcagcagcagcgacagcctgtgcagcagaagaggcctgagcagccccagactgagcctggcccccgccgaggcctggaaggccaagaagaagcaggagctgcagcacgccaacagcagccccctgctgagaggcagccacagcctggagctgagagcctgcgagctgggcaacagaggcagcaagaacctgagccagagccccggcgccgtgccccaggccctggtggcctggagagccctgggccccaagctgctgagcagcagcaacgagctggtgaccagacacctgccccccgcccccctgttcccccacgagaccccccccacccagagccagcagacccagccccccgtggccccccaggcccccagcagcatcctgctgcccgccgcccccatccccatcctgagcccctgcagcccccccagcccccaggccagcagcctgagcggccccagccccgccagcagcagactgagcagcagcagcctgagcagcctgggcgaggaccaggacagcgtgctgacccccgaggaggtggccctgtgcctggagctgagcgagggcgaggagacccccagaaacagcgtgagccccatgcccagagcccccagcccccccaccacctacggctacatcagcgtgcccaccgccagcgagttcaccgacatgggcagaaccggcggcggcgtgggccccaagggcggcgtgctgctgtgcccccccagaccctgcctgacccccacccccagcgagggcagcctggccaacggctggggcagcgccagcgaggacaacgccgccagcgccagagccagcctggtgagcagcagcgacggcagcttcctggccgacgcccacttcgccagagccctggccgtggccgtggacagcttcggcttcggcctggagcccagagaggccgactgcgtgttcatcgacgccagcagcccccccagccccagagacgagatcttcctgacccccaacctgagcctgcccctgtgggagtggagacccgactggctggaggacatggaggtgagccacacccagagactgggcagaggcatgcccccctggccccccgacagccagatcagcagccagagaagccagctgcactgcagaatgcccaaggccggcgccagccccgtggactacagctag

SEQ ID NO: 201194 - protein, 163 aa, Artificial Sequence
  derived and/or modified sequence
MAAGLFGLSARRLLAAAATRGLPAARVRWESSFSRTVVAPSAVAGKRPPEPTTPWQEDPEPEDENLYEKNPDSHGYDKDPVLDVWNMRLVFFFGVSIILVLGSTFVAYLPDYRCTGCPRAWDGMKEWSRREAERLVKYREANGLPIMESNCFDPSKIQLPEDE

SEQ ID NO: 201195 - DNA, 100 bp, Artificial Sequence
  derived and/or modified sequence
ggaatcgagtggaatcatcgaaagaaatcgaatggaatcattgtcgaatggaatggaatggaatcaaagaatggaatcgaagggaatcattggatgggct

SEQ ID NO: 201196 - DNA, 492 bp, Artificial Sequence
  derived and/or modified sequence
atggccgcaggtctttttggactgagcgcgagacgccttctggccgcggccgcgacacgcggcctccccgccgctcgggttcgatgggaatcatccttttccagaactgtcgttgcaccttctgccgttgcaggcaagagaccacctgagccaaccacaccatggcaggaggatccagagcctgaggacgaaaacctatacgagaagaatccagacagtcatgggtatgataaggaccctgtgctcgacgtctggaacatgcggctcgtgttcttttttggcgtgtccattattctggttcttgggtccacgtttgtcgcgtatttaccagactatagatgcaccggttgtccaagggcttgggacggcatgaaggagtggagtagaagggaggccgaacggttggtgaagtaccgggaagctaacggcttacccatcatggaatcaaactgttttgacccctcgaagattcagctgccagaagacgagtag

SEQ ID NO: 201197 - DNA, 492 bp, Artificial Sequence
  derived and/or modified sequence
atggctgctggcctgtttggcctgagcgcccggcggctgctggccgctgctgccacccggggcctgcctgctgcccgggtgcgctgggagagcagcttcagcaggacagtggtggcccccagcgctgtggccggcaagaggcctcctgagcccaccaccccctggcaggaggaccctgagccagaagatgagaacctgtatgagaagaacccagacagccacggctatgacaaggaccctgtgctggatgtgtggaacatgaggctggtgttcttctttggagtgtccatcatcctggtgctgggcagcacctttgtggcctacctgcctgactaccgctgcaccggctgcccccgggcctgggatggcatgaaggagtggagcagaagagaggccgagcggctggtgaagtaccgggaggccaacggcctgcccatcatggagagcaactgctttgaccccagcaagatccagctgcctgaagatgaatag

SEQ ID NO: 201198 - DNA, 948 bp, Artificial Sequence
  derived and/or modified sequence
tttgaagatgaaagactagcggaagctctgcctctttccccagtgggcgagggaactcggggcgattggctgggaactgtatccacccaaatgtcaccgatttcttcctatgcaggaaatgagcagacccatcaataagaaatttctcagcctggccgaaaatggttggccccacgaagccacgacaactggaggcaaagagggttgctcaacgccccgcctcattggaaaaccaaatcagatctgggacctatatagcgtggcggaggcggggcgatgattgtcgcgctcgcacccactgcagctgcgcacagtcgcatttctttccccgcccctgagaccctgcagcaccatctgtcatggcggctgggctgtttggtttgagcgctcgccgtcttttggcggcagcggcgacgcgagggctcccggccgcccgcgtccgctgggaatctagcttctccaggactgtggtcgccccgtccgctgtggcgggaaagcggcccccagaaccgaccacaccgtggcaagaggacccagaacccgaggacgaaaacttgtatgagaagaacccagactcccatggttatgacaaggaccccgttttggacgtctggaacatgcgacttgtcttcttctttggcgtctccatcatcctggtccttggcagcacctttgtggcctatctgcctgactacaggtgcacagggtgtccaagagcgtgggatgggatgaaagagtggtcccgccgcgaagctgagaggcttgtgaaataccgagaggccaatggccttcccatcatggaatccaactgcttcgaccccagcaagatccagctgccagaggatgagtgaccagttgctaagtggggctcaagaagcaccgccttccccaccccctgcctgccattctgacctcttctcagagcacctaattaaaggggctgaaagt

SEQ ID NO: 201199 - DNA, 492 bp, Artificial Sequence
  derived and/or modified sequence
atggccgccggcctgttcggcctgagcgcccggcggctgctggccgccgcagctacacgcgggcttcctgctgcgcgagttcgctgggagtcgtcattctctcggacggtggtagcaccctccgcagtggccggaaaaagaccccccgagccaacaactccctggcaggaggatcccgagccagaggatgagaacctgtacgaaaaaaatcccgattcacatggctacgacaaggatcctgtacttgacgtgtggaatatgagattagtgttttttttcggagtctctatcattttggtgctaggatctacattcgtggcgtaccttcccgactaccgctgcacaggatgcccgcgggcttgggacggtatgaaagaatggtccaggcgcgaggcagagaggctggttaagtatagggaggcgaacggcctaccgattatggagtccaattgctttgatccatccaagatacagctaccggaggatgagtag

SEQ ID NO: 201200 - DNA, 492 bp, Artificial Sequence
  derived and/or modified sequence
atggccgctgggctgttcggactttctgccagacgattgctggccgctgctgccacgaggggcttgcccgcagctcgagtgcggtgggagagctctttttctcgcaccgtcgtggcaccttcagcggtggcgggaaagagacctcccgaaccaactacgccctggcaagaagatccggagcccgaggacgaaaatctatacgagaaaaacccagactctcatggctacgataaggatccagtactggacgtatggaatatgcgactggtatttttctttggagtgagcatcatcttagttttggggagtactttcgtggcatacttaccagattataggtgtactggatgtccacgcgcatgggacggcatgaaagaatggagcaggagggaggcggagcgtcttgtgaagtatcgagaagcgaatgggctgcctattatggaaagcaattgctttgatccttctaaaattcaactccctgaagacgaatag

SEQ ID NO: 201201 - DNA, 492 bp, Artificial Sequence
  derived and/or modified sequence
atggccgccggcctgttcggcctgagcgccagaagactgctggccgccgccgccaccagaggcctgcccgccgccagagtgagatgggagagcagcttcagcagaaccgtggtggcccccagcgccgtggccggcaagagaccccccgagcccaccaccccctggcaggaggaccccgagcccgaggacgagaacctgtacgagaagaaccccgacagccacggctacgacaaggaccccgtgctggacgtgtggaacatgagactggtgttcttcttcggcgtgagcatcatcctggtgctgggcagcaccttcgtggcctacctgcccgactacagatgcaccggctgccccagagcctgggacggcatgaaggagtggagcagaagagaggccgagagactggtgaagtacagagaggccaacggcctgcccatcatggagagcaactgcttcgaccccagcaagatccagctgcccgaggacgagtag

SEQ ID NO: 201202 - protein, 232 aa, Artificial Sequence
  derived and/or modified sequence
MPSLWDRFSSSSTSSSPSSLPRTPTPDRPPRSAWGSATREEGFDRSTSLESSDCESLDSSNSGFGPEEDTAYLDGVSLPDFELLSDPEDEHLCANLMQLLQESLAQARLGSRRPARLLMPSQLVSQVGKELLRLAYSEPCGLRGALLDVCVEQGKSCHSVGQLALDPSLVPTFQLTLVLRLDSRLWPKIQGLFSSANSPFLPGFSQSLTLSTGFRVIKKKLYSSEQLLIEEC

SEQ ID NO: 201203 - DNA, 699 bp, Artificial Sequence
  derived and/or modified sequence
atgccgtctttgtgggaccgattcagcagcagctctacttcctccagcccgagctctcttcctcggacgccaacacctgacagacctccaaggtcagcatggggatctgccacaagagaggaaggtttcgataggtcgacttccctcgagagctccgactgtgagtctttggattcaagcaactcaggctttggaccagaagaagatacagcatatctcgatggggtctctctgcccgactttgagttactgagcgaccctgaagatgagcacctctgtgcaaatctgatgcagttgctgcaggagagccttgcccaggccagactgggctcaagacgccccgctcggttactcatgccatctcagctcgtgtcccaggtgggaaaagaactactgaggctggcatactccgaaccatgtggtttgcgaggtgccctgctggatgtgtgcgtcgagcaggggaagtcttgccattctgtgggtcaactcgcactcgatccctcattggtacctacctttcagctaacactggtgctccgtttggatagtaggctgtggccaaagattcaggggctgttctcttctgcgaacagcccatttctgcctggctttagtcaaagcctcaccctctctaccggcttcagggtcattaaaaagaagctgtacagctcagaacagctcctcatcgaagaatgctag

SEQ ID NO: 201204 - DNA, 699 bp, Artificial Sequence
  derived and/or modified sequence
atgcccagcctgtgggaccgcttcagcagcagcagcaccagcagcagccccagcagcctgcccaggacccccaccccagacaggcctcccaggtctgcctggggcagcgccacccgggaggagggctttgacaggagcaccagcctggagagcagtgactgtgagagcctggacagcagcaacagcggcttcggccctgaggaggacacagcctacctggatggagtgtccctgcctgactttgagctgctgagtgaccctgaagatgagcacctgtgtgccaacctgatgcagctgctgcaggagagcctggcccaggcccggctgggcagccggcggcctgcccggctgctgatgcccagccagctggtgtcccaggtgggcaaggagctgctgcggctggcctacagcgagccctgtggcctgcggggggccctgctggatgtgtgtgtggagcagggcaagagctgccacagcgtgggccagctggccctggaccccagcctggtgcccaccttccagctgaccctggtgctgcggctggacagccggctgtggcccaagatccagggcctcttcagcagcgccaacagccccttcctgcccggcttcagccagagcctgaccctgagcacaggcttccgggtcatcaagaagaagctgtacagcagcgagcagctgctgattgaagaatgttag

SEQ ID NO: 201205 - DNA, 699 bp, Artificial Sequence
  derived and/or modified sequence
atgcccagcctgtgggaccggttcagcagcagcagcaccagcagcagcccctcttcactgcctcggacgccaactcccgaccgtccgccacggtcagcctggggcagcgccacgcgagaggaaggctttgataggtccacgagccttgagagctccgattgcgaatccctggatagctctaattccggtttcggcccagaggaggatactgcctacctggatggcgtatctctgcctgacttcgaactcttgagtgacccagaagacgagcacctgtgcgcaaaccttatgcagctcctgcaggagtccttagcccaagcccgactgggaagccgccgcccggcccgactgctcatgcccagccagcttgtttcccaggtcgggaaagaactactaaggctcgcatatagcgagccctgtggcctgagaggagctctgctggacgtttgtgtggagcaaggcaaatcatgccactcagtgggacaacttgccttggacccctccttagttccaacctttcagctgacgctcgtgttgaggctcgattcccgtctatggcccaagatacaaggactgttctcatcagccaacagcccgttcttgcccggctttagccagagcttaaccctgagcacaggctttagagtgattaaaaaaaaactgtactcatcagagcagctcctcatcgaggaatgttag

SEQ ID NO: 201206 - DNA, 699 bp, Artificial Sequence
  derived and/or modified sequence
atgccatctttatgggatcgcttttctagtagctctacatcaagtagcccttcttctctccccaggacacctactcccgataggcccccaaggagcgcgtggggctccgccacccgcgaagagggctttgatcggtctaccagtcttgaaagttccgactgcgaatccctggattcttcaaattccggcttcggacccgaggaggatactgcttacctggatggcgtatctctgcccgacttcgagttgttgtcggatccagaggatgagcacctgtgcgccaacttgatgcaacttcttcaggaaagtttggcacaagcgagactgggatctcgaagaccggcacggctccttatgccttcgcagttagtgagtcaggtgggcaaagagctactccggctggcctactcagaaccctgcggcctccgcggtgccctgctggatgtgtgcgtcgagcagggcaagtcttgccacagtgtcgggcagctcgcactggatccctccctggtgcctacatttcagctaactcttgtgctgagattggactctaggctgtggccaaaaattcaaggactgttctcaagtgctaacagccccttcctgccaggattctcacagtcactcacactgagcaccggatttagagtgattaagaagaagctctacagttcagaacagttgctgattgaagagtgctag

SEQ ID NO: 201207 - DNA, 699 bp, Artificial Sequence
  derived and/or modified sequence
atgcccagcctgtgggacagattcagcagcagcagcaccagcagcagccccagcagcctgcccagaacccccacccccgacagaccccccagaagcgcctggggcagcgccaccagagaggagggcttcgacagaagcaccagcctggagagcagcgactgcgagagcctggacagcagcaacagcggcttcggccccgaggaggacaccgcctacctggacggcgtgagcctgcccgacttcgagctgctgagcgaccccgaggacgagcacctgtgcgccaacctgatgcagctgctgcaggagagcctggcccaggccagactgggcagcagaagacccgccagactgctgatgcccagccagctggtgagccaggtgggcaaggagctgctgagactggcctacagcgagccctgcggcctgagaggcgccctgctggacgtgtgcgtggagcagggcaagagctgccacagcgtgggccagctggccctggaccccagcctggtgcccaccttccagctgaccctggtgctgagactggacagcagactgtggcccaagatccagggcctgttcagcagcgccaacagccccttcctgcccggcttcagccagagcctgaccctgagcaccggcttcagagtgatcaagaagaagctgtacagcagcgagcagctgctgatcgaggagtgctag

SEQ ID NO: 201208 - DNA, 1748 bp, Artificial Sequence
  derived and/or modified sequence
gggcgcagcaggccaagggggaggtgcgagcgtggacctgggacgggtctgggcggctctcggtggttggcacgggttcgcacacccattcaagcggcaggacgcacttgtcttagcagttctcgctgaccgcgctagctgcggcttctacgctccggcactctgagttcatcagcaaacgccctggcgtctgtcctcaccatgcctagcctttgggaccgcttctcgtcgtcgtccacctcctcttcgccctcgtccttgccccgaactcccaccccagatcggccgccgcgctcagcctgggggtcggcgacccgggaggaggggtttgaccgctccacgagcctggagagctcggactgcgagtccctggacagcagcaacagtggcttcgggccggaggaagacacggcttacctggatggggtgtcgttgcccgacttcgagctgctcagtgaccctgaggatgaacacttgtgtgccaacctgatgcagctgctgcaggagagcctggcccaggcgcggctgggctctcgacgccctgcgcgcctgctgatgcctagccagttggtaagccaggtgggcaaagaactactgcgcctggcctacagcgagccgtgcggcctgcggggggcgctgctggacgtctgcgtggagcagggcaagagctgccacagcgtgggccagctggcactcgaccccagcctggtgcccaccttccagctgaccctcgtgctgcgcctggactcacgactctggcccaagatccaggggctgtttagctccgccaactctcccttcctccctggcttcagccagtccctgacgctgagcactggcttccgagtcatcaagaagaagctgtacagctcggaacagctgctcattgaggagtgttgaacttcaacctgagggggccgacagtgccctccaagacagagacgactgaacttttggggtggagactagaggcaggagctgagggactgattcctgtggttggaaaactgaggcagccacctaaggtggaggtgggggaatagtgtttcccaggaagctcattgagttgtgtgcgggtggctgtgcattggggacacatacccctcagtactgtagcatgaaacaaaggcttaggggccaacaaggcttccagctggatgtgtgtgtagcatgtaccttattatttttgttactgacagttaacagtggtgtgacatccagagagcagctgggctgctcccgccccagcccggcccagggtgaaggaagaggcacgtgctcctcagagcagccggagggaggggggaggtcggaggtcgtggaggtggtttgtgtatcttactggtctgaagggaccaagtgtgtttgttgtttgttttgtatcttgtttttctgatcggagcatcactactgacctgttgtaggcagctatcttacagacgcatgaatgtaagagtaggaaggggtgggtgtcagggatcacttgggatctttgacacttgaaaaattacacctggcagctgcgtttaagccttcccccatcgtgtactgcagagttgagctggcaggggaggggctgagagggtgggggctggaacccctccccgggaggagtgccatctgggtcttccatctagaactgtttacatgaagataagatactcactgttcatgaatacacttgatgttcaagtattaagacctatgcaatattttttacttttctaataaacatgtttgttaaaaca

SEQ ID NO: 201209 - protein, 99 aa, Artificial Sequence
  derived and/or modified sequence
MSSQQSAVSAKGFSKGSSQGPAPCPAPAPTPAPASSSSCCGSGRGCCGDSGCCGSSSTSCCCFPRRRRRQRSSGCCCCGGGSQRSQRSNNRSSGCCSGC

SEQ ID NO: 201210 - DNA, 300 bp, Artificial Sequence
  derived and/or modified sequence
atgagcagccagcagagcgccgtgagcgccaagggcttcagcaagggcagcagccagggccccgccccctgccccgcccccgcccccacccccgcccccgccagcagcagcagctgctgcggcagcggcagaggctgctgcggcgacagcggctgctgcggcagcagcagcaccagctgctgctgcttccccagaagaagaagaagacagagaagcagcggctgctgctgctgcggcggcggcagccagagaagccagagaagcaacaacagaagcagcggctgctgcagcggctgctag

SEQ ID NO: 201211 - DNA, 300 bp, Artificial Sequence
  derived and/or modified sequence
atgtcaagtcaacagtccgctgtgtccgccaaggggttttcaaaggggagcagccagggccctgcaccttgtcctgccccagcgcctacacctgcccccgccagcagtagctcttgttgcgggtccggcagaggctgttgcggcgattcgggctgttgcgggtccagcagcacaagctgctgttgttttcctcgccgccggcgaaggcagcgctcaagcggatgttgttgctgcggcggaggcagccagaggtcccaaaggagcaacaacagaagctctgggtgctgcagcggatgttag

SEQ ID NO: 201212 - DNA, 450 bp, Artificial Sequence
  derived and/or modified sequence
atgaaggaggccctgcaccagatcgtggtgcgctgcagcgagctggtgagcagcaccagcctgccccggctgtctgtgtcccggctgcagggccccccagacagccagcccctgggcaccctgggccagggcggctggaagctgctgggcatcgtgggcagcctggcccctgagaccctgggcggcctgggcacagaatttggcccctgcacccaccccctgccctttgacatggtgcgggagcgggagagagatgatgagctgcggcagggctggctgctgcagtgcccccagtgtgcccggaccctgctgtgccactgcggccccttcctgaccccacccagccagaccagcagcagcggcttccagctgtgcagcctgaagcccagcggcagcctggtgacagccacagagcccctgagcaactttgccttctcctacttcccctag

SEQ ID NO: 201213 - DNA, 300 bp, Artificial Sequence
  derived and/or modified sequence
atgagcagccagcagagcgctgtgtctgccaagggcttcagcaagggcagcagccagggccctgccccctgcccagccccagcccccaccccagccccagccagcagcagcagctgctgcggcagcggccggggctgctgcggggacagcggctgctgcggcagcagcagcaccagctgctgctgcttccccaggagaagaagacggcagaggagcagcggctgctgctgctgcggcggcggcagccagaggagccagaggagcaacaacagaagcagcggctgctgcagcggctgctag

SEQ ID NO: 201214 - DNA, 300 bp, Artificial Sequence
  derived and/or modified sequence
atgagcagccagcagagcgccgtgagcgccaagggcttcagcaagggcagtagtcagggacctgccccatgtccggctcctgcacccactccggctccagcatcaagcagctcctgttgcggcagcggcagaggctgctgcggggactcaggttgttgcggatcatcatccaccagttgttgctgttttccccgacgccggaggcgccaacgatcttctggttgttgctgctgtggcggagggtcacagcgctctcaacggtcaaacaatcgctcttcgggatgctgttcaggctgctag

SEQ ID NO: 201215 - DNA, 300 bp, Artificial Sequence
  derived and/or modified sequence
atgtcgtcccagcaaagtgccgtttctgccaagggcttttccaaaggttctagccagggacctgcaccatgtcccgcaccagctcctacccccgctcctgcctccagttcttcatgctgcggtagcggcagggggtgctgtggagattctggctgttgcgggtcgagttctacctcctgttgttgcttccccaggagaagacgcagacagcgttctagtgggtgctgttgttgcggaggaggcagtcagagaagccaacgtagcaataatcgctcatccggatgctgcagtgggtgctag

SEQ ID NO: 201216 - protein, 981 aa, Artificial Sequence
  derived and/or modified sequence
MDGFAGSLDDSISAASTSDVQDRLSALESRVQQQEDEITVLKAALADVLRRLAISEDHVASVKKSVSSKGQPSPRAVIPMSCITNGSGANRKPSHTSAVSIAGKETLSSAAKSGTEKKKEKPQGQREKKEESHSNDQSPQIRASPSPQPSSQPLQIHRQTPESKNATPTKSIKRPSPAEKSHNSWENSDDSRNKLSKIPSTPKLIPKVTKTADKHKDVIINQEGEYIKMFMRGRPITMFIPSDVDNYDDIRTELPPEKLKLEWAYGYRGKDCRANVYLLPTGKIVYFIASVVVLFNYEERTQRHYLGHTDCVKCLAIHPDKIRIATGQIAGVDKDGRPLQPHVRVWDSVTLSTLQIIGLGTFERGVGCLDFSKADSGVHLCIIDDSNEHMLTVWDWQKKAKGAEIKTTNEVVLAVEFHPTDANTIITCGKSHIFFWTWSGNSLTRKQGIFGKYEKPKFVQCLAFLGNGDVLTGDSGGVMLIWSKTTVEPTPGKGPKGVYQISKQIKAHDGSVFTLCQMRNGMLLTGGGKDRKIILWDHDLNPEREIEVPDQYGTIRAVAEGKADQFLVGTSRNFILRGTFNDGFQIEVQGHTDELWGLATHPFKDLLLTCAQDRQVCLWNSMEHRLEWTRLVDEPGHCADFHPSGTVVAIGTHSGRWFVLDAETRDLVSIHTDGNEQLSVMRYSIDGTFLAVGSHDNFIYLYVVSENGRKYSRYGRCTGHSSYITHLDWSPDNKYIMSNSGDYEILYWDIPNGCKLIRNRSDCKDIDWTTYTCVLGFQVFGVWPEGSDGTDINALVRSHNRKVIAVADDFCKVHLFQYPCSKAKAPSHKYSAHSSHVTNVSFTHNDSHLISTGGKDMSIIQWKLVEKLSLPQNETVADTTLTKAPVSSTESVIQSNTPTPPPSQPLNETAEEESRISSSPTLLENSLEQTVEPSEDHSEEESEEGSGDLGEPLYEEPCNEISKEQAKATLLEDQQDPSPSS

SEQ ID NO: 201217 - DNA, 2946 bp, Artificial Sequence
  derived and/or modified sequence
atggatggttttgcaggctccctagacgatagcatatcagcagcctctactagtgatgtacaagaccgcctgagcgctctagagtccagggtacaacagcaggaagatgaaattactgtgctgaaagccgccttagcagacgtgctgcggcgattggcaatctccgaagatcacgtagccagcgtgaagaagagcgtgtcctccaaaggccagcccagccccagggccgtgattcctatgagctgcattactaacggctcaggcgccaatcgtaaaccgtcccatacctctgcagtatccatagcaggcaaggaaacactgagcagcgcagccaagagtggcaccgagaagaaaaaggaaaaaccccaaggacagagagagaaaaaagaagaatctcatagtaatgaccagtccccacagattagggcttcccccagcccacagcctagcagccagccccttcagattcaccggcagacgcctgagtccaaaaacgccacacccactaaatcaattaagaggccatctcctgccgaaaaaagccataatagctgggaaaattcggacgatagtcgtaataaactgtccaagatccctagcacccctaaactcatccccaaggtcactaaaacggctgacaagcacaaagatgtgatcattaatcaagaaggcgaatatatcaagatgttcatgagaggaagaccaatcacaatgttcatcccctccgacgtagacaattatgacgacatccgtaccgagctacctccggagaagcttaaactagaatgggcatacggataccggggaaaagattgccgcgctaacgtgtacctgcttccaacgggtaaaattgtgtattttattgcctccgttgttgtgctttttaactacgaggagcgaactcagaggcactatcttggccatacagactgcgtgaagtgcttggctatccatccggataaaatccgcatcgctacgggtcaaatagccggcgtagataaggacggaagacctctccagcctcatgtgcgcgtctgggattcggtgaccctatctacccttcagataattggcctgggaacattcgaacggggggtcgggtgtctggactttagtaaggccgacagcggagtgcatctgtgtatcattgacgacagtaacgagcacatgctcactgtgtgggattggcagaagaaagctaagggtgctgaaattaagacgacaaacgaagttgtgctggcggtggagttccatcctaccgatgccaacactattataacgtgtgggaaaagccatatctttttctggacgtggagcggcaatagcctgacaaggaaacagggaatcttcggcaagtacgaaaagccgaaattcgtgcagtgcttggcattccttggaaatggtgatgtgctgacaggtgactcggggggagtaatgctgatctggtccaaaaccacggttgagcccacccctgggaagggccctaaaggcgtgtatcagattagcaagcagatcaaagcccacgacggctcggtgtttaccctgtgtcaaatgcggaacggtatgctccttacaggcggcgggaaggaccgaaagatcatactctgggaccatgacctcaacccagagagagagattgaggtgcctgatcaatacggtacaatcagagccgtcgccgaaggaaaggcggatcagttcctcgttgggacgagcaggaatttcattcttcgagggacattcaatgatggttttcagatcgaggtgcagggacacaccgacgagctgtggggactggctacccacccatttaaagatctgctccttacatgtgcccaggaccgccaagtttgtctgtggaatagcatggagcaccggctggaatggacccggttggtggatgagccaggacactgcgctgatttccatccctccggtaccgttgtggcgatcggcacacactctggacgctggtttgtgttagatgctgagacaagagatcttgtgtccatccacactgacggcaacgagcagctgtctgtgatgcgctactccatcgatggcaccttcttggctgtgggcagccacgataattttatttatctgtacgtcgtgtctgaaaatggacggaaatactctcggtacgggcggtgtacaggtcactcctcctacatcacccacttggactggtcacctgataacaagtacattatgtctaacagcggcgattacgaaatcctgtattgggatatacccaacggatgcaaactcattcgtaaccgctccgactgcaaagatatcgactggacgacatacacgtgcgtcttgggcttccaggtcttcggggtttggccggagggatcggacgggactgacatcaacgcccttgtccggagtcataatcgcaaggtcattgctgtcgcggacgatttttgcaaggttcatctctttcagtacccatgttccaaagcaaaggctcctagtcacaagtattctgcacattccagccacgtgaccaatgtgagctttacacacaatgactcccacctcatctcaacaggggggaaagacatgtcaattatacagtggaaactcgtagagaaactttctctgccccaaaatgaaacagttgctgatacaacccttactaaagcccccgtgtcctctaccgaatcagtcattcagtctaacaccccaactccgcctccttcccagccgctaaatgagactgccgaggaagaatcccggatctcctcatcacccacactgctcgagaattctctcgagcaaaccgtggagccctctgaagatcacagcgaggaagaatccgaggaaggctcgggggatttgggcgaacccttatatgaggaaccttgcaatgagatctccaaagagcaagccaaggcaaccttgctggaagatcagcaggatcctagcccgtcttcttag

SEQ ID NO: 201218 - DNA, 2946 bp, Artificial Sequence
  derived and/or modified sequence
atggatggctttgctggcagcctggatgacagcatctctgctgccagcaccagtgatgtgcaggaccggctgagcgccctggagagccgggtgcagcagcaggaggatgagatcaccgtgctgaaggccgccctggctgatgtgctgcggcggctggccatcagcgaggaccacgtggcctctgtgaagaagtctgtgagcagcaagggccagcccagcccccgggccgtcatccccatgagctgcatcaccaatggaagtggggccaacaggaagcccagccacaccagcgctgtgtccattgctgggaaggagaccctgagcagcgctgccaagtctggaacagagaagaagaaggagaagccccagggccagcgggagaagaaggaggagagccacagcaatgaccagagcccccagatccgggccagccccagcccccagcccagcagccagcccctgcagatccaccggcagaccccagagagcaagaatgccacccccaccaagagcatcaagaggcccagccctgctgagaagagccacaacagctgggagaacagtgatgacagcaggaacaagctgagcaagatccccagcacccccaagctgatccccaaggtgaccaagacagctgacaagcacaaggatgtgatcatcaaccaggagggggagtacatcaagatgttcatgaggggccggcccatcaccatgttcatccccagtgatgtggacaactatgatgacatcagaacagagctgcccccagagaagctgaagctggagtgggcctacggctaccggggcaaggactgccgggccaacgtgtacctgctgcccaccgggaagatcgtgtacttcatcgcctctgtggtggtgctcttcaactatgaggagaggacccagaggcactacctgggccacacagactgtgtgaagtgcctggccatccacccagacaagatccgcatcgccaccggccagattgctggggtggacaaggatggccggcccctgcagccccacgtgcgggtgtgggacagcgtgaccctgagcaccctgcagatcatcggcctgggcacctttgagcggggcgtgggctgcctggacttcagcaaggctgacagcggcgtgcacctgtgcatcattgatgacagcaatgagcacatgctgactgtgtgggactggcagaagaaggccaagggagctgagatcaagaccaccaatgaggtggtgctggccgtggagttccaccccacagatgccaacaccatcatcacctgtgggaagagccacatcttcttctggacctggagcggcaacagcctgaccaggaagcagggcatctttgggaagtatgagaagcccaagtttgtgcagtgcctggccttcctgggcaatggagatgtgctgaccggggacagcggaggagtgatgctgatctggagcaagaccaccgtggagcccaccccaggcaagggccccaagggcgtgtaccagatcagcaagcagatcaaggcccatgatggctctgtgttcaccctgtgccagatgagaaatggcatgctgctgactggaggcggcaaggacaggaagatcatcctgtgggaccatgacctgaaccctgagcgggagattgaggtgcctgaccagtatggcaccatccgggctgtggccgagggcaaggctgaccagttcctggtgggcaccagcaggaacttcatcctgcggggcaccttcaatgatggcttccagatcgaggtgcagggccacacagatgagctgtggggcctggccacccaccccttcaaggacctgctgctgacctgtgcccaggaccggcaggtgtgcctgtggaacagcatggagcaccggctggagtggacccggctggtggatgagcccggccactgtgccgacttccaccccagcggcaccgtggtggccatcggcacccacagcggccgctggtttgtgctggatgctgagacccgggacctggtgtccatccacacagatggaaatgagcagctgtctgtgatgagatacagcattgatggcaccttcctggccgtgggcagccatgacaacttcatctacctgtatgtggtgtctgaaaatggaaggaagtacagccgctatggccgctgcaccggccacagcagctacatcacccacctggactggagcccagacaacaagtacatcatgagcaacagcggggactatgagatcctgtactgggacatccccaacggctgcaagctgatccggaacagaagtgactgcaaggacatcgactggaccacctacacctgtgtgctgggcttccaggtgtttggagtgtggccagagggcagtgatggaacagacatcaatgccctggtgcgcagccacaacaggaaggtgattgctgtggctgatgacttctgcaaggtgcacctgttccagtacccctgcagcaaggccaaggcccccagccacaagtacagcgcccacagcagccacgtgaccaacgtgtccttcacccacaatgacagccacctgatcagcactggaggcaaggacatgagcatcatccagtggaagctggtggagaagctgagcctgccccagaatgaaacagtggccgacaccaccctgaccaaggcccctgtgagcagcacagaatctgtcatccagagcaacacccccaccccaccacccagccagcccctgaatgaaacagctgaggaggagagccgcatcagcagcagccccaccctgctggagaacagcctggagcagacagtggagcccagcgaggaccacagcgaggaggagagcgaggagggcagcggggacctgggggagcccctgtatgaggagccctgcaatgagatcagcaaggagcaggccaaggccaccctgctggaggaccagcaggaccccagccccagcagctag

SEQ ID NO: 201219 - DNA, 2946 bp, Artificial Sequence
  derived and/or modified sequence
atggacggcttcgccggcagcctggacgacagcatcagcgccgccagcactagtgacgttcaagaccgtctttccgcactagagtccagagtacagcagcaggaggatgaaataactgtcctgaaggctgcactagctgatgtgctcaggaggctggccatttcggaagaccacgtagcatccgtgaaaaagtcggtaagttcgaagggccagccttcacccagggctgtgattcccatgagctgtataacgaatggctccggcgccaatcgcaagccctctcataccagcgctgtgtcgattgctggaaaggaaaccctcagttccgcagctaaatccggcacagaaaagaagaaggaaaaaccgcagggacaacgggaaaaaaaggaagaatcccacagcaatgaccagtcaccacagataagagcatcaccttcacctcagccctctagccagccgctgcaaattcaccgccaaactcccgagtccaagaacgctacacccactaagtctatcaaacggccatctcccgctgagaagtctcacaattcatgggagaactcagatgattcccgtaacaaactctctaagattccatccactcctaagcttatccccaaggtcacaaaaaccgccgacaagcataaagacgtgatcattaaccaggagggcgaatacatcaaaatgtttatgagaggccgtcccattactatgttcatccccagcgacgtggacaactacgatgacattcgtacagaacttccaccagaaaagctgaaactggagtgggcctacggttaccgggggaaggattgtcgtgccaatgtatatctgctgcctaccgggaagatcgtgtattttatcgctagcgtggtggtcctgttcaattacgaagagaggacacagaggcactaccttgggcacacagattgcgtgaaatgcttggccattcaccctgataaaatcagaattgccacaggccagatcgcaggagttgataaggatggacggcctcttcaaccacatgtgagggtctgggacagcgtgactctctcgactctgcagatcatcggtctgggaaccttcgaacgcggagttgggtgtctagatttctctaaggcggattccggcgtgcacctctgtatcatcgacgactctaacgagcatatgctgacggtatgggattggcagaaaaaggccaagggggcagagatcaaaacaacaaacgaggtggtcttagctgtggagtttcacccaaccgacgccaacactatcataacttgtggcaagtctcacatcttcttttggacatggagtggcaattcactcacccggaaacagggaatcttcggaaagtatgaaaaacccaagttcgtccagtgtctcgcctttttaggcaacggtgatgtgctaacgggagattccggcggtgtgatgctaatttggtcaaaaaccactgttgagcccacgccgggtaaaggacccaagggggtctatcagatctcaaaacagatcaaggcccatgatggttccgtgtttacattgtgtcagatgcgcaacggaatgctgcttaccggcggcgggaaggatagaaagatcattctgtgggatcatgatttgaatccagagagggaaatagaggtgccagatcaatatggcaccatccgagccgtcgccgaggggaaagctgatcagtttctggttggcacgagtcgtaacttcattttacgaggaacattcaatgatgggtttcagattgaagtgcagggtcacacagacgaattatggggactggccacccacccatttaaggacttactgcttacctgtgcccaggacagacaggtttgtctgtggaacagtatggaacatcggctggagtggactagacttgttgatgaaccggggcactgcgccgatttccacccctcaggcactgttgtggcgatcggcactcatagtgggcggtggttcgtgttagatgccgagaccagggacctcgtgtccatacacacagacgggaatgagcagctttctgttatgaggtactctattgacggtacatttctcgctgtgggatctcatgataatttcatctatctctatgtcgtttccgaaaatggccggaaatactcacgatacggccggtgcaccggacatagctcctacataactcatctggactggagccccgataataaatacattatgtctaacagcggagactacgagattctgtattgggacattccaaacggatgtaagctcattagaaacaggtctgattgcaaggacatagactggacaacctacacatgtgtgcttgggttccaggtctttggggtctggccagaggggagcgacggcacggatatcaacgcgctagtgcggtcccataatcgcaaggttatagccgtagctgacgatttttgcaaagttcatctatttcagtatccttgctcgaaggccaaagctccatctcataagtacagcgcccacagttcccatgtgacaaatgtctcttttactcataatgacagtcacctgatcagcacagggggcaaggatatgtctataattcagtggaagctggtggaaaaactctctcttccacagaacgagacggtcgctgataccacattaacaaaggctcctgtctcaagcactgaaagcgtgattcagtcaaataccccaacgccaccgccatcccagcccttgaacgagacagccgaggaggaaagtaggatttcgagctccccaacactattagaaaacagtctagagcagacagtagagccaagcgaggatcactctgaggaggaatctgaggaggggtccggggacctgggcgagcccctctatgaggagccttgcaatgagatttccaaggagcaggcgaaggccaccctgttggaggaccagcaggatccctctcctagttcttag

SEQ ID NO: 201220 - DNA, 2946 bp, Artificial Sequence
  derived and/or modified sequence
atggatggcttcgccggatccctagatgacagcatatcagccgctagcacctctgacgttcaggatcgcctttcggcgttagagagccgcgtccaacaacaagaggatgagattactgtactgaaggcagcactggctgatgtcctacggaggctggccatttccgaagatcacgtggccagcgtgaagaagtcagttagttccaagggccagccctccccacgtgcagtcatcccaatgtcctgtatcacaaacgggtctggtgcgaataggaagccatctcacaccagtgctgtgtcgattgcgggaaaggaaaccctttccagcgcagctaagtctggcacggagaagaaaaaagagaagccccaaggtcagagggaaaagaaggaggagtctcacagcaacgaccaatccccccaaatccgagccagcccaagcccccagcctagtagccaaccgctacaaatacaccggcagacgcctgagagtaaaaacgctaccccgacaaagtccataaagcggcctagcccagctgagaagagccacaatagctgggagaacagtgacgactctcggaataagctctccaaaattccaagcaccccaaaactcatcccaaaggtgacaaagactgctgacaagcacaaagatgtgatcatcaaccaggagggggagtatatcaagatgttcatgcggggaagaccaatcacaatgtttatcccttcggacgtggataattatgacgacatccgcaccgaactgcccccagagaaactgaagcttgaatgggcttatggataccggggaaaggactgccgcgctaatgtgtacctccttcccactgggaagatcgtgtactttattgcatcagttgttgtcctctttaattatgaggagcgcacacaacgacactacttgggccatactgattgcgtaaagtgcttggccatacacccagacaagattaggattgctaccggccagatcgcaggcgtggataaggatgggagacctttacagccccacgtccgtgtgtgggattctgtgactctctccaccctccagataattgggcttggcacgttcgagagaggcgtaggctgtctcgacttctcgaaagccgactcaggagtccatctatgtattatcgacgactcaaacgaacacatgctgacagtgtgggattggcagaagaaggccaagggagccgaaattaagactaccaatgaagtcgtcttggcagtggagttccaccccactgacgcaaatactattatcacttgtggtaagtctcatatctttttttggacctggtccggtaatagcttaacaaggaaacagggaatcttcgggaagtacgaaaaacctaagttcgtgcagtgcttggcttttctaggtaacggcgacgtcctcacaggcgacagcggcggagtaatgctcatctggtctaaaaccacagtggagcctaccccagggaaaggccctaaaggcgtttatcagatttctaaacaaatcaaggcacatgacgggtccgtgtttacgttgtgccagatgagaaacggcatgctgttaaccgggggaggcaaagatcgaaagatcatcctgtgggaccatgacctcaatcctgagagagagatcgaggtcccagatcagtatggcacaatcagggccgtagcagagggaaaagctgaccaatttctagtcggaacgtcaagaaacttcatcctgcgtggtacattcaacgacggattccagattgaggtccaagggcatactgacgaactgtgggggttagcgacacacccctttaaagatcttctgttaacctgtgcccaggaccgtcaggtgtgtctttggaatagcatggaacacagactcgagtggaccagactggtggacgagcccggacactgcgccgatttccacccctctggtaccgtcgtcgcaattgggactcactccggcagatggtttgtgctggacgccgagacccgggacttagtgagtattcacaccgatggcaacgagcagctgtctgtgatgagatattccatagacgggacatttctcgccgttggttcacatgataacttcatttatctgtatgtcgtgtccgaaaatgggaggaaatattcccgctatggacgatgtactggacatagttcttacatcacacatctggactggtcgcctgataacaagtacattatgtccaattctggcgactacgagattctgtattgggacatacctaatgggtgcaaacttattcggaatcggagcgattgcaaggacatcgactggacaacctatacgtgtgtgcttggctttcaggtctttggtgtctggccggaaggatccgatgggacagacataaatgcactagtgaggtcccacaatagaaaagtgatcgctgtggcggatgatttttgcaaagttcacctctttcagtacccttgctctaaggctaaggcccctagtcacaaatactccgcccactcttcccacgtaaccaatgtcagcttcacccacaatgacagtcacctcatttccactggcggaaaagatatgtcaatcatccagtggaaattggttgaaaaactatcactgccccaaaacgagaccgtagccgacacaacattgaccaaggcgccagtcagcagtacagagagtgttatccagagcaacacccccacccccccaccatcccaaccattgaacgagacggccgaggaggaaagccgaataagttcaagccctacgctgttagaaaattcgctggagcagactgtcgagccctcagaagaccacagcgaggaagaatcagaagagggatccggcgacctgggcgagcccctctatgaggagccttgcaacgaaattagtaaggagcaggcaaaggccacactcctcgaggaccagcaggaccctagcccttcttcatag

SEQ ID NO: 201221 - DNA, 2946 bp, Artificial Sequence
  derived and/or modified sequence
atggacggcttcgccggcagcctggacgacagcatcagcgccgccagcaccagcgacgtgcaggacagactgagcgccctggagagcagagtgcagcagcaggaggacgagatcaccgtgctgaaggccgccctggccgacgtgctgagaagactggccatcagcgaggaccacgtggccagcgtgaagaagagcgtgagcagcaagggccagcccagccccagagccgtgatccccatgagctgcatcaccaacggcagcggcgccaacagaaagcccagccacaccagcgccgtgagcatcgccggcaaggagaccctgagcagcgccgccaagagcggcaccgagaagaagaaggagaagccccagggccagagagagaagaaggaggagagccacagcaacgaccagagcccccagatcagagccagccccagcccccagcccagcagccagcccctgcagatccacagacagacccccgagagcaagaacgccacccccaccaagagcatcaagagacccagccccgccgagaagagccacaacagctgggagaacagcgacgacagcagaaacaagctgagcaagatccccagcacccccaagctgatccccaaggtgaccaagaccgccgacaagcacaaggacgtgatcatcaaccaggagggcgagtacatcaagatgttcatgagaggcagacccatcaccatgttcatccccagcgacgtggacaactacgacgacatcagaaccgagctgccccccgagaagctgaagctggagtgggcctacggctacagaggcaaggactgcagagccaacgtgtacctgctgcccaccggcaagatcgtgtacttcatcgccagcgtggtggtgctgttcaactacgaggagagaacccagagacactacctgggccacaccgactgcgtgaagtgcctggccatccaccccgacaagatcagaatcgccaccggccagatcgccggcgtggacaaggacggcagacccctgcagccccacgtgagagtgtgggacagcgtgaccctgagcaccctgcagatcatcggcctgggcaccttcgagagaggcgtgggctgcctggacttcagcaaggccgacagcggcgtgcacctgtgcatcatcgacgacagcaacgagcacatgctgaccgtgtgggactggcagaagaaggccaagggcgccgagatcaagaccaccaacgaggtggtgctggccgtggagttccaccccaccgacgccaacaccatcatcacctgcggcaagagccacatcttcttctggacctggagcggcaacagcctgaccagaaagcagggcatcttcggcaagtacgagaagcccaagttcgtgcagtgcctggccttcctgggcaacggcgacgtgctgaccggcgacagcggcggcgtgatgctgatctggagcaagaccaccgtggagcccacccccggcaagggccccaagggcgtgtaccagatcagcaagcagatcaaggcccacgacggcagcgtgttcaccctgtgccagatgagaaacggcatgctgctgaccggcggcggcaaggacagaaagatcatcctgtgggaccacgacctgaaccccgagagagagatcgaggtgcccgaccagtacggcaccatcagagccgtggccgagggcaaggccgaccagttcctggtgggcaccagcagaaacttcatcctgagaggcaccttcaacgacggcttccagatcgaggtgcagggccacaccgacgagctgtggggcctggccacccaccccttcaaggacctgctgctgacctgcgcccaggacagacaggtgtgcctgtggaacagcatggagcacagactggagtggaccagactggtggacgagcccggccactgcgccgacttccaccccagcggcaccgtggtggccatcggcacccacagcggcagatggttcgtgctggacgccgagaccagagacctggtgagcatccacaccgacggcaacgagcagctgagcgtgatgagatacagcatcgacggcaccttcctggccgtgggcagccacgacaacttcatctacctgtacgtggtgagcgagaacggcagaaagtacagcagatacggcagatgcaccggccacagcagctacatcacccacctggactggagccccgacaacaagtacatcatgagcaacagcggcgactacgagatcctgtactgggacatccccaacggctgcaagctgatcagaaacagaagcgactgcaaggacatcgactggaccacctacacctgcgtgctgggcttccaggtgttcggcgtgtggcccgagggcagcgacggcaccgacatcaacgccctggtgagaagccacaacagaaaggtgatcgccgtggccgacgacttctgcaaggtgcacctgttccagtacccctgcagcaaggccaaggcccccagccacaagtacagcgcccacagcagccacgtgaccaacgtgagcttcacccacaacgacagccacctgatcagcaccggcggcaaggacatgagcatcatccagtggaagctggtggagaagctgagcctgccccagaacgagaccgtggccgacaccaccctgaccaaggcccccgtgagcagcaccgagagcgtgatccagagcaacacccccacccccccccccagccagcccctgaacgagaccgccgaggaggagagcagaatcagcagcagccccaccctgctggagaacagcctggagcagaccgtggagcccagcgaggaccacagcgaggaggagagcgaggagggcagcggcgacctgggcgagcccctgtacgaggagccctgcaacgagatcagcaaggagcaggccaaggccaccctgctggaggaccagcaggaccccagccccagcagctag

SEQ ID NO: 201222 - DNA, 5549 bp, Artificial Sequence
  derived and/or modified sequence
ggcgcggcgctcgcggctgctgcctgggagggaggccgggcaggcggctgagcggcgcggctctcaacgtgacggggaagtggttcgggcggccgcggcttactaccccagggcgaacggacggacgacggaggcgggagccggtagccgagccgggcgacctagagaacgagcgggtcaggctcagcgtcggccactctgtcggtccgctgaatgaagtgcccgcccctctaagcccggagcccggcgctttccccgcaagatggacggtttcgccggcagtctcgatgatagtatttctgctgcaagtacttctgatgttcaagatcgcctgtcagctcttgagtcacgagttcagcaacaagaagatgaaatcactgtgctaaaggcggctttggctgatgttttgaggcgtcttgcaatctctgaagatcatgtggcctcagtgaaaaaatcagtctcaagtaaaggccaaccaagccctcgagcagttattcccatgtcctgtataaccaatggaagtggtgcaaacagaaaaccaagtcataccagtgctgtctcaattgcaggaaaagaaactctttcatctgctgctaaaagtggtacagaaaaaaagaaagaaaaaccacaaggacagagagaaaaaaaagaggaatctcattctaatgatcaaagtccacaaattcgagcatcaccttctccccagccctcttcacaacctctccaaatacacagacaaactccagaaagcaagaatgctactcccaccaaaagcataaaacgaccatcaccagctgaaaagtcacataattcttgggaaaattcagatgatagccgtaataaattgtcgaaaataccttcaacacccaaattaataccaaaagttaccaaaactgcagacaagcataaagatgtcatcatcaaccaagaaggagaatatattaaaatgtttatgcgcggtcggccaattaccatgttcattccttccgatgttgacaactatgatgacatcagaacggaactgcctcctgagaagctcaaactggagtgggcatatggttatcgaggaaaggactgtagagctaatgtttaccttcttccgaccgggaaaatagtttatttcattgcatcagtagtagtactatttaattatgaggagagaactcagcgacactacctgggccatacagactgtgtgaaatgccttgctatacatcctgacaaaattaggattgcaactggacagatagctggcgtggataaagatggaaggcctctacaaccccacgtcagagtgtgggattctgttactctatccacactgcagattattggacttggcacttttgagcgtggagtaggatgcctggatttttcaaaagcagattcaggtgttcatttatgtattattgatgactccaatgagcatatgcttactgtatgggactggcagaagaaagcaaaaggagcagaaataaagacaacaaatgaagttgttttggctgtggagtttcacccaacagatgcaaataccataattacatgcggtaaatctcatattttcttctggacctggagcggcaattcactaacaagaaaacagggaatttttgggaaatatgaaaagccaaaatttgtgcagtgtttagcattcttggggaatggagatgttcttactggagactcaggtggagtcatgcttatatggagcaaaactactgtagagcccacacctgggaaaggacctaaaggtgtatatcaaatcagcaaacaaatcaaagctcatgatggcagtgtgttcacactttgtcagatgagaaatgggatgttattaactggaggagggaaagacagaaaaataattctgtgggatcatgatctgaatcctgaaagagaaatagaggttcctgatcagtatggcacaatcagagctgtagcagaaggaaaggcagatcaatttttagtaggcacatcacgaaactttattttacgaggaacatttaatgatggcttccaaatagaagtacagggtcatacagatgagctttggggtcttgccacacatcccttcaaagatttgctcttgacatgtgctcaggacaggcaggtgtgcctgtggaactcaatggaacacaggctggaatggaccaggctggtagatgaaccaggacactgtgcagattttcatccaagtggcacagtggtggccataggaacgcactcaggcaggtggtttgttctggatgcagaaaccagagatctagtttctatccacacagacgggaatgaacagctctctgtgatgcgctactcaatagatggtaccttcctggctgtaggatctcatgacaactttatttacctctatgtagtctctgaaaatggaagaaaatatagcagatatggaaggtgcactggacattccagctacatcacacaccttgactggtccccagacaacaagtatataatgtctaactcgggagactatgaaatattgtactgggacattccaaatggctgcaaactaatcaggaatcgatcggattgtaaggacattgattggacgacatatacctgtgtgctaggatttcaagtatttggtgtctggccagaaggatctgatgggacagatatcaatgcactggtgcgatcccacaatagaaaggtgatagctgttgccgatgacttttgtaaagtccatctgtttcagtatccctgctccaaagcaaaggctcccagtcacaagtacagtgcccacagcagccatgtcaccaatgtcagttttactcacaatgacagtcacctgatatcaactggtggaaaagacatgagcatcattcagtggaaacttgtggaaaagttatctttgcctcagaatgagactgtagcggatactactctaaccaaagcccccgtctcttccactgaaagtgtcatccaatctaatactcccacaccgcctccttctcagcccttaaatgagacagctgaagaggaaagtagaataagcagttctcccacacttctggagaacagcctggaacaaactgtggagccaagtgaagaccacagcgaggaggagagtgaagagggcagcggagaccttggtgagcctctttatgaagagccatgcaacgagataagcaaggagcaggccaaagccacccttctggaggaccagcaagacccttcgccctcgtcctaacaccctggcttcagtgcaactcttttccttcagctgcatgtgattttgtgataaagttcaggtaacaggatgggcagtgatggagaatcactgttgattgagattttggtttccatgtgatttgttttcttcaatagtcttattttcagtctctcaaatacagccaacttaaagttttagtttggtgtttattgaaaattaaccaaacttaatactaggagaagactgaatcattaatgatgtctcacaaattactgtgtacctaagtggtgtgatgtaaatactggaaacaaaaacagcagttgcattgattttgaaaacaaacccccttgttatctgaacatgttttcttcaggaacaaccagaggtatcacaaacactgttactcatctactggctcagactgtactacttttttttttttttttcctgaaaaagaaaccagaaaaaaatgtactcttactgagataccctctcaccccaaatgtgtaatggaaaatttttaattaagaaaaacttcagttttgccaagtgcaatggtgttgccttctttaaaaaatgccgttttcttacactaccagtggatgtccagacatgctcttagtctactagagaggtgctgccttttctaagtcataatgaggaacagtcccttaatttcttgtgtgcaactctgttttatcctagaactaagagagcattggtttgttaaagagctttcaatgtatattaaaaccttcaatactcagaaatgatggattcctccaaggagtcctttactagcctaaacattctcaaatgtttgagattcaagtgaatggaaggaaaaccacatgcctttaaaactaaactgtaataattacctggctaatttcagctaagccttcatcataatttgttccctcagtaataggagaaatataaatacagtaagtttagattattgaattggtgcttgaaatttattggttttgttgtaattttatacagattatatgagggataagatactcatcaaattgcaaattcttttttttacagaagtgtgggtaacagtcacagcagttttttttaccaacagcatacttaacagacttgctgtgtagcagtttttttctggtggagttgctgtaagtcttgtaagtctaatgtggctatcctactcttttgggcaatgcatgtattatgcattggaaaggtattttttttaagttctgttggctagctatggttttcagtacatttcctactttaagagtaattactgacaaatatgtatttcctatatgtttatactttgattataaaaaagtattttgttttgattttttaacttgctgcattgttttgatactttctatttttttggtcaaatcatgtttagaaactttggatgagttaagaagtcttaagtatgcaggcgtttacgtgattgtgccattccaaagtgcatcagaactgtcattcccttctaatatcttctcaggagtaatacaaatcaggtatttcatcatcatttggtaatatgaaaactccagtgaactcccaaggacatttacaacatttatattcacacgctgtatggaagggtgtgggtgtgtgtgaaggggcgagtggagacactgtgtgtatctctagataagaagatatgcaccacgttgaaaatactcagtgtagatctctatgtgtataggtatctgtatatctttccttttgtttacaactgttaaaaaacctcaaaatagttctcttcaaaagaagagagattccaagcaacccatctttcttcagtatgtatgttctgtacatacttatcggagcgcgccagtaagtatcaggcatatatatctgtctgttagcaatgattattacatcatcagatcagcatgtgctatactccctgcaagaaatatactgacatgaacaggcagttcttggagaagaaagagcatttctttaagtacctggggaatacagctctcagtgatcagcagggagtttatttgaggacatcagtcacctttggggttgccatgtacaatgagatttataatcatgatactcttcggtggtagtttcaaaagacactactaatacgcaggaagcgttccagctatttaatgctggcaactactgtttaatggtcagttaaatctgtgataatggttggaagtgggtggggttatgaaattgtagatgtttttagaaaaacttgtgaatgaaaatgaatccaagtgtttcatgtgaagatgttgagccattgctatcatgcattcctgtctcatggcagaaaattttgaagattaaaaaataaaataatcaaaatgtttcctctttctaa

SEQ ID NO: 201223 - protein, 646 aa, Artificial Sequence
  derived and/or modified sequence
MEFQEVQQTQALAWQAQKAPTHIWQPLPAQEAQRQAPPLVQLEQPFQGAPPSQKAVQIQLPPQQAQASGPQAEVPTLPLQPSWQAPPAVLQAQPGPPVAAANFPLGSAKSLMTPSGECRASSIDRRGSSKERRTSSKERRAPSKDRMIFAATFCAPKAVSAARAHLPAAWKNLPATPETFAPSSSVFPATSQFQPASLNAFKGPSAASETPKSLPYALQDPFACVEALPAVPWVPQPNMNASKASQAVPTFLMATAAAPQATATTQEASKTSVEPPRRSGKATRKKKHLEAQEDSRGHTLAFHDWQGPRPWENLNLSDWEVQSPIQVSGDWEHPNTPRGLSGWEGPSTSRILSGWEGPSASWALSAWEGPSTSRALGLSESPGSSLPVVVSEVASVSPGSSATQDNSKVEAQPLSPLDERANALVQFLLVKDQAKVPVQRSEMVKVILREYKDECLDIINRANNKLECAFGYQLKEIDTKNHAYIIINKLGYHTGNLVASYLDRPKFGLLMVVLSLIFMKGNCVREDLIFNFLFKLGLDVRETNGLFGNTKKLITEVFVRQKYLEYRRIPYTEPAEYEFLWGPRAFLETSKMLVLRFLAKLHKKDPQSWPFHYLEALAECEWEDTDEDEPDTGDSAHGPTSRPPPR

SEQ ID NO: 201224 - DNA, 1941 bp, Artificial Sequence
  derived and/or modified sequence
atggagttccaggaggtgcagcagacccaggccctggcctggcaggcccagaaggcccccacccacatctggcagcccctgcccgcccaggaggcccagagacaggccccccccctggtgcagctggagcagcccttccagggcgccccccccagccagaaggccgtgcagatccagctgcccccccagcaggcccaggccagcggcccccaggccgaggtgcccaccctgcccctgcagcccagctggcaggccccccccgccgtgctgcaggcccagcccggcccccccgtggccgccgccaacttccccctgggcagcgccaagagcctgatgacccccagcggcgagtgcagagccagcagcatcgacagaagaggcagcagcaaggagagaagaaccagcagcaaggagagaagagcccccagcaaggacagaatgatcttcgccgccaccttctgcgcccccaaggccgtgagcgccgccagagcccacctgcccgccgcctggaagaacctgcccgccacccccgagaccttcgcccccagcagcagcgtgttccccgccaccagccagttccagcccgccagcctgaacgccttcaagggccccagcgccgccagcgagacccccaagagcctgccctacgccctgcaggaccccttcgcctgcgtggaggccctgcccgccgtgccctgggtgccccagcccaacatgaacgccagcaaggccagccaggccgtgcccaccttcctgatggccaccgccgccgccccccaggccaccgccaccacccaggaggccagcaagaccagcgtggagccccccagaagaagcggcaaggccaccagaaagaagaagcacctggaggcccaggaggacagcagaggccacaccctggccttccacgactggcagggccccagaccctgggagaacctgaacctgagcgactgggaggtgcagagccccatccaggtgagcggcgactgggagcaccccaacacccccagaggcctgagcggctgggagggccccagcaccagcagaatcctgagcggctgggagggccccagcgccagctgggccctgagcgcctgggagggccccagcaccagcagagccctgggcctgagcgagagccccggcagcagcctgcccgtggtggtgagcgaggtggccagcgtgagccccggcagcagcgccacccaggacaacagcaaggtggaggcccagcccctgagccccctggacgagagagccaacgccctggtgcagttcctgctggtgaaggaccaggccaaggtgcccgtgcagagaagcgagatggtgaaggtgatcctgagagagtacaaggacgagtgcctggacatcatcaacagagccaacaacaagctggagtgcgccttcggctaccagctgaaggagatcgacaccaagaaccacgcctacatcatcatcaacaagctgggctaccacaccggcaacctggtggccagctacctggacagacccaagttcggcctgctgatggtggtgctgagcctgatcttcatgaagggcaactgcgtgagagaggacctgatcttcaacttcctgttcaagctgggcctggacgtgagagagaccaacggcctgttcggcaacaccaagaagctgatcaccgaggtgttcgtgagacagaagtacctggagtacagaagaatcccctacaccgagcccgccgagtacgagttcctgtggggccccagagccttcctggagaccagcaagatgctggtgctgagattcctggccaagctgcacaagaaggacccccagagctggcccttccactacctggaggccctggccgagtgcgagtgggaggacaccgacgaggacgagcccgacaccggcgacagcgcccacggccccaccagcagacccccccccagatag

SEQ ID NO: 201225 - DNA, 1941 bp, Artificial Sequence
  derived and/or modified sequence
atggagttccaggaggtgcagcagactcaggccttggcctggcaagcccagaaggcacccactcatatctggcagccattgcctgctcaggaggcccagagacaggcccccccacttgtccagctagagcagccttttcaaggtgcccctccttcccaaaaggcggtgcagattcaattgccgcctcagcaggctcaggccagtgggcctcaggccgaggtgccaaccctccccctacaaccaagttggcaggcacctccagccgttctgcaagctcagcccggcccacccgttgccgctgccaattttccacttggcagtgctaagtccttgatgactcctagcggcgaatgccgtgccagctccatcgataggcgggggtccagcaaagaacgccggacgagcagtaaagaacgtagagcccctagtaaagatcgcatgatctttgcagcaacgttttgtgcgcccaaggcagtgagcgccgcccgtgcacacttacctgcagcctggaagaacctgcctgccacccccgagacatttgccccctctagctcagtgtttcccgctacaagccagtttcagccggcttccctaaacgcttttaaaggcccatcagccgcaagcgagacgcctaaaagcctgccttacgccctacaggaccctttcgcctgcgtggaagctcttcctgctgtcccctgggtgccccagccaaatatgaacgccagtaaagcatctcaagctgttcctacttttctgatggcaactgcagctgcaccacaggcgacagcaacaacacaggaagcttccaagacctctgtcgagcctccgcgccggtctggcaaggcgacacggaagaaaaaacacctggaagcccaagaagattcgagaggccacactcttgcctttcatgactggcaggggcctcggccctgggaaaacctcaatctctccgattgggaggtacagtcacccatccaagtctcaggagattgggaacatccaaacacacctaggggcctcagcggctgggaagggccctcaacctcacgtattctctctggctgggaggggccctctgccagttgggctttgagcgcatgggagggaccatcgacatcacgggctctgggcctcagcgaaagcccaggatctagccttcctgtagtggtgagcgaagtggcatccgtttcacccggttcttcggccacccaggataactcaaaagtagaggcccaaccccttagcccccttgacgagcgtgcaaatgcattagtgcagttcctgctggtcaaagaccaggctaaagttcccgtgcagagaagcgagatggttaaagtgatcttgcgagaatacaaggacgagtgtcttgatattatcaatcgggcaaataacaaactagagtgtgcatttgggtaccagctgaaagagatagacaccaaaaatcatgcttatattatcattaacaagctgggctatcacactggcaaccttgtggccagttatctcgaccggcccaaattcggcttgctcatggtggtgctgagcctcatctttatgaaagggaattgcgtgagagaagacttgattttcaactttctgttcaaactgggccttgatgttcgagaaacaaacggactttttggcaacaccaagaagctcattaccgaagttttcgttagacagaagtaccttgagtacaggcgcatcccttacacggagcctgctgagtacgagttcctctggggcccaagggcttttttggagacaagcaaaatgctggtccttcgtttcttggccaagctccacaaaaaagaccctcagtcctggcccttccactatttggaggccctggccgagtgtgaatgggaagatactgacgaggacgaaccagacactggggacagcgctcacggacctacttcacgtccacccccccggtag

SEQ ID NO: 201226 - DNA, 1941 bp, Artificial Sequence
  derived and/or modified sequence
atggagttccaggaggtgcagcagacccaggccctggcctggcaggcccagaaggcccccacccacatctggcagcccctgcctgcccaggaggcccagaggcaggccccacccctggtgcagctggagcagcccttccagggcgccccacccagccagaaggctgtgcagatccagctgcccccccagcaggcccaggccagcggcccccaggccgaggtgcccaccctgcccctgcagcccagctggcaggcccccccagctgtgctgcaggcccagcccggcccccctgtggccgccgccaacttccccctgggcagcgccaagagcctgatgaccccatctggagaatgtcgggccagcagcattgacagaagaggcagcagcaaggagaggaggaccagcagcaaggagcggcgggcccccagcaaggacaggatgatctttgctgccaccttctgtgcccccaaggctgtgtctgctgcccgggcccacctgcctgctgcctggaagaacctgcctgccaccccagagacctttgcccccagcagctctgtgtttcctgccaccagccagttccagcctgccagcctgaatgccttcaagggccccagcgctgccagcgagacccccaagagcctgccctatgccctgcaggacccctttgcctgtgtggaggccctgcctgctgtgccctgggtgccccagcccaacatgaatgccagcaaggccagccaggccgtgcccaccttcctgatggccacagctgctgccccccaggccacagccaccacccaggaggccagcaagacctctgtggagcccccaagaagaagtggcaaggccaccaggaagaagaagcacctggaggcccaggaggacagccggggccacaccctggccttccatgactggcagggcccccggccctgggagaacctgaacctgagtgactgggaggtgcagagccccatccaggtgtctggggactgggagcaccccaacaccccccggggcctgagcggctgggagggccccagcaccagccgcatcctgagcggctgggagggccccagcgcctcctgggccctgagcgcctgggagggccccagcaccagccgggccctgggcctgtctgagagccctggcagcagcctgcctgtggtggtgtctgaggtggcctctgtgtccccaggcagcagcgccacccaggacaacagcaaggtggaggcccagcccctgagccccctggatgagcgggccaatgccctggtgcagttcctgctggtgaaggaccaggccaaggtgcctgtgcagaggtctgagatggtgaaggtgatcctgcgggagtacaaggatgagtgcctggacatcatcaacagagccaacaacaagctggagtgtgccttcggctaccagctgaaggagattgacaccaagaaccacgcctacatcatcatcaacaagctgggctaccacacaggcaacctggtggccagctacctggaccggcccaagtttggcctgctgatggtggtgctgagcctcatcttcatgaagggcaactgtgtgcgggaggacctgatcttcaacttcctgttcaagctgggcctggatgtgcgggagaccaacggcctgtttggaaacaccaagaagctgatcacagaggtgtttgtgcggcagaagtacctggagtaccgccgcatcccctacacagagccagcagaatatgagttcctgtggggcccccgggccttcctggagaccagcaagatgctggtgctgcgcttcctggccaagctgcacaagaaggacccccagagctggcccttccactacctggaggccctggctgaatgtgagtgggaggacacagatgaagatgagccagacaccggggacagcgcccacggccccaccagccggcccccacccaggtag

SEQ ID NO: 201227 - DNA, 2485 bp, Artificial Sequence
  derived and/or modified sequence
ccccactgtctgccccgcaggctgtgcactgcccttccatcatctggcaggcccccaaaggtcagcccccggtgccacacgagattccaacgtcaatggaattccaggaggtgcagcagacacaggcgctggcctggcaggcccagaaggcccccactcacatctggcagcccctgcctgcccaggaggcccagaggcaggctccccccttggtccagctggagcagccctttcagggagccccgccctcccaaaaagccgtgcaaatccagctacccccccagcaggcccaggcatcgggtccgcaagcggaggtgcccacactgccgctccagccttcctggcaggcaccgcctgcagtcttgcaggcccagcccggacccccggtagcagcggcaaattttcccctgggctccgctaaatcattgatgactccatcaggagaatgcagggcctcttctatagaccgcaggggctcctctaaagagcgcaggacctcctcgaaggagcgcagggccccttcaaaagaccgcatgatctttgctgccaccttctgtgctcccaaggcagtgtcagctgcgcgagcacacctgccagctgcctggaaaaacctgcctgccacaccggagacctttgctccctcctcaagtgtcttcccagctacctcccagtttcagcctgcctctctgaatgcctttaaaggcccctctgctgcctcagagaccccaaagtcactgccatatgctctgcaggatccctttgcctgtgtagaggccctgcctgcagttccatgggtcccacagcccaatatgaatgcctcaaaggcatcgcaggcagtgcccaccttcctgatggctacagcagctgccccccaggcaactgccaccactcaagaggcctccaagacctccgtcgagccgccacgccgctccggcaaggccacccggaagaagaagcatctggaagcccaagaggacagccgtggccacacgctagcctttcatgactggcagggcccaaggccctgggagaatctaaatctgagtgactgggaggtccaaagccctatccaggtctcgggtgactgggagcacccaaacaccccccgtggcctgagtggttgggagggccctagcacctccaggatcctgagtggctgggaagggcccagcgcatcctgggccctgagtgcctgggagggcccgagcacctccagggccctgggtctctctgaaagcccagggagctctctgcccgtagttgtgtctgaggtcgcaagtgtctctccgggatccagtgccacccaggataattccaaggtggaggcacagcccttgtctcccttggatgagagggcaaatgcgttggtgcagttcctcttagtcaaggaccaagccaaggtgcctgtccagcgctcggagatggtgaaagtcatcctccgagagtataaagatgagtgcttagatatcatcaaccgtgccaacaataagctggagtgtgcctttggttatcaattgaaagaaattgataccaaaaaccacgcctatattatcatcaacaagctgggctaccatacagggaatttggtggcatcctatttagacaggcccaagtttggccttctgatggtggtcttgagcctcatctttatgaaaggcaactgtgtcagggaggatctgatctttaattttctgttcaagttagggttggatgtccgggagacaaacggtctctttggaaatactaagaagctcatcaccgaagtgtttgtcaggcagaagtacctagagtacaggcgaatcccttacactgagcccgcagagtatgagttcctctggggccctcgagcattcctggaaaccagcaagatgcttgtcctgaggtttttggccaagctccataagaaagatccacagagctggccattccattaccttgaagcgctcgcagagtgtgagtgggaagacacagatgaggatgaacctgacaccggtgacagtgcccacggccccaccagcaggccccctccccgctaataggtgtagcagagatctcgctcctgtgtttccctggccagaggccactgacagggtggggggacatttttgttcctggtgtttgtgttccagttccacgagtgtacgtttggattttcaacttggtttcgtatctgccaaagctttgtacattttttatgtggtgttgatttcaatcggctactgttctgttctgtattttggcatctgtgtttttaagtgagatctgtggttctctgttttgtgttttaattgttatgttttggtatcagctttgtgctggctttgtgaaatgaattgagaagctatccatctcatttctggtatagttcatgtagcattgtaatcggttgttctttgaacgttcaaatgactcatcagtaaaaactgtctacagagaagtaaatatctatatctatatatataaatatactttcagcataacagaa

SEQ ID NO: 201228 - DNA, 1941 bp, Artificial Sequence
  derived and/or modified sequence
atggagttccaggaggtgcagcagacccaggccctggcctggcaggctcagaaagcccccacccatatctggcagcccctccccgcccaagaggcacagcgtcaggctcctcctttggttcagctcgagcagccattccaaggggctccaccttctcaaaaggccgtccagattcagctcccaccacagcaagcccaagcgagtggtccgcaggcagaagtgcctacactgccgctccagccttcttggcaagccccacccgcagtgctccaggcccaacctggcccccctgtggccgccgccaactttccactcggatctgccaaatctttaatgaccccctccggggagtgccgtgcatcctccattgatcggcgggggtccagcaaagagcgtcgaacgtcaagtaaggagaggagagctccatcaaaagatcgaatgatcttcgctgctacgttctgtgccccgaaagctgtgtccgcggcaagagcacatctgcctgcggcctggaagaacttgccagccactcctgaaactttcgctccttccagctctgtgttcccagcgacctcacagtttcagcctgctagcctaaacgcctttaaaggcccttcagccgccagtgagacacccaagtccctcccttacgcccttcaggacccatttgcgtgcgtcgaagctctccccgcagtgccttgggtgccccagcctaacatgaacgccagcaaagcatcccaagcagtgcctaccttcctgatggcaacagccgctgctccacaggcaaccgccaccacgcaggaagcctccaagacctccgtagagccccctcgccgcagtgggaaagccaccagaaaaaagaagcatctggaggctcaggaggatagccgggggcatacgctagctttccatgactggcagggcccaagaccctgggaaaacctgaacctgtcagactgggaggtgcagtcgcctatacaagtgtccggcgattgggagcatcctaacaccccccgggggctctccggctgggaaggtccttctacatccagaattctgagcggctgggaagggccatcagcttcgtgggcactttccgcgtgggagggtccgagcacttcgcgcgccctgggtcttagcgagagccctggttcctccttaccagtggtggtctccgaagttgccagcgtttcccctgggtcaagcgcgacacaagataatagcaaggttgaagcacaaccgctctcccccctggacgagagggccaatgctctagtgcagtttttactggtgaaagaccaggccaaggtgcctgtgcagcgctcggagatggtcaaagtcatcctgcgcgagtacaaagatgagtgtctcgacatcattaatcgcgcaaataacaagctagaatgtgctttcgggtatcagcttaaagaaatagatacgaaaaaccacgcctacatcatcataaacaaactgggttaccacacagggaaccttgttgccagctaccttgacaggcccaaattcggacttctcatggtggtgctgagtctgatatttatgaaaggcaactgcgtgcgggaagatctgatttttaattttttgtttaagttgggactcgatgtgagagagaccaacggactgttcggcaataccaagaagttgatcacagaagtgttcgttcgtcagaaatacctagagtacagaaggatcccgtatactgagcctgcagaatatgaattcttatggggtcctcgtgccttcctggagacatcgaagatgcttgtgttaagatttcttgcaaaacttcacaaaaaagaccctcagtcctggccattccattacctggaggccctggcagagtgtgagtgggaggacaccgatgaggatgagcccgatacaggcgactcggcccacggcccaactagtcggccacctcctcgatag

SEQ ID NO: 201229 - DNA, 741 bp, Artificial Sequence
  derived and/or modified sequence
atgagccccaagccccgggccagcggcccccccgccaaggccaaggaagccggcaaaaggaaaagttcctcacagccttcaccctccgaccccaagaagaaaactaccaaagtggctaagaaggggaaggccgtgcggaggggtcggcgcgggaagaagggggccgctacaaagatggcagctgtgactgcaccagaggcagaaagcggacccgccgcacctgggccatccgaccagccgtcacaggaactaccccagcacgagctcccacccgaagagcccgtcagcgaaggcacacagcatgatcctctgagccaggagagcgagctcgaggagccactgtcccaggaatcagaggtggaagagcctctgagccaggagagccaggttgaggagcctctctcgcaggaatctgaggtggaagagcccctgtctcaggagtctcaggtcgaggagcctttgtcacaggagtcagaggtcgaggagccattaagtcaggagtccgaagttgaagagccactgtcacaagaaagccaggtcgaggagccccttagtcaagaatcagaggtggaagagcctctgagccaggaatcccaagtagaggaacctttgagtcaggagagtgaaatggaggaaccactgtctcaggaatcacaagtcgaggagcctttgtctcaggaatccgaaatggaagaacctttatcccaggaaagcgagatggaagagctgccgagtgtgtag

SEQ ID NO: 201230 - DNA, 1941 bp, Artificial Sequence
  derived and/or modified sequence
atggaattccaggaagtacagcagacacaagctctggcatggcaggctcagaaggctcccacacatatttggcagcccttgccagctcaagaagcgcagcggcaggctccacctcttgttcagctggagcaaccttttcaaggcgcaccccctagccagaaagcggtgcagattcagctgccacctcaacaggcccaagcttcaggcccacaagcggaagttcctacactgcctttgcagccaagctggcaagcgcctcctgctgtcttgcaggcgcaacccggaccgccagtggctgcggcaaacttccccctcggttccgcaaagtcacttatgacacccagcggcgaatgccgggcaagcagtatcgacagacggggaagctcgaaggagagacgaacatcgtctaaggaacgacgcgcaccctccaaggataggatgatctttgccgcaacgttctgcgcaccaaaagcagtcagtgctgccagagcgcatctccctgcggcatggaaaaacctgcccgctacccccgaaactttcgcaccttctagctctgtgtttccagccaccagtcagttccagcctgcaagcctcaacgcttttaagggcccttccgctgcgtctgagacccccaaatcgcttccttatgcactccaggatccgttcgcatgtgttgaagctcttccagcggtcccctgggtgcctcagcctaatatgaatgcttccaaagcctctcaggctgtgccaacctttcttatggcaaccgcggcagcccctcaggcaacagccacaacacaggaggcttcgaagacttcagtagaacccccacgcaggagcggcaaagcgactaggaaaaagaaacacctggaggctcaagaagatagccgcggtcacacgctggccttccatgactggcagggcccacggccatgggagaacctgaacctctccgactgggaagtgcagtcccctatacaagtcagtggagattgggagcatccaaacacaccgagaggcctgtctgggtgggagggcccatccacctctaggatcctcagcggctgggaaggtccctctgctagttgggctctgtcagcctgggaaggcccttccaccagcagagctcttggcttgtctgaaagccctgggtcttccctgcctgtggtcgtctcagaagtggcttccgtgagcccaggaagctcagcaacacaagataacagcaaggtggaagctcagcccctgtctccgctggatgagcgtgcgaatgcgttggtgcagtttctcttggttaaggaccaagcgaaggtccccgttcagcgtagcgagatggtgaaagtgattctccgagaatataaggatgagtgccttgatattatcaatagagcaaacaacaagctggaatgtgcgttcggctatcagttgaaagaaatagacacaaagaatcatgcctatatcatcatcaataagctgggttatcacaccgggaatctggtcgccagttaccttgatagacctaaattcgggctcctcatggttgtcctgagtttaatatttatgaagggaaattgcgtcagagaagacctcatatttaattttttgtttaagctggggttggacgtacgggagactaacggtctgttcggaaacactaagaagttgatcacagaggtattcgttcgccagaagtaccttgaataccggaggatcccctacacggaacccgcagaatacgaattcttatggggaccgcgtgcgtttcttgaaactagtaaaatgctggtactgcgtttcctggcaaagcttcacaagaaggacccgcaaagctggccattccactaccttgaagccctcgcagaatgtgagtgggaggataccgacgaggatgaacctgatactggcgactcggcccacggtcctactagcagacctccccctcgttag

SEQ ID NO: 201231 - DNA, 621 bp, Artificial Sequence
  derived and/or modified sequence
atgtcaccaaagcctcgcgcatctgggccaccggcaaaagccactgaggcaggaaaacggaaatcctcctctcaacccagcccctccgatcctaagaaaaagacaactaaagtggcgaagaagggaaaggctgtacgaaggggacggcgaggcaaaaaaggcgctgctacaaaaatggcagcagtgactgctcctgaagcagagtccgcccctgcagcgccaggaccatccgaccagccatcccaggagctgccccagcatgaactccccccagaggagcccgtttctgaggggacacaacatgaccctctctcccaagaggctgaattggaagagcccctgagtcaagaatccgaggtagaggagcctctgtctcaagaatctcaggtggaggaaccgctgagtcaagaatctgaagtggaggaacccctatcacaagaatctcaggtggaggaacctctgtcccaagagtccgaggttgaagagccattgagccaggagtcccaggtagaagagcctctgtctcaggagtccgaaatggaagaaccgctttctcaggagtctcaggtggaggagccaccctcccaggagtctgagatggaggagctgccttccgtttag

SEQ ID NO: 201232 - protein, 582 aa, Artificial Sequence
  derived and/or modified sequence
MMKLRHKNKKPGEGSKGHKKISWPYPQPAKQNGKKATSKVPSAPHFVHPNDHANREAELKKKWVEEMREKQQAAREQERQKRRTIESYCQDVLRRQEEFEHKEEVLQELNMFPQLDDEATRKAYYKEFRKVVEYSDVILEVLDARDPLGCRCFQMEEAVLRAQGNKKLVLVLNKIDLVPKEVVEKWLDYLRNELPTVAFKASTQHQVKNLNRCSVPVDQASESLLKSKACFGAENLMRVLGNYCRLGEVRTHIRVGVVGLPNVGKSSLINSLKRSRACSVGAVPGITKFMQEVYLDKFIRLLDAPGIVPGPNSEVGTILRNCVHVQKLADPVTPVETILQRCNLEEISNYYGVSGFQTTEHFLTAVAHRLGKKKKGGLYSQEQAAKAVLADWVSGKISFYIPPPATHTLPTHLSAEIVKEMTEVFDIEDTEQANEDTMECLATGESDELLGDTDPLEMEIKLLHSPMTKIADAIENKTTVYKIGDLTGYCTNPNRHQMGWAKRNVDHRPKSNSMVDVCSVDRRSVLQRIMETDPLQQGQALASALKNKKKMQKRADKIASKLSDSMMSALDLSGNADDGVGD

SEQ ID NO: 201233 - DNA, 1749 bp, Artificial Sequence
  derived and/or modified sequence
atgatgaagctgagacacaagaacaagaagcccggcgagggcagcaagggccacaagaagatcagctggccctacccccagcccgccaagcagaacggcaagaaggccaccagcaaggtgcccagcgccccccacttcgtgcaccccaacgaccacgccaacagagaggccgagctgaagaagaagtgggtggaggagatgagagagaagcagcaggccgccagagagcaggagagacagaagagaagaaccatcgagagctactgccaggacgtgctgagaagacaggaggagttcgagcacaaggaggaggtgctgcaggagctgaacatgttcccccagctggacgacgaggccaccagaaaggcctactacaaggagttcagaaaggtggtggagtacagcgacgtgatcctggaggtgctggacgccagagaccccctgggctgcagatgcttccagatggaggaggccgtgctgagagcccagggcaacaagaagctggtgctggtgctgaacaagatcgacctggtgcccaaggaggtggtggagaagtggctggactacctgagaaacgagctgcccaccgtggccttcaaggccagcacccagcaccaggtgaagaacctgaacagatgcagcgtgcccgtggaccaggccagcgagagcctgctgaagagcaaggcctgcttcggcgccgagaacctgatgagagtgctgggcaactactgcagactgggcgaggtgagaacccacatcagagtgggcgtggtgggcctgcccaacgtgggcaagagcagcctgatcaacagcctgaagagaagcagagcctgcagcgtgggcgccgtgcccggcatcaccaagttcatgcaggaggtgtacctggacaagttcatcagactgctggacgcccccggcatcgtgcccggccccaacagcgaggtgggcaccatcctgagaaactgcgtgcacgtgcagaagctggccgaccccgtgacccccgtggagaccatcctgcagagatgcaacctggaggagatcagcaactactacggcgtgagcggcttccagaccaccgagcacttcctgaccgccgtggcccacagactgggcaagaagaagaagggcggcctgtacagccaggagcaggccgccaaggccgtgctggccgactgggtgagcggcaagatcagcttctacatccccccccccgccacccacaccctgcccacccacctgagcgccgagatcgtgaaggagatgaccgaggtgttcgacatcgaggacaccgagcaggccaacgaggacaccatggagtgcctggccaccggcgagagcgacgagctgctgggcgacaccgaccccctggagatggagatcaagctgctgcacagccccatgaccaagatcgccgacgccatcgagaacaagaccaccgtgtacaagatcggcgacctgaccggctactgcaccaaccccaacagacaccagatgggctgggccaagagaaacgtggaccacagacccaagagcaacagcatggtggacgtgtgcagcgtggacagaagaagcgtgctgcagagaatcatggagaccgaccccctgcagcagggccaggccctggccagcgccctgaagaacaagaagaagatgcagaagagagccgacaagatcgccagcaagctgagcgacagcatgatgagcgccctggacctgagcggcaacgccgacgacggcgtgggcgactag

SEQ ID NO: 201234 - DNA, 1749 bp, Artificial Sequence
  derived and/or modified sequence
atgatgaaactgaggcacaaaaacaagaagcccggagagggcagtaagggtcataaaaaaatttcctggccttatccacaacctgcaaaacaaaatggcaagaaagccacaagtaaagtgccgtcggccccccacttcgtacacccaaatgaccatgccaaccgcgaggcagagctaaaaaaaaaatgggtcgaggaaatgcgcgaaaaacaacaggctgcgcgtgagcaggaaaggcaaaagagacgcaccatcgagagctattgtcaggacgtgctgagaagacaggaggagttcgagcacaaggaggaggtgctgcaggagctcaatatgtttcctcagctagatgatgaagccacccgcaaggcatactacaaggaatttcgaaaggttgtggagtactcagatgtgattctggaggtgttggatgctcgagaccctttgggttgcagatgtttccaaatggaggaggctgtgttgagagcccaggggaataagaaactggttctagttctgaataaaatagaccttgtaccaaaagaagtcgtggagaagtggcttgattacctgagaaacgaactccctacagtggccttcaaggcttccacccagcatcaggtgaaaaaccttaatcgctgcagtgtgcccgtggatcaggcatcagaatcactgctgaagtctaaggcttgtttcggggccgagaacttgatgagggtcctggggaactactgccggctgggggaggtcagaacacatattagggtaggggttgtcgggttgccaaatgtgggcaaatcttccttgatcaattccctcaagcggtcgcgggcctgtagcgtgggagccgtgccaggtatcacaaagtttatgcaagaggtgtacctggacaaatttattaggctgttggacgcgccggggattgtgccaggacctaactcagaagtcggcacgattctgcgcaattgcgttcatgtgcaaaagttggccgatccggtgacccctgttgagacaattttgcaacggtgtaatctggaggagatcagcaactattatggagtcagcggcttccagactaccgagcactttctgacagccgtcgcccacaggctgggaaagaaaaaaaagggcggtctgtatagtcaggagcaagctgctaaagcggtcctggccgattgggtgagcgggaagatttctttttacatccctccccctgccacccacactctaccgacccacctgtccgccgagatcgttaaggaaatgaccgaggtgtttgatatcgaagacacagagcaagccaatgaagacaccatggagtgtttggccaccggtgagtcggacgaactccttggggacaccgatccactcgaaatggagatcaagttgcttcactcccctatgaccaagattgccgacgctatcgagaacaagaccacggtgtacaaaattggtgatctgaccggatactgtacaaatcccaaccgacaccaaatgggctgggcaaagcgaaacgtggaccaccgccctaagtcaaattccatggtggacgtgtgtagcgtcgaccgtagaagtgttttgcagaggatcatggagactgacccactacagcagggccaagctctggcctcggccctcaaaaataaaaaaaaaatgcagaaacgagccgacaaaatagcatcaaaattatctgatagcatgatgtccgccctagatctgtcaggcaatgccgacgacggcgtgggggactag

SEQ ID NO: 201235 - DNA, 1749 bp, Artificial Sequence
  derived and/or modified sequence
atgatgaagctccgccacaagaataagaagcccggggaggggagtaagggtcacaagaaaatctcttggccctacccacaaccagccaagcagaatgggaaaaaagccacctctaaggtaccttctgctccccactttgttcatccaaatgatcatgccaaccgcgaagctgaactaaaaaaaaagtgggttgaagagatgcgcgagaaacagcaggccgcgcgggaacaagaacgccagaagagacgaaccatcgagtcatactgccaggatgtgctgaggcgacaggaggaattcgagcataaggaagaagtgctccaggaactaaatatgtttccacagctggatgatgaggccacccggaaggcctactataaggagtttcggaaagtcgtcgagtactccgacgtgatcctggaggttctggacgctagagaccctttgggttgtaggtgctttcagatggaggaagcagtgctgagagcacagggcaataaaaagctggtgcttgtccttaacaaaattgacctcgtgccaaaagaagtggtggagaagtggttggactatctacgcaacgagctgcctaccgtggcttttaaggcatcaacgcagcatcaggttaaaaacttaaataggtgttcggtgccagtggatcaggcctccgagtctctgttaaaatctaaggcttgttttggggctgagaacctgatgcgggtcctcggtaattactgtagactgggggaggttcggactcatatacgcgttggcgtggtcggcctccctaacgtggggaaaagtagcctgatcaattctctgaaacgcagtagggcttgtagcgtgggtgccgtccctgggattaccaagttcatgcaggaggtctacttggacaagttcattcgattgctggacgcacccggcatcgtgcctggaccaaattccgaggtgggcactattctcagaaactgcgtccatgtccagaaactcgcggaccctgttacaccggtagagacaattttgcaaagatgtaacctggaagaaatcagcaactattacggggtgtcaggctttcagacaaccgaacacttcctcactgcagtcgcccacaggcttggaaagaagaagaaggggggcttgtacagccaggagcaagcagccaaagcagtgttagccgactgggtgtcagggaaaatatctttctatatcccccctcccgcaacccatactcttcctactcacttgtctgccgaaatcgtgaaggaaatgaccgaggtgttcgatattgaggataccgaacaggcgaatgaagataccatggagtgtctcgctacaggggagagcgatgagctgctgggggacaccgatcctctcgaaatggagattaagctgctgcacagtcctatgactaagattgccgacgccatcgagaataaaaccaccgtatataaaattggagacctgaccggttactgcactaaccccaatcgacatcaaatggggtgggctaagaggaacgtggaccaccgaccaaaatctaactccatggtcgacgtttgctccgtggacagaaggagcgtccttcagaggatcatggaaacagatcccctgcagcagggtcaggctttggcttctgcactgaagaataaaaaaaagatgcagaagagggccgataagatcgcctccaagctgagcgactctatgatgagcgcactggacctgtctgggaacgccgacgatggtgtgggagattag

SEQ ID NO: 201236 - DNA, 2357 bp, Artificial Sequence
  derived and/or modified sequence
gatccggaagtcggagcctagctgcgcgagagtttctgctcgctcaaccgagttgtcgtgttgccctcgcttctcagatccccgccggaagtgaagagagcaagcagatttgaacctatctgctttcaagctggtcatcatgatgaaacttagacacaaaaataaaaagccaggtgaaggttccaagggccacaagaagataagttggccctaccctcagcctgcaaagcaaaatgggaagaaagcaacctccaaagtgccctctgcacctcattttgttcaccccaatgatcatgccaatcgagaggctgaattaaagaagaagtgggttgaggagatgagggagaagcagcaagccgcccgggagcaagaaagacaaaaacgcaggaccattgagagctactgtcaggatgtcctaagacgccaggaggagtttgagcataaggaggaagttttgcaggaattaaatatgtttcctcagctggatgacgaggccacgaggaaggcttattacaaggagttccgtaaggtggtggaatactctgatgtgattctggaagtcctggatgccagagacccattaggctgccgctgcttccaaatggaggaggctgtcctgcgagcacaaggcaacaagaagctggtcctggtcttgaacaagattgacctggtccccaaggaggttgtggagaaatggctggattaccttcggaatgagttgccaaccgtggctttcaaggccagtacccagcatcaggtcaaaaacctgaatcgttgcagtgtgccagtagatcaggcctctgagtcactgctgaaaagcaaagcctgctttggagctgaaaacctcatgagggttctggggaactattgccgccttggtgaagtgcgcacccacattcgtgtgggtgttgtgggtcttcccaatgttgggaagagcagcctgatcaatagcctgaagcgcagccgcgcatgcagcgtgggagctgttcctggaattaccaaattcatgcaggaggtctacctggacaagttcatccggctcttggatgctccaggcattgtcccagggcccaactcagaggtgggcaccatcctgcgtaactgcgtccacgtgcagaagctggcagaccctgtgaccccagtggagaccatcctgcagcgctgcaacctggaggagatttccaactattatggcgtctctgggttccagaccactgagcactttctgacggcagtggcccaccgtttggggaagaagaagaagggaggcttatatagtcaggaacaggcggccaaagctgtcctagctgactgggtgagcgggaagatcagcttctatataccaccaccagccactcacactctgcccacccatctcagtgctgagatcgttaaggaaatgaccgaggtctttgacatcgaggatactgagcaggccaatgaagacaccatggaatgcttggccaccggagaatctgatgagctgttgggtgacacggacccacttgaaatggagatcaagttgctccattctccgatgacgaaaatagcagatgccattgaaaataaaaccaccgtgtataagattggagatctcactgggtattgcaccaatccgaaccgtcatcagatggggtgggctaaacgcaatgtggaccaccgccctaagagcaacagtatggtggatgtctgctcagtggaccgccgctcagtgctgcagaggatcatggagacggaccccctgcaacagggccaggctctggcatctgccctgaaaaataagaagaagatgcagaaacgtgcagataaaatcgccagcaagctgtctgattccatgatgtctgctctcgacctctctggcaatgctgatgatggtgttggtgactaatcgactgatctcacttcccttccgctccaagcaccagttccggtggtacgggggaataccagtgaaatagtttggttctccctgaagcatctgcatattgaaagaacgctttccccactgtgtgtcttctccccctcctccagtaaaaacagtcccggctaggtgctgtggctcacgtctgtaatcccagcactttgggaggccgaggtgggcagatcacctgaggtcaggagttcgagaccagcctggccaacatggtgaaaccccgtctctactaaaaatacaaaaaaatttagccgtgcttagtggcacctataatcccagctacttgggaggctgaggcaggagaatcgcctgaacctgggagactaaggcaggagaatcgcctgaacctgggaggcagaggttgcagtgagcccagacggcaccattgcactctagcctgggcaacaacacgaaactccgtccc

SEQ ID NO: 201237 - DNA, 2135 bp, Artificial Sequence
  derived and/or modified sequence
gtttctgctcgctcaaccgagttgtcgtgttgccctcgcttctcagatccccgccggaagtgtaagtaagaaacttctctcctcttttctcacaatgtgcgctcacctagacggccgggcagttaggatcgtctattggatgtgaaaccagagatgcccgccaacctggaatagagaggaagagagcaagcagatttgaacctatctgctttcaagctggtcatcatgatgaaacttagacacaaaaataaaaagccaggtgaaggttccaagggccacaagaagataagttggccctaccctcagcctgcaaagcaaaatgggaagaaagcaacctccaaagtgccctctgcacctcattttgttcaccccaatgatcatgccaatcgagaggctgaattaaagaagaagtgggttgaggagatgagggagaagcagcaagccgcccgggagcaagaaagacaaaaacgcaggaccattgagagctactgtcaggatgtcctaagacgccaggaggagtttgagcataaggaggaagttttgcaggaattaaatatgtttcctcagctggatgacgaggccacgaggaaggcttattacaaggagttccgtaaggtggtggaatactctgatgtgattctggaagtcctggatgccagagacccattaggctgccgctgcttccaaatggaggaggctgtcctgcgagcacaaggcaacaagaagctggtcctggtcttgaacaagattgacctggtccccaaggaggttgtggagaaatggctggattaccttcggaatgagttgccaaccgtggctttcaaggccagtacccagcatcaggtcaaaaacctgaatcgttgcagtgtgccagtagatcaggcctctgagtcactgctgaaaagcaaagcctgctttggagctgaaaacctcatgagggttctggggaactattgccgccttggtgaagtgcgcacccacattcgtgtgggtgttgtgggtcttcccaatgttgggaagagcagcctgatcaatagcctgaagcgcagccgcgcatgcagcgtgggagctgttcctggaattaccaaattcatgcaggaggtctacctggacaagttcatccggctcttggatgctccaggcattgtcccagggcccaactcagaggtgggcaccatcctgcgtaactgcgtccacgtgcagaagctggcagaccctgtgaccccagtggagaccatcctgcagcgctgcaacctggaggagatttccaactattatggcgtctctgggttccagaccactgagcactttctgacggcagtggcccaccgtttggggaagaagaagaagggaggcttatatagtcaggaacaggcggccaaagctgtcctagctgactgggtgagcgggaagatcagcttctatataccaccaccagccactcacactctgcccacccatctcagtgctgagatcgttaaggaaatgaccgaggtctttgacatcgaggatactgagcaggccaatgaagacaccatggaatgcttggccaccggagaatctgatgagctgttgggtgacacggacccacttgaaatggagatcaagttgctccattctccgatgacgaaaatagcagatgccattgaaaataaaaccaccgtgtataagattggagatctcactgggtattgcaccaatccgaaccgtcatcagatggggtgggctaaacgcaatgtggaccaccgccctaagagcaacagtatggtggatgtctgctcagtggaccgccgctcagtgctgcagaggatcatggagacggaccccctgcaacagggccaggctctggcatctgccctgaaaaataagaagaagatgcagaaacgtgcagataaaatcgccagcaagctgtctgattccatgatgtctgctctcgacctctctggcaatgctgatgatggtgttggtgactaatcgactgatctcacttcccttccgctccaagcaccagttccggtggtacgggggaataccagtgaaatagtttggttctccctgaagcatctgcatattgaaagaacgctttccccactgtgtgtcttctccccctcctccagtaaaaacagtcccggcta

SEQ ID NO: 201238 - DNA, 1749 bp, Artificial Sequence
  derived and/or modified sequence
atgatgaagctgcggcacaagaacaagaagccaggagagggcagcaagggccacaagaagatctcctggccctacccccagcctgccaagcagaatggcaagaaggccaccagcaaggtgcccagcgccccccactttgtgcaccccaatgaccacgccaaccgggaggccgagctgaagaagaagtgggtggaggagatgagggagaagcagcaggccgcccgggagcaggagcggcagaagaggaggaccatcgagagctactgccaggatgtgctgcggcggcaggaggagtttgagcacaaggaggaggtgctgcaggagctgaacatgttcccccagctggatgatgaggccaccaggaaggcctactacaaggagttcaggaaggtggtggagtacagtgatgtgatcctggaggtgctggatgcccgggaccccctgggctgccgctgcttccagatggaggaggccgtgctgcgggcccagggcaacaagaagctggtgctggtgctgaacaagattgacctggtgcccaaggaggtggtggagaagtggctggactacctgagaaatgagctgcccaccgtggccttcaaggccagcacccagcaccaggtgaagaacctgaaccgctgcagcgtgcctgtggaccaggccagcgagagcctgctgaagagcaaggcctgctttggagctgagaacctgatgagggtgctgggcaactactgccgcctgggggaggtgaggacccacatccgggtgggcgtggtgggcctgcccaacgtgggcaagagcagcctcatcaacagcctgaagaggagccgggcctgcagcgtgggcgctgtgcccggcatcaccaagttcatgcaggaggtgtacctggacaagttcatccggctgctggatgcccctggcatcgtgcccggccccaacagcgaggtgggcaccatcctgaggaactgtgtgcacgtgcagaagctggccgaccctgtgacccctgtggagaccatcctgcagcgctgcaacctggaggagatcagcaactactatggagtgtctggcttccagaccacagagcacttcctgacagctgtggcccaccggctgggcaagaagaagaagggcggcctgtacagccaggagcaggccgccaaggctgtgctggccgactgggtgtctgggaagatctccttctacatccccccaccagccacccacaccctgcccacccacctgtctgctgagatcgtgaaggagatgacagaggtgtttgatattgaggacacagagcaggccaatgaagacaccatggagtgcctggccactggagagagtgatgagctgctgggggacacagaccccctggagatggagatcaagctgctgcacagccccatgaccaagattgctgatgccatcgagaacaagaccaccgtgtacaagattggagacctgaccggctactgcaccaaccccaacagacaccagatgggctgggccaagagaaatgtggaccaccggcccaagagcaacagcatggtggatgtgtgcagcgtggaccggcgctctgtgctgcagaggatcatggagacagaccccctgcagcagggccaggccctggccagcgccctgaagaacaagaagaagatgcagaagagagctgacaagatcgccagcaagctgagtgacagcatgatgtctgccctggacctgtctggaaatgctgatgatggagtgggggactag

SEQ ID NO: 201239 - DNA, 1749 bp, Artificial Sequence
  derived and/or modified sequence
atgatgaagctgcggcacaagaacaagaagcccggcgagggcagcaagggtcacaaaaagatttcctggccgtatcctcagccagcaaaacagaatggcaaaaaggcaacctctaaggttccgagtgcaccccacttcgtccaccccaatgaccacgctaatcgggaggctgaactgaagaagaagtgggtcgaagaaatgagagagaagcaacaggctgcgcgggagcaggagagacagaaacgcaggacaatcgagtcatattgtcaagacgtcttgagacgccaggaagagttcgaacacaaagaagaggtgctccaggaattgaacatgttcccacaactggacgacgaagcaactcggaaagcatactataaagaattcaggaaagttgtggagtactccgacgtgattttggaagtgcttgatgccagagatcccctaggttgtcgctgttttcagatggaagaagctgtcctgcgggcccagggcaacaaaaagctagtgttggtgctgaacaagatcgacctggtcccaaaggaagtcgttgagaaatggttagactacttgcggaacgaactccccacagttgcgtttaaagcttccactcaacatcaggtgaagaatctgaatagatgtagcgtccctgtggatcaggccagtgagtcattactgaaatcgaaggcctgtttcggagccgagaatctaatgagggtactagggaattactgccgcctgggagaagtccgcacacacattagagttggggtggtggggcttcctaatgttggaaagtcaagtctgatcaattcactcaagagaagccgggcttgtagcgtgggcgccgtgcccggaatcaccaagtttatgcaagaagtctatttggataagtttattcgtctactagacgcacccggcatcgtacccgggccgaattcagaggtgggcaccatcctccggaactgcgttcatgttcagaagctagcagaccccgtcactcctgtagaaaccatattgcagcgatgcaacctggaagaaatcagtaattattatggtgtgtctggatttcagacaactgaacactttcttacagcagtggcccatcggttgggaaaaaaaaagaaagggggcctctactctcaagagcaagcggccaaagccgtgctggccgactgggtgtcggggaaaatctccttttacatcccaccgccagcaacccacaccctgcctacccacctctccgccgaaatagtcaaggaaatgactgaggtcttcgacatcgaagacacggaacaggccaacgaggacaccatggagtgtctggcgaccggcgagagcgatgaactcctgggagacacggaccctcttgagatggagatcaaactactgcacagtcctatgactaagatagccgacgctatagaaaacaagacgacagtttataaaataggggacctgaccgggtattgcacaaacccaaaccgccaccagatgggttgggctaaaaggaatgtcgaccacaggccaaagtcgaactccatggtcgatgtgtgcagcgtggatcgccgcagtgtacttcaacggataatggagacagacccacttcagcagggacaggccctggcaagcgctctgaagaataagaaaaaaatgcaaaagagggcagacaaaattgcatctaaactctccgattctatgatgtcagctcttgacctgagcggaaatgccgatgatggagtcggggactag

SEQ ID NO: 201240 - DNA, 1749 bp, Artificial Sequence
  derived and/or modified sequence
atgatgaagctgcggcacaagaacaagaagcccggcgagggcagcaaaggacacaagaaaatctcctggccctatccacagccagccaagcagaatggaaaaaaagcgacaagcaaggtgccttccgcacctcactttgtccacccaaatgatcatgcaaacagagaggccgaacttaagaagaagtgggttgaggagatgagagaaaaacagcaggccgccagagaacaggaacgccagaagaggcggaccattgaatcctactgccaggacgttctgcgccggcaggaggagttcgagcacaaagaggaagttctgcaagagctgaatatgttcccacaactcgacgacgaagccactagaaaggcctattacaaggaattccgaaaggtagtggaatacagcgacgtgatcctcgaggtgctggacgccagggaccctctgggatgcagatgttttcaaatggaggaggccgtcctcagagcacagggaaataagaagctggtcctggtcctgaacaaaattgatcttgttcctaaagaggtcgtagagaaatggctcgactacctacgcaacgagctgcccaccgtcgcgttcaaggcctcaacacagcatcaagttaaaaaccttaatcgctgctcggttcccgtagatcaggcatccgagtcactcttaaagtctaaggcctgcttcggcgctgagaacttgatgagggttctgggcaactactgtagactaggggaagtgcggacacacataagagtcggggtggtggggctcccaaacgtgggcaagagctctctgattaactcactcaaacggagccgggcctgttcagtgggagccgtgcccggcattacaaaatttatgcaggaagtgtacctagataaatttatccggctcctggacgctcctggcatcgtacctggccctaactcagaggtgggaactatccttcgcaactgtgtgcacgtgcaaaaattggctgatccggtgacccctgtggaaacaattctgcaaagatgtaatctcgaagagatcagcaactactatggagtgagcgggtttcagaccaccgagcactttcttaccgccgtggctcacagactgggaaagaagaaaaagggaggcttgtactcccaggaacaagctgcaaaggccgtcttagcggactgggtcagcggaaaaatctcattttacattcccccaccagctacacacaccctcccaacccacctcagcgccgagattgtgaaagaaatgacagaggtcttcgatatcgaggatactgagcaggctaacgaggacactatggaatgcctcgccaccggagagagtgatgagcttctcggggacacggacccgctcgagatggagatcaaactgttacacagccctatgactaaaattgcagacgccatcgagaataagaccaccgtttataagatcggagatcttactggatattgcactaaccccaatcgtcatcaaatgggatgggccaaacgcaatgttgaccatagacccaagagcaacagcatggtggacgtgtgctcagtcgacaggcgaagcgtgcttcaacgaatcatggagactgatccactacagcagggtcaagccctggctagtgctctgaagaacaagaaaaaaatgcaaaagcgcgctgataaaatcgcatcaaagttatctgactcgatgatgtctgctttagacctgagcggaaacgccgatgatggcgtgggggactag

SEQ ID NO: 201241 - DNA, 1749 bp, Artificial Sequence
  derived and/or modified sequence
atgatgaagctgcgccacaaaaataagaaacctggcgagggctctaaaggacataaaaagattagctggccctacccacagcccgcaaaacagaatggcaagaaagccacttcaaaagtgccctctgccccacatttcgtccatcctaacgatcatgcaaaccgggaggcagaattaaaaaaaaaatgggtcgaggaaatgcgcgagaaacagcaggcagctcgtgagcaagagagacagaagcgaagaactatcgagagttactgtcaggatgttctcaggagacaggaggaatttgaacataaggaagaagttctacaagaactcaatatgttcccccagctcgacgatgaagccactaggaaagcctattataaggaattccgtaaggtcgtagagtactctgatgtaatcctcgaggtgttagatgctagagatcccctggggtgtcgctgctttcagatggaggaggccgtgctcagggcccagggaaataagaagctcgtgctggtgctaaacaagatcgacctggtccctaaagaagtcgtggaaaaatggctcgactacctgcggaatgaactcccaactgtggccttcaaggcgtctactcagcaccaggtgaaaaacctgaataggtgctctgtgcctgttgatcaggcaagcgagagcctcctcaagtctaaggcatgttttggcgcagaaaatctgatgagggtcctcggtaactactgcagactgggggaagttaggacccacattcgagtgggcgtggttgggctgcccaacgtagggaagagcagcttgatcaactcactgaagaggtcccgagcctgttccgtgggggctgtgcccggtatcactaagtttatgcaggaggtgtatctggataagtttatcaggctcctcgatgcccctggcatcgtgcctggtcctaattcagaggtgggtactattcttagaaactgtgttcatgtgcagaagctcgcagacccagttacccccgtggagactatcctgcagcgctgtaatctggaagagatctccaactattatggggtgagcgggtttcagacaacggagcactttttgacagccgtggcgcatcgactcggtaaaaaaaaaaagggtggactgtattcccaagagcaggccgcaaaggcggtgctcgctgactgggtgtccgggaagatctctttctatatccctccgccagctacacacaccttgcctacccacttgtccgctgaaattgttaaggagatgactgaggtctttgatatagaagatactgaacaggcaaacgaggacacaatggaatgcctggccactggcgaatctgatgagttactgggtgataccgatcctcttgaaatggaaatcaaacttctccactcaccaatgaccaagatagcggatgctatcgaaaacaaaactacagtctacaagatcggcgatttgaccggctattgtacaaacccaaatcgtcatcagatgggttgggcaaagcgtaatgttgatcacagaccaaaaagcaatagtatggtcgacgtgtgctccgtcgaccgacgcagcgtcctccagcgcatcatggagacagaccctttacagcagggacaggcactggcatctgcactgaaaaacaaaaagaaaatgcagaaacgggcagacaagatagcatctaaactatccgactcaatgatgtccgccttggacctgtcgggtaacgctgatgatggtgtcggcgattag

SEQ ID NO: 201242 - DNA, 1749 bp, Artificial Sequence
  derived and/or modified sequence
atgatgaagctgaggcacaaaaacaaaaagcccggagagggatccaaggggcacaagaagatttcctggccatatccccagccagccaagcagaatggtaagaaagccacaagtaaggtaccctccgcaccccattttgtgcacccgaatgaccatgccaacagggaggctgagcttaagaaaaagtgggttgaggagatgagagagaaacagcaggccgctagggagcaagagaggcaaaagagacgcaccatcgaatcctattgccaggatgttctgagacggcaggaagaatttgagcacaaggaagaagttcttcaggagctcaatatgtttccccagctagatgatgaggctacccgtaaggcatattacaaggagttccgcaaagtggtagagtatagtgacgtaatactcgaagtgctggatgcaagggacccactgggatgtaggtgcttccagatggaggaggcagtcctgagagcacaaggaaataagaagcttgtactggttctaaataagattgatctggtgcctaaggaggtggtggagaagtggctggattacctgcggaatgaattacctactgtggccttcaaggcttctacacagcatcaggtgaagaaccttaacaggtgcagcgttcctgtggatcaggcctcggaaagtctgctaaaaagcaaggcttgtttcggagctgaaaacttgatgcgtgtcttagggaactactgtcgtctaggagaggttcgcacccatattcgagtgggcgtcgtgggcctcccaaatgtgggcaagtcaagcctgatcaattccctgaagcgaagccgcgcatgcagtgtgggcgcagtacccggaatcaccaagttcatgcaagaggtttacttggacaaattcatccgacttttggacgcacctggaatcgtgcccggacccaattctgaggttggaaccattctgcgtaactgtgtgcacgtgcagaagcttgctgatccagtcactccggtcgaaactatcctgcagcgctgtaatttggaggagatttccaattattacggcgttagcggctttcagacgactgagcatttcctgaccgctgtggcccatcgattaggcaagaagaaaaagggtgggctgtattcccaggagcaggccgctaaggccgtgctggctgactgggtgtctgggaagatttccttttacatccctccacccgctacacacactctgcctacacatctgtcagcggagattgtcaaggaaatgacggaggtgtttgatatcgaagacaccgaacaggccaatgaagataccatggaatgcctggccactggagaaagcgacgagttgctaggcgatacagacccactcgagatggagattaagctccttcactctcctatgacaaagattgccgacgccatcgagaataagactaccgtgtataagatcggtgatttgacaggttattgcactaatccaaaccgtcaccagatggggtgggctaagcgtaacgtggatcaccggccaaagtccaactcaatggtcgatgtgtgttcagttgaccggaggtcagtgcttcagcggattatggagactgatccactgcaacaaggccaggcgctggccagcgcgctgaagaacaaaaaaaaaatgcagaagagggcagacaaaatcgcatccaaactgagcgacagtatgatgagtgcactggacctttccggcaatgctgacgacggggtgggcgattag

SEQ ID NO: 201243 - protein, 418 aa, Artificial Sequence
  derived and/or modified sequence
MLYLEDYLEMIEQLPMDLRDRFTEMREMDLQVQNAMDQLEQRVSEFFMNAKKNKPEWREEQMASIKKDYYKALEDADEKVQLANQIYDLVDRHLRKLDQELAKFKMELEADNAGITEILERRSLELDTPSQPVNNHHAHSHTPVEKRKYNPTSHHTTTDHIPEKKFKSEALLSTLTSDASKENTLGCRNNNSTASSNNAYNVNSSQPLGSYNIGSLSSGTGAGAITMAAAQAVQATAQMKEGRRTSSLKASYEAFKNNDFQLGKEFSMARETVGYSSSSALMTTLTQNASSSAADSRSGRKSKNNNKSSSQQSSSSSSSSSLSSCSSSSTVVQEISQQTTVVPESDSNSQVDWTYDPNEPRYCICNQVSYGEMVGCDNQDCPIEWFHYGCVGLTEAPKGKWYCPQCTAAMKRRGSRHK

SEQ ID NO: 201244 - protein, 92 aa, Artificial Sequence
  derived and/or modified sequence
MLYLEDYLEMIEQLPMDLRDRFTEMREMDLQVQNAMDQLEQRVSEFFMNAKKNKPEWREEQMASIKKDYYKALEDADEKVQLANQIYDLQHF

SEQ ID NO: 201245 - DNA, 1257 bp, Artificial Sequence
  derived and/or modified sequence
atgctgtacttggaggactatctcgaaatgattgagcaacttcctatggaccttcgggatcgttttaccgagatgagggagatggacctgcaggtgcagaatgcaatggatcagcttgagcaaagggtcagcgagttctttatgaacgccaagaagaacaaacccgaatggagggaagagcagatggcctctattaagaaggactactataaagccctggaggacgcagacgaaaaggttcagctggccaatcaaatttacgatctggttgacagacatttgcgaaaactggaccaagaactcgccaagttcaagatggaattggaagctgacaacgccggcattactgagattctggaaagacgctccctggagcttgatacgccatcacagccagtaaacaaccatcacgcgcattcgcacaccccagtggagaaaaggaaatacaatccgactagtcatcacacaacaaccgaccacatccctgagaagaaattcaagtctgaagccttactgtcaaccctgacatcagatgcgtccaaggagaacacactggggtgcagaaacaataatagtactgcatcttcgaacaatgcgtacaacgtgaacagtagtcaacctctgggaagctacaacatcggttcactgtcaagtgggacaggagcaggggccataacaatggctgctgcacaggctgtgcaggctaccgctcaaatgaaggaaggtagaagaacttcgtctttgaaggccagttacgaggcctttaaaaacaatgacttccaactaggcaaagagttcagtatggcgcgggaaacagtggggtacagcagctccagcgccttgatgaccaccctgacccagaacgcctcaagctcagcggccgattccaggagcggaaggaaatccaagaacaataataaaagttctagccagcagtcttcaagtagctcttcctcttcttcgctgagcagttgcagtagttcctccactgtagtccaagagatctcacagcagacaacagtcgtgcccgagtccgattctaactcccaggtcgattggacctacgatcccaacgagccccgttactgtatctgcaatcaggtttcttacggggagatggtcggctgcgataatcaggactgccctatcgagtggtttcactacggctgtgttggcctcacggaagcccctaagggcaagtggtactgtccgcaatgcaccgccgccatgaaaagaagaggcagcagacacaaatag

SEQ ID NO: 201246 - DNA, 3777 bp, Artificial Sequence
  derived and/or modified sequence
tttttttttttttctttttttttttttgccggagtcgagcgggtgctgctagcggaggcgccatattggaggggacaaaactccggcgacagcgagtgacacaaataaacccctggacccccttgttccctcagctctaagggccgcgatgttgtacctagaagactatctggaaatgattgagcagcttcctatggatctgcgggaccgcttcacggaaatgcgcgagatggacctgcaggtgcagaatgcaatggatcaactagaacaaagagtcagtgaattctttatgaatgcaaagaaaaataaacctgagtggagggaagagcaaatggcatccatcaaaaaagactactataaagctttggaagatgcagatgagaaggttcagttggcaaaccagatatatgacttggtagatcgacacttgagaaagctggatcaggaactggctaagtttaaaatggagctggaagctgataatgctggaattacagaaatattagagaggcgatctttggaattagacactccttcacagccagtgaacaatcaccatgctcattcacatactccagtggaaaaaaggaaatataatccaacttctcaccatacgacaacagatcatattcctgaaaagaaatttaaatctgaagctcttctatccacccttacgtcagatgcctctaaggaaaatacactaggttgtcgaaataataattccacagcctcttctaacaatgcctacaatgtgaattcctcccaacctctgggatcctataacattggctcgttatcttcaggaactggtgcaggggcaattaccatggcagctgctcaagcagttcaggctacagctcagatgaaggagggacgaagaacatcaagtttaaaagccagttatgaagcatttaagaataatgactttcagttgggaaaagaattttcaatggccagggaaacagttggctattcatcatcttcggcacttatgacaacattaacacagaatgccagttcatcagcagccgactcacggagtggtcgaaagagcaaaaacaacaacaagtcttcaagccagcagtcatcatcttcctcctcctcttcttccttatcatcgtgttcttcatcatcaactgttgtacaagaaatctctcaacaaacaactgtagtgccagaatctgattcaaatagtcaggttgattggacttacgacccaaatgaacctcgatactgcatttgtaatcaggtatcttatggtgagatggtgggatgtgataaccaagattgccctatagaatggttccattatggctgcgttggattgacagaggcaccaaaaggcaaatggtactgtccacagtgcactgctgcaatgaagagaagaggcagcagacacaaataaaggtggtccttttgtttgatgaagaaataaacttcagctgaagattttatataggactttaaaaagaagagaagagaaagaagaaacaatgcatttccaggcaaccacttaaaggatttacatagacaatcctataagatcttgaacttgaattttatgggttgtattttaataatgtaagtaaattatttatgcactcctggtgtgctatgaatattattccagttagccttggattatttcagtggccaacatatgcagacatttgtactcctcaaccattttctcaaagtaatgggcattctatgatttagacttcaaggaattccaatgatgaagattttaaggaaagtattttatattcaacaggtatattctgctgcatgtactgtactccagagctgttatgtaacactgtatataaatggttgcaaaaaaaaaaaaaagtcagtgcttctaaaaagaatttaagataatggtttttaaaatgcctttataataagctttgtttctttgtgaaactaattcagcaggctgaaggaaatggttcatgtgataatgtgggctggtatcctctagagtacctgggtacataaacagaaactcctgtaggtaaaaagtaatttgtgccattagtctttctatgtttctgcatccagatagagtgcagttcatgagggagggggcgggggactgaaggggaaagggcgttaaagtgatacatttttataccaaatgtgtttatttttttgtgcaagtaatccttaaaattgcaattgtattaggtgttaaaataaagtttttaaaaaattacttgtatttatactttacatacttaataatgaaaatttctgaattccaattaactttcaactttcataatctaaaaagaatcagagacccaggacacagaatactgtgtaatctgtgatgtctttaatgatgtttagagtttgtgatataagaatacaggaaagacatttttaatgtaaatttgaaatgccaatgtatttttttaagaacatcatctggcttttccttcagtctaaaagacatgaaagaagtgtaagtatagcagttaaaacgaaaataatggttatgggtgttttgactggaggcaatgtagccaaatagagtaaagagacccccctggtcgggagctccaaattgagctatttttgattctaccacttactgatatgacagttaattcaaattttgtatcactctgggccttactacaccagggtgatgctgactgcagaatagatcttattctaaggtgctatttaaattataaatttgcatagtggaggttttatttaaagtataatattgagtctggtcgatagaaaaatccttaacttttaagatacttaatatatcatatatattttatattgaaacttactgggtccatcagatttctgctttaattaaaccacttatgagcttcttagaacttattcagataacagtgtaaaatctatgcagtgctacccaaagggtgtgaggtagataggggatttcaaagatctcttccacctttgagatcccatgattctgagctgccacagtctgattatacaactctaccagctccctaaacaagttaggttcatttgtgagtactcatcatttcataatatcatgattatcacgatttcatgatactcaatattttgagattttataaccctttaagaagtgataaataatgtagtattcaattcgtttatcaaagtatattgcctggaaatgctcacatgtatcatttacatcctctatatattatgactattccaaactcattcattttatagaaatggtcaaaggaaaaagccttatgtacagccttatttgaagagaaagttctttgtctgagtcaggaacatcctgttatccagctgctacatcccctttcagtgtgaattccactccttaccaaatcacttagaaaacactttgacaagttttaaactcaaacactgaatattttatgaagcatgtgtaaagaaagaaaccaaaatttggtgcaggtatttagtaatgggtagaacctgttaatatctgagtcatatataatggggccaaacatggaactacctcatcaaccccccaaaaatgtggccaactattaatattctttgtgacatttacaccaaggggcatagtaagtatttttggtattataaaatacacattcaaaatctctgttgtacaaaactcatgtaacagttgggacaaaatatccaaatgtgggttcacagttcacaggtggtgaaaattgaggccttactgctatggagtgtatatcaaaatgttcatggtgacacatttgaagcaataaatggcttaattaaatgccaaaa

SEQ ID NO: 201247 - DNA, 1257 bp, Artificial Sequence
  derived and/or modified sequence
atgctgtacctggaggactacctggagatgattgagcagctgcccatggacctgcgggaccgcttcacagagatgagggagatggacctgcaggtgcagaatgccatggaccagctggagcagagggtgtctgagttcttcatgaatgccaagaagaacaagccagagtggagggaggagcagatggccagcatcaagaaggactactacaaggccctggaggatgctgatgagaaggtgcagctggccaaccagatctatgacctggtggacagacacctgaggaagctggaccaggagctggccaagttcaagatggagctggaggccgacaatgccggcatcacagagatcctggagaggaggagcctggagctggacacccccagccagcctgtgaacaaccaccacgcccacagccacacccctgtggagaagaggaagtacaaccccaccagccaccacaccaccacagaccacatccctgagaagaagttcaagtctgaggccctgctgagcaccctgaccagtgatgccagcaaggagaacaccctgggctgcaggaacaacaacagcacagccagcagcaacaatgcctacaacgtgaacagcagccagcccctgggcagctacaacatcggcagcctgagcagcggcaccggggccggggccatcaccatggctgctgcccaggccgtgcaggccacagcccagatgaaggagggccgccgcaccagcagcctgaaggccagctatgaggccttcaagaacaatgacttccagctgggcaaggagttctccatggcccgggagaccgtgggctacagcagcagcagcgccctgatgaccaccctgacccagaatgccagcagcagcgctgctgacagccgcagcggcaggaagagcaagaacaacaacaagagcagcagccagcagagcagcagcagcagcagcagcagcagcctgagcagctgcagcagcagcagcacagtggtgcaggagatcagccagcagaccaccgtggtgcctgagagtgacagcaacagccaggtggactggacctatgaccccaatgagccccgctactgcatctgcaaccaggtgtcctatggagagatggtgggctgtgacaaccaggactgccccatcgagtggttccactacggctgtgtgggcctgacagaggcccccaagggcaagtggtactgcccccagtgcacagctgccatgaagaggcggggcagccgccacaagtag

SEQ ID NO: 201248 - DNA, 1257 bp, Artificial Sequence
  derived and/or modified sequence
atgctgtacctggaggactacctggagatgatcgagcagctgcccatggatctccgcgatcgcttcaccgagatgcgagaaatggatctccaagttcaaaacgccatggaccagttggagcagcgcgtgagcgagttttttatgaatgctaaaaaaaacaagcccgagtggcgtgaggaacaaatggctagtattaaaaaggactattataaggcactcgaagatgccgatgaaaaggtccaactcgctaatcagatatacgacctggtggatcgccatctgagaaaactggaccaggaattggcgaaattcaagatggaacttgaagcagacaatgcaggcatcacggaaattctcgaaagaagaagcttagaactggacacccctagccagcccgtcaacaaccaccacgcgcattcacacactccagtggaaaaacgcaagtacaatcccacttcccaccatactactacagatcatatcccagagaagaaattcaagtctgaggcgttgctgagtactcttactagcgacgcctccaaagaaaataccctggggtgtcggaataataactcaaccgccagcagcaataacgcttataatgttaactcgtcccaaccgctggggagctataacatcggctcactcagcagcggcacgggagccggtgcaatcaccatggcagccgcacaggcagtccaggctacagctcaaatgaaggagggtaggcggaccagctccctgaaagcatcttacgaagctttcaaaaataatgatttccagctaggcaaagaattctccatggctcgtgaaacagtcgggtacagctcctccagtgcactgatgacaactctgacgcaaaatgcctcctcgtctgccgcagattccagatctggtagaaagtctaaaaacaataacaaaagttcttcgcaacaaagcagctcctcttctagcagttcctccttgagtagctgtagcagctcttccacagtcgtgcaggaaatctcccagcaaaccaccgtggtccctgagagcgattccaattcgcaggtggactggacatacgaccccaatgagccccgatactgcatttgcaaccaggtctcttatggcgaaatggtgggctgcgataaccaggattgccccatcgagtggtttcactatgggtgcgtcggtctgacagaggctcccaaaggcaagtggtactgtcctcagtgtaccgctgctatgaagaggagaggctcaaggcacaaatag

SEQ ID NO: 201249 - DNA, 1257 bp, Artificial Sequence
  derived and/or modified sequence
atgctctatcttgaagattatctcgagatgatcgagcaactgcctatggatcttcgcgacaggtttactgagatgcgagaaatggacttgcaagtccagaacgccatggatcagctggaacaaagagtcagtgagttttttatgaacgcaaagaaaaataaaccagaatggagggaagagcaaatggccagcatcaagaaggattactacaaagcgttggaagatgcggacgaaaaagtgcaactggctaaccagatttatgatctggtggaccgtcatctccgcaagctggaccaggagctggctaaatttaagatggaattggaggcggacaacgcaggcattacagagattctcgagaggcggagcctcgagctcgacacgccctcacagccagtgaacaatcatcacgctcactctcatacccccgtagagaaacgtaagtataacccaacaagccaccatacgaccacagatcacatccctgagaaaaaatttaaatctgaagcacttctgagcactctgacctcagatgcatctaaagagaatacgctcggctgccggaataacaatagtactgcgagctcaaataacgcctacaacgtaaatagctcacaaccactaggctcatacaatattggttcattgtccagcgggacaggcgctggcgcaattactatggccgcagctcaggcggtccaggccactgcccaaatgaaagaaggacgcagaacatcctccctcaaggcctcctatgaagcctttaagaacaatgacttccaactgggtaaagagttcagtatggctagagagacggtaggatatagcagctccagcgcgctcatgaccacactaacacagaatgccagcagctctgccgctgacagcaggagtgggcgaaagtccaagaacaataacaaaagcagcagccagcagtcctcgtcctcttcgtcttcatccagcctgtcaagctgttcctcatcgtccactgtggttcaggaaatatctcagcagacgactgtggtcccagagtccgattccaattcccaggtggactggacctacgacccaaacgagcccaggtactgcatttgtaatcaggtgagctatggcgagatggttggatgtgataatcaggactgccctatcgagtggtttcattacggctgcgtcggcctgaccgaagcacccaagggcaagtggtactgtcctcagtgtactgccgctatgaagcggaggggatcacgacataaatag

SEQ ID NO: 201250 - DNA, 1257 bp, Artificial Sequence
  derived and/or modified sequence
atgctgtacctggaggactacctggagatgatcgagcagctgcccatggacctgagagacagattcaccgagatgagagagatggacctgcaggtgcagaacgccatggaccagctggagcagagagtgagcgagttcttcatgaacgccaagaagaacaagcccgagtggagagaggagcagatggccagcatcaagaaggactactacaaggccctggaggacgccgacgagaaggtgcagctggccaaccagatctacgacctggtggacagacacctgagaaagctggaccaggagctggccaagttcaagatggagctggaggccgacaacgccggcatcaccgagatcctggagagaagaagcctggagctggacacccccagccagcccgtgaacaaccaccacgcccacagccacacccccgtggagaagagaaagtacaaccccaccagccaccacaccaccaccgaccacatccccgagaagaagttcaagagcgaggccctgctgagcaccctgaccagcgacgccagcaaggagaacaccctgggctgcagaaacaacaacagcaccgccagcagcaacaacgcctacaacgtgaacagcagccagcccctgggcagctacaacatcggcagcctgagcagcggcaccggcgccggcgccatcaccatggccgccgcccaggccgtgcaggccaccgcccagatgaaggagggcagaagaaccagcagcctgaaggccagctacgaggccttcaagaacaacgacttccagctgggcaaggagttcagcatggccagagagaccgtgggctacagcagcagcagcgccctgatgaccaccctgacccagaacgccagcagcagcgccgccgacagcagaagcggcagaaagagcaagaacaacaacaagagcagcagccagcagagcagcagcagcagcagcagcagcagcctgagcagctgcagcagcagcagcaccgtggtgcaggagatcagccagcagaccaccgtggtgcccgagagcgacagcaacagccaggtggactggacctacgaccccaacgagcccagatactgcatctgcaaccaggtgagctacggcgagatggtgggctgcgacaaccaggactgccccatcgagtggttccactacggctgcgtgggcctgaccgaggcccccaagggcaagtggtactgcccccagtgcaccgccgccatgaagagaagaggcagcagacacaagtag

SEQ ID NO: 201251 - protein, 685 aa, Artificial Sequence
  derived and/or modified sequence
MAAASRSASGWALLLLVALWQQRAAGSGVFQLQLQEFINERGVLASGRPCEPGCRTFFRVCLKHFQAVVSPGPCTFGTVSTPVLGTNSFAVRDDSSGGGRNPLQLPFNFTWPGTFSLIIEAWHAPGDDLRPEALPPDALISKIAIQGSLAVGQNWLLDEQTSTLTRLRYSYRVICSDNYYGDNCSRLCKKRNDHFGHYVCQPDGNLSCLPGWTGEYCQQPICLSGCHEQNGYCSKPAECLCRPGWQGRLCNECIPHNGCRHGTCSTPWQCTCDEGWGGLFCDQDLNYCTHHSPCKNGATCSNSGQRSYTCTCRPGYTGVDCELELSECDSNPCRNGGSCKDQEDGYHCLCPPGYYGLHCEHSTLSCADSPCFNGGSCRERNQGANYACECPPNFTGSNCEKKVDRCTSNPCANGGQCLNRGPSRMCRCRPGFTGTYCELHVSDCARNPCAHGGTCHDLENGLMCTCPAGFSGRRCEVRTSIDACASSPCFNRATCYTDLSTDTFVCNCPYGFVGSRCEFPVGLPPSFPWVAVSLGVGLAVLLVLLGMVAVAVRQLRLRRPDDGSREAMNNLSDFQKDNLIPAAQLKNTNQKKELEVDCGLDKSNCGKQQNHTLDYNLAPGPLGRGTMPGKFPHSDKSLGEKAPLRLHSEKPECRISAICSPRDSMYQSVCLISEERNECVIATEV

SEQ ID NO: 201252 - DNA, 2058 bp, Artificial Sequence
  derived and/or modified sequence
atggccgccgcctcgcgctcagcgagcggttgggccctactcttgttggtggcactttggcagcagagggcagccggaagtggcgtatttcagctgcagctccaggaatttatcaatgagagaggcgtacttgcctcgggtagaccctgcgagccgggctgcaggacgtttttccgagtgtgcctaaagcacttccaggctgtcgtatctccgggcccttgtactttcgggactgtgtcaactcctgttctgggcacaaatagtttcgctgtgcgcgacgattcaagcgggggcggacgtaatccgctccagctgccattcaactttacctggcccggaacatttagtctgattatcgaagcttggcacgctcctggcgacgacctccggcccgaggccctgcctcccgatgctttgataagtaagatcgcaatacaggggtcactggcggtcggccagaactggttactggacgaacagacttccaccctgaccagattgagatattcttacagagttatatgttctgacaattattatggagacaactgcagccgcctgtgcaagaagagaaatgatcacttcggacactatgtgtgtcagcctgatggcaacctcagttgtctacccgggtggacaggtgaatactgccagcagccaatttgcctctctgggtgccatgagcaaaacggctactgtagcaagccggcagagtgtctttgtagacccgggtggcaaggtcgtttatgtaatgaatgtatcccccacaacggctgtaggcatgggacatgcagcacgccttggcagtgtacttgcgacgaggggtgggggggcctgttctgtgaccaagaccttaactattgcactcatcacagcccgtgcaagaatggggctacatgttctaattccggacagcgatcttacacatgtacctgtcgccccgggtacacaggagtcgactgcgaacttgaactgtctgagtgtgacagcaatccctgccgcaatggaggctcctgcaaggatcaggaggacggatatcactgcctatgcccgcctggctattacgggctgcattgtgaacatagtacacttagctgtgccgattcaccttgtttcaacggaggctcctgtcgcgagcggaatcaaggcgccaactacgcatgtgagtgtccgcctaatttcaccggcagcaattgtgaaaagaaggtggacaggtgcacttccaacccctgcgccaatggaggacagtgtctgaaccggggcccttcacgcatgtgtaggtgtcgtccgggtttcaccggtacctactgcgaactgcacgtgtcagactgtgcgcggaacccttgcgcccacggcggaacttgtcacgacctggagaacggtctgatgtgcacctgtcctgctggcttttctggacgccggtgcgaagttcgtacatctattgatgcctgcgcctctagcccatgttttaatcgggctacatgttacaccgatctttccaccgatacatttgtctgtaattgtccttatggatttgtggggtcacgctgcgagtttcccgttggccttcccccttcttttccatgggtggccgtgtccctcggggtggggttagccgtgcttttggtgctgctgggaatggttgccgtcgctgtgcgccaactccgcctgcgcagaccggatgacggctctagagaggctatgaacaatttgagcgacttccagaaggataacttgatcccagccgctcagctgaagaatacaaaccagaaaaaagagctggaagtggattgcggtctggacaagtccaactgcgggaaacaacagaaccatacactcgattacaatctggcgcctggcccgctggggcgagggacgatgcccggtaagttccctcacagcgacaagtccctgggggaaaaagccccgctacggctgcattcggagaagccagagtgcagaatttctgcaatttgctctcctagagacagcatgtaccagtccgtctgccttattagcgaagaacggaacgagtgtgtgattgcaaccgaagtctag

SEQ ID NO: 201253 - DNA, 2058 bp, Artificial Sequence
  derived and/or modified sequence
atggctgctgccagccgcagcgccagcggctgggccctgctgctgctggtggccctgtggcagcagagagctgctggcagcggggtcttccagctgcagctgcaggagttcatcaatgaaagaggagtgctggccagcggccggccctgtgagcccggctgcaggaccttcttccgggtgtgcctgaagcacttccaggccgtggtgtccccaggcccctgcaccttcggcaccgtgtccacccctgtgctgggcaccaacagctttgctgtgagagatgacagcagcggcggcggcaggaaccccctgcagctgcccttcaacttcacctggccaggcaccttcagcctcatcatcgaggcctggcacgcccctggagatgacctgcggcctgaggccctgcccccagatgccctgatcagcaagatcgccatccagggcagcctggccgtgggccagaactggctgctggatgagcagaccagcaccctgacccggctgcgctacagctacagagtcatctgcagcgacaactactacggggacaactgcagccggctgtgcaagaagagaaatgaccacttcggccactacgtgtgccagccagatggcaacctgagctgcctgcccggctggacaggagagtactgccagcagcccatctgcctgagcggctgccacgagcagaatggctactgcagcaagccagctgagtgcctgtgcaggcctggctggcagggccgcctgtgcaatgaatgcatcccccacaacggctgcagacatggcacctgcagcaccccctggcagtgcacctgtgatgagggctggggcggcctcttctgtgaccaggacctgaactactgcacccaccacagcccctgcaagaatggagccacctgcagcaacagcggccagaggagctacacctgcacctgccggcccggctacacaggagtggactgtgagctggagctgtctgaatgtgacagcaacccctgcagaaatggaggcagctgcaaggaccaggaggatggctaccactgcctgtgccccccaggctactacggcctgcactgtgagcacagcaccctgagctgtgccgacagcccctgcttcaatggaggcagctgccgggagaggaaccagggcgccaactatgcctgtgaatgtcctcccaacttcaccggcagcaactgtgagaagaaggtggaccgctgcaccagcaacccctgtgccaatggaggccagtgcctgaacagaggccccagcaggatgtgccgctgccggcccggcttcaccggcacctactgtgagctgcacgtgtctgactgtgccaggaacccctgtgcccatggaggcacctgccacgacctggagaatggcctgatgtgcacctgcccagctggcttctctggaagaagatgtgaggtgaggaccagcattgatgcctgtgccagcagcccctgcttcaacagagccacctgctacacagacctgagcacagacacctttgtgtgcaactgcccctacggctttgtgggcagccgctgtgagttccctgtgggcctgccccccagcttcccctgggtggccgtgtccctgggcgtgggcctggccgtgctgctggtgctgctgggcatggtggccgtggccgtgcggcagctgcggctgcggcggccagatgatggcagccgggaggccatgaacaacctgagtgacttccagaaggacaacctgatcccagctgcccagctgaagaacaccaaccagaagaaggagctggaggtggactgtggcctggacaagagcaactgtgggaagcagcagaaccacaccctggactacaacctggcccctggccccctgggccggggcaccatgcctgggaagttcccccacagcgacaagagcctgggggagaaggcccccctgcggctgcacagcgagaagccagagtgccgcatcagcgccatctgcagcccccgggacagcatgtaccagagcgtgtgcctgatcagcgaggagagaaatgaatgtgtgattgccacagaggtgtag

SEQ ID NO: 201254 - DNA, 2058 bp, Artificial Sequence
  derived and/or modified sequence
atggccgccgccagccggagcgccagcggctgggccctgctgctgctggttgccctctggcagcaaagggcggctggctctggcgtattccagttgcagttacaggaattcataaatgaaaggggtgtgctagcaagtggcagaccctgcgaacccggctgccgcactttttttcgcgtgtgtttaaagcatttccaggctgttgtgtccccagggccatgtacctttggcactgtgagcacacccgtgctgggaaccaactcttttgctgtgcgggatgacagcagcggcggaggaagaaaccctctgcaactgcccttcaactttacatggcctgggacttttagcctgataatcgaggcttggcatgcacccggggacgatctgaggcccgaagccctgccccccgatgcgctgatctccaagatagctatccaagggtcactagccgttgggcagaattggctcctggatgagcagacctctacactaacccgcctgcggtacagctatcgtgtgatttgtagcgacaattattatggtgacaactgctccagactgtgcaagaaacgcaacgaccacttcggccactacgtgtgtcaacctgacgggaacctgtcctgcctacccgggtggacaggggaatactgccagcagcctatctgtctgagcggatgtcacgaacagaacgggtattgttccaagccggctgaatgtctttgtagaccagggtggcagggccggctctgtaatgaatgcatcccccacaatggctgccgtcacggcacttgttcaacgccttggcagtgtacttgcgacgaaggatggggcgggctcttttgcgatcaggacttaaactattgcacacaccatagtccgtgcaaaaacggcgcgacatgctctaacagcggacagcggtcctatacctgtacatgccgtccaggctataccggggtcgattgtgagctggagttgtcagaatgtgactctaacccatgtcgcaacggcggaagttgtaaagatcaagaagatgggtaccactgtctgtgcccccccgggtattacggactgcattgcgagcactccaccctctcctgcgccgatagcccatgtttcaatggcggatcttgccgagagcgcaatcagggcgctaactatgcctgcgaatgtccaccaaactttactggcagcaattgcgagaaaaaggtggatcgttgcacgagcaacccctgcgctaacggaggccagtgccttaaccggggacctagccggatgtgcagatgtcgccccggattcaccggcacctattgcgaactgcacgtgtccgactgcgccagaaacccttgtgcacacggaggcacctgtcacgatctggagaacggactcatgtgtacttgccctgctgggttctcaggaagaaggtgcgaagtccggactagcattgacgcttgcgcatcctcaccatgcttcaacagagctacgtgttatacggacctgtctacagatacttttgtttgtaactgtccctacgggttcgtgggcagtaggtgcgagtttcccgtgggcttgcctccgagcttcccctgggtcgcagtgtcactgggcgttgggttggccgtcttgctggttctgcttggcatggtcgctgtagccgtacgccagctgagacttcgtcgcccagacgatggatctagagaggcgatgaacaatctctctgattttcagaaggacaatctcattcctgcagctcagttgaaaaacaccaaccagaagaaggagctcgaggtagactgcggactagataagtccaactgtgggaaacaacaaaatcacaccctggactataacttggcacctggccctctgggccggggcaccatgccaggcaagttccctcactcagataagagtctgggtgaaaaagcacccctgcggttgcactcagagaagccagaatgccgcattagcgccatatgctctccacgggattccatgtaccagtccgtctgcctaatatctgaagagcgtaatgaatgcgtcattgccaccgaggtttag

SEQ ID NO: 201255 - DNA, 2058 bp, Artificial Sequence
  derived and/or modified sequence
atggcggctgctagcagaagcgctagtgggtgggctctgcttctgctagttgccctgtggcaacagcgcgcagccggaagtggcgtgtttcagttacagctgcaagagttcataaatgagcgcggtgtattggcctctggtagaccttgcgaacccggttgccgcacattcttcagagtgtgcctgaagcattttcaggctgtggtctcccccggtccatgtacattcggaactgtttcaaccccagtgctggggactaattcttttgctgtgagagacgattcctccgggggtggtcgcaatcccctgcagttaccttttaacttcacgtggcctggaactttttcgctgatcattgaggcctggcatgctcctggcgacgatcttcgtcccgaagcgttgccaccagacgcactgatcagtaaaattgcaattcagggcagcctcgctgtcggccagaactggctactggacgagcaaacaagtacactgacacgtttacggtactcatatcgtgtgatctgtagtgataactactatggagacaactgcagccgcctttgtaaaaagaggaacgatcattttggccactacgtgtgtcagcctgacggtaatttgtcttgtctacccggttggactggggagtactgtcaacagccaatctgtcttagcgggtgtcatgagcagaacggctactgcagcaagcccgctgaatgcctgtgtcgcccaggctggcagggtagactgtgcaatgaatgcatcccacataacggctgtaggcatgggacttgttcgactccatggcaatgcacatgtgacgaaggatggggcggacttttctgcgaccaggaccttaattattgcacgcatcacagcccttgtaaaaacggagctacctgtagcaatagcggtcagcggtcctatacatgcacttgcaggcctggatacacgggagtagattgtgagctggaactgtctgagtgcgactcaaacccatgccgcaacggaggctcttgtaaggatcaagaagatgggtatcattgtttgtgccctccaggctattatggcctgcattgtgagcactccacccttagttgtgccgactcaccctgcttcaatggaggctcgtgtcgcgaacgcaaccagggcgctaactacgcctgtgagtgccctcctaatttcactggttcaaattgtgaaaagaaggttgacaggtgcacatctaatccgtgtgcgaatggagggcaatgtcttaacaggggcccatctcggatgtgtcgatgccgccctggattcactggaacatactgtgaactacacgtgtccgattgcgcccgaaacccttgcgctcatggtggaacctgccatgatctggagaatggtctgatgtgcacctgtcccgctggcttcagtggacggcgatgcgaggtcaggacttctattgacgcttgcgccagctccccctgcttcaatagagctacatgttataccgacctgagtaccgatacattcgtgtgtaattgcccatatggtttcgtgggatccagatgtgaattcccagtcggactaccccctagctttccatgggtggccgttagccttggggtcggccttgcggtgctgctggtgcttctgggcatggtggcagttgccgtgcgccagctgcgcttgcgcaggcccgatgacggtagccgtgaggccatgaataacttgagtgactttcagaaggacaatcttattccagctgcccaacttaaaaatacgaaccaaaagaaagagctcgaggtcgactgtggcttagacaagtctaattgcgggaagcagcagaatcacaccttagattacaacctggccccaggcccactgggacgcggtaccatgcccggtaaatttccccactccgataagtcattgggtgaaaaagctccactgagacttcactcggaaaaaccagaatgcagaattagcgctatttgttcccccagagatagcatgtaccaaagcgtttgcctgatcagcgaggaaaggaatgaatgtgtgatagccactgaggtttag

SEQ ID NO: 201256 - DNA, 2058 bp, Artificial Sequence
  derived and/or modified sequence
atggccgccgccagcagaagcgccagcggctgggccctgctgctgctggtggccctgtggcagcagagagccgccggcagcggcgtgttccagctgcagctgcaggagttcatcaacgagagaggcgtgctggccagcggcagaccctgcgagcccggctgcagaaccttcttcagagtgtgcctgaagcacttccaggccgtggtgagccccggcccctgcaccttcggcaccgtgagcacccccgtgctgggcaccaacagcttcgccgtgagagacgacagcagcggcggcggcagaaaccccctgcagctgcccttcaacttcacctggcccggcaccttcagcctgatcatcgaggcctggcacgcccccggcgacgacctgagacccgaggccctgccccccgacgccctgatcagcaagatcgccatccagggcagcctggccgtgggccagaactggctgctggacgagcagaccagcaccctgaccagactgagatacagctacagagtgatctgcagcgacaactactacggcgacaactgcagcagactgtgcaagaagagaaacgaccacttcggccactacgtgtgccagcccgacggcaacctgagctgcctgcccggctggaccggcgagtactgccagcagcccatctgcctgagcggctgccacgagcagaacggctactgcagcaagcccgccgagtgcctgtgcagacccggctggcagggcagactgtgcaacgagtgcatcccccacaacggctgcagacacggcacctgcagcaccccctggcagtgcacctgcgacgagggctggggcggcctgttctgcgaccaggacctgaactactgcacccaccacagcccctgcaagaacggcgccacctgcagcaacagcggccagagaagctacacctgcacctgcagacccggctacaccggcgtggactgcgagctggagctgagcgagtgcgacagcaacccctgcagaaacggcggcagctgcaaggaccaggaggacggctaccactgcctgtgcccccccggctactacggcctgcactgcgagcacagcaccctgagctgcgccgacagcccctgcttcaacggcggcagctgcagagagagaaaccagggcgccaactacgcctgcgagtgcccccccaacttcaccggcagcaactgcgagaagaaggtggacagatgcaccagcaacccctgcgccaacggcggccagtgcctgaacagaggccccagcagaatgtgcagatgcagacccggcttcaccggcacctactgcgagctgcacgtgagcgactgcgccagaaacccctgcgcccacggcggcacctgccacgacctggagaacggcctgatgtgcacctgccccgccggcttcagcggcagaagatgcgaggtgagaaccagcatcgacgcctgcgccagcagcccctgcttcaacagagccacctgctacaccgacctgagcaccgacaccttcgtgtgcaactgcccctacggcttcgtgggcagcagatgcgagttccccgtgggcctgccccccagcttcccctgggtggccgtgagcctgggcgtgggcctggccgtgctgctggtgctgctgggcatggtggccgtggccgtgagacagctgagactgagaagacccgacgacggcagcagagaggccatgaacaacctgagcgacttccagaaggacaacctgatccccgccgcccagctgaagaacaccaaccagaagaaggagctggaggtggactgcggcctggacaagagcaactgcggcaagcagcagaaccacaccctggactacaacctggcccccggccccctgggcagaggcaccatgcccggcaagttcccccacagcgacaagagcctgggcgagaaggcccccctgagactgcacagcgagaagcccgagtgcagaatcagcgccatctgcagccccagagacagcatgtaccagagcgtgtgcctgatcagcgaggagagaaacgagtgcgtgatcgccaccgaggtgtag

SEQ ID NO: 201257 - DNA, 3339 bp, Artificial Sequence
  derived and/or modified sequence
gccgccttggtgcagcgtacaccggcactagcccgcttgcagccccaggattagacagaagacgcgtcctcggcgcggtcgccgcccagccgtagtcacctggattacctacagcggcagctgcagcggagccagcgagaaggccaaaggggagcagcgtcccgagaggagcgcctcttttcagggaccccgccggctggcggacgcgcgggaaagcggcgtcgcgaacagagccagattgagggcccgcgggtggagagagcgacgcccgaggggatggcggcagcgtcccggagcgcctctggctgggcgctactgctgctggtggcactttggcagcagcgcgcggccggctccggcgtcttccagctgcagctgcaggagttcatcaacgagcgcggcgtactggccagtgggcggccttgcgagcccggctgccggactttcttccgcgtctgccttaagcacttccaggcggtcgtctcgcccggaccctgcaccttcgggaccgtctccacgccggtattgggcaccaactccttcgctgtccgggacgacagtagcggcggggggcgcaaccctctccaactgcccttcaatttcacctggccgggtaccttctcgctcatcatcgaagcttggcacgcgccaggagacgacctgcggccagaggccttgccaccagatgcactcatcagcaagatcgccatccagggctccctagctgtgggtcagaactggttattggatgagcaaaccagcaccctcacaaggctgcgctactcttaccgggtcatctgcagtgacaactactatggagacaactgctcccgcctgtgcaagaagcgcaatgaccacttcggccactatgtgtgccagccagatggcaacttgtcctgcctgcccggttggactggggaatattgccaacagcctatctgtctttcgggctgtcatgaacagaatggctactgcagcaagccagcagagtgcctctgccgcccaggctggcagggccggctgtgtaacgaatgcatcccccacaatggctgtcgccacggcacctgcagcactccctggcaatgtacttgtgatgagggctggggaggcctgttttgtgaccaagatctcaactactgcacccaccactccccatgcaagaatggggcaacgtgctccaacagtgggcagcgaagctacacctgcacctgtcgcccaggctacactggtgtggactgtgagctggagctcagcgagtgtgacagcaacccctgtcgcaatggaggcagctgtaaggaccaggaggatggctaccactgcctgtgtcctccgggctactatggcctgcattgtgaacacagcaccttgagctgcgccgactccccctgcttcaatgggggctcctgccgggagcgcaaccagggggccaactatgcttgtgaatgtccccccaacttcaccggctccaactgcgagaagaaagtggacaggtgcaccagcaacccctgtgccaacgggggacagtgcctgaaccgaggtccaagccgcatgtgccgctgccgtcctggattcacgggcacctactgtgaactccacgtcagcgactgtgcccgtaacccttgcgcccacggtggcacttgccatgacctggagaatgggctcatgtgcacctgccctgccggcttctctggccgacgctgtgaggtgcggacatccatcgatgcctgtgcctcgagtccctgcttcaacagggccacctgctacaccgacctctccacagacacctttgtgtgcaactgcccttatggctttgtgggcagccgctgcgagttccccgtgggcttgccgcccagcttcccctgggtggccgtctcgctgggtgtggggctggcagtgctgctggtactgctgggcatggtggcagtggctgtgcggcagctgcggcttcgacggccggacgacggcagcagggaagccatgaacaacttgtcggacttccagaaggacaacctgattcctgccgcccagcttaaaaacacaaaccagaagaaggagctggaagtggactgtggcctggacaagtccaactgtggcaaacagcaaaaccacacattggactataatctggccccagggcccctggggcgggggaccatgccaggaaagtttccccacagtgacaagagcttaggagagaaggcgccactgcggttacacagtgaaaagccagagtgtcggatatcagcgatatgctcccccagggactccatgtaccagtctgtgtgtttgatatcagaggagaggaatgaatgtgtcattgccacggaggtataaggcaggagcctacctggacatccctgctcagccccgcggctggaccttccttctgcattgtttacattgcatcctggatgggacgtttttcatatgcaacgtgctgctctcaggaggaggagggaatggcaggaaccggacagactgtgaacttgccaagagatgcaatacccttccacacctttgggtgtctgtctggcatcagattggcagctgcaccaaccagaggaacagaagagaagagagatgccactgggcactgccctgccagtagtggccttcagggggctccttccggggctccggcctgttttccagagagagtggcagtagccccatggggcccggagctgctgtggcctccactggcatccgtgtttccaaaagtgcctttggcccaggctccacggcgacagttgggcccaaatcagaaaggagagagggggccaatgagggcagggcctcctgtgggctggaaaaccactgggtgcgtctcttgctggggtttgccctggaggtgaggtgagtgctcgagggaggggagtgctttctgccccatgcctccaactactgtatgcaggcctggctctctggtctaggccctttgggcaagaatgtccgtctacccggcttccaccaccctctggccctgggcttctgtaagcagacaggcagagggcctgcccctcccaccagccaagggtgccaggcctaactggggcactcagggcagtgtgttggaaattccactgagggggaaatcaggtgctgcggccgcctgggccctttcctccctcaagcccatctccacaacctcgagcctgggctctggtccactactgccccagaccaccctcaaagctggtcttcagaaatcaataatatgagtttttattttgtttttttttttttttttgtagtttattttggagtctagtatttcaataatttaagaatcagaagcactgacctttctacattttataacattattttgtatataat

SEQ ID NO: 201258 - protein, 530 aa, Artificial Sequence
  derived and/or modified sequence
MARAGWTSPVPLCVCLLLTCGFAEAGKLLVVPMDGSHWFTMQSVVEKLILRGHEVVVVMPEVSWQLERSLNCTVKTYSTSYTLEDQNREFMVFAHAQWKAQAQSIFSLLMSSSSGFLDLFFSHCRSLFNDRKLVEYLKESSFDAVFLDPFDTCGLIVAKYFSLPSVVFTRGIFCHHLEEGAQCPAPLSYVPNDLLGFSDAMTFKERVWNHIVHLEDHLFCQYLFRNALEIASEILQTPVTAYDLYSHTSIWLLRTDFVLDYPKPVMPNMIFIGGINCHQGKPLPMEFEAYINASGEHGIVVFSLGSMVSEIPEKKAMAIADALGKIPQTVLWRYTGTRPSNLANNTILVKWLPQNDLLGHPMTRAFITHAGSHGVYESICNGVPMVMMPLFGDQMDNAKRMETKGAGVTLNVLEMTSEDLENALKAVINDKSYKENIMRLSSLHKDRPVEPLDLAVFWVEFVMRHKGAPHLRPAAHDLTWYQYHSLDVIGFLLAVVLTVAFITFKCCAYGYRKCLGKKGRVKKAHKSKTH

SEQ ID NO: 201259 - DNA, 1593 bp, Artificial Sequence
  derived and/or modified sequence
atggccagagccggctggaccagccccgtgcccctgtgcgtgtgcctgctgctgacctgcggcttcgccgaggccggcaagctgctggtggtgcccatggacggcagccactggttcaccatgcagagcgtggtggagaagctgatcctgagaggccacgaggtggtggtggtgatgcccgaggtgagctggcagctggagagaagcctgaactgcaccgtgaagacctacagcaccagctacaccctggaggaccagaacagagagttcatggtgttcgcccacgcccagtggaaggcccaggcccagagcatcttcagcctgctgatgagcagcagcagcggcttcctggacctgttcttcagccactgcagaagcctgttcaacgacagaaagctggtggagtacctgaaggagagcagcttcgacgccgtgttcctggaccccttcgacacctgcggcctgatcgtggccaagtacttcagcctgcccagcgtggtgttcaccagaggcatcttctgccaccacctggaggagggcgcccagtgccccgcccccctgagctacgtgcccaacgacctgctgggcttcagcgacgccatgaccttcaaggagagagtgtggaaccacatcgtgcacctggaggaccacctgttctgccagtacctgttcagaaacgccctggagatcgccagcgagatcctgcagacccccgtgaccgcctacgacctgtacagccacaccagcatctggctgctgagaaccgacttcgtgctggactaccccaagcccgtgatgcccaacatgatcttcatcggcggcatcaactgccaccagggcaagcccctgcccatggagttcgaggcctacatcaacgccagcggcgagcacggcatcgtggtgttcagcctgggcagcatggtgagcgagatccccgagaagaaggccatggccatcgccgacgccctgggcaagatcccccagaccgtgctgtggagatacaccggcaccagacccagcaacctggccaacaacaccatcctggtgaagtggctgccccagaacgacctgctgggccaccccatgaccagagccttcatcacccacgccggcagccacggcgtgtacgagagcatctgcaacggcgtgcccatggtgatgatgcccctgttcggcgaccagatggacaacgccaagagaatggagaccaagggcgccggcgtgaccctgaacgtgctggagatgaccagcgaggacctggagaacgccctgaaggccgtgatcaacgacaagagctacaaggagaacatcatgagactgagcagcctgcacaaggacagacccgtggagcccctggacctggccgtgttctgggtggagttcgtgatgagacacaagggcgccccccacctgagacccgccgcccacgacctgacctggtaccagtaccacagcctggacgtgatcggcttcctgctggccgtggtgctgaccgtggccttcatcaccttcaagtgctgcgcctacggctacagaaagtgcctgggcaagaagggcagagtgaagaaggcccacaagagcaagacccactag

SEQ ID NO: 201260 - DNA, 1593 bp, Artificial Sequence
  derived and/or modified sequence
atggcacgagccggttggacatcacccgtccctctgtgcgtgtgccttcttctcacctgcgggtttgccgaggccggaaagctgcttgtggtgccaatggatggatcccactggttcacaatgcagtcagtggttgagaaactgattctccggggtcatgaggtcgtggtggtgatgccggaagtgtcctggcaattggaacggtcactgaattgcaccgtgaagacttatagtacatcttatacccttgaggaccagaatagggagtttatggtgtttgcacatgcacagtggaaggcccaggcccagtccatcttctcgctgttgatgtcttcaagctcaggcttcctggacttgttcttttcccattgccgctccttgttcaatgacagaaaactggtggagtacttgaaagagagctccttcgacgctgtgtttttggatccatttgacacctgcggccttatcgtggccaagtatttcagcctcccttcagttgtctttacacgggggattttctgtcatcacctggaggaaggtgcccaatgtcccgcccccctgtcatacgtgcccaatgaccttctgggattctctgatgccatgaccttcaaggaacgtgtgtggaatcacattgtgcacctggaggaccacttattttgtcaatacctctttagaaacgctttggaaatagcatccgagatcttgcagactccagtcaccgcatatgacctgtattcccacacttctatatggctcctgagaacagatttcgttttggactacccaaaacctgtcatgccaaacatgatcttcattggaggcataaactgtcatcagggcaagcctctacctatggagtttgaggcatacatcaatgccagcggcgagcacggaattgtggtgtttagtttaggtagcatggtctccgaaattccagaaaagaaagctatggccatcgccgatgccctcggcaagatcccacagacagtgttgtggcggtatactggtaccagacctagcaacctggccaataatactattcttgtgaagtggttaccgcagaacgacctactggggcatccaatgactagagccttcatcactcacgccggtagtcatggcgtctacgaaagtatatgtaatggagtacccatggtgatgatgcccctgtttggggaccagatggacaatgccaagcgcatggagactaagggggctggcgtcacactgaatgttctggagatgacctccgaggacttggagaatgcactcaaggccgtaatcaatgacaaaagttacaaggaaaacatcatgagactgtcaagtctccataaggatcgaccggtagagcccctggacttagccgtgttctgggtagaatttgtgatgcgacataaaggggcaccacaccttagacccgcagcgcatgacctgacttggtaccaataccattccttagacgtgatcggttttttgctggcggtcgttctcaccgtcgcatttataacctttaaatgctgtgcttatggttaccgcaagtgcttgggaaagaagggccgagtaaaaaaggcacacaaatctaagacccattag

SEQ ID NO: 201261 - DNA, 1593 bp, Artificial Sequence
  derived and/or modified sequence
atggcccgggccggctggaccagccctgtgcccctgtgtgtgtgcctgctgctgacctgtggctttgctgaggccggcaagctgctggtggtgcccatggatggcagccactggttcaccatgcagagcgtggtggagaagctgatcctgcggggccacgaggtggtggtggtgatgcctgaggtgtcctggcagctggagaggagcctgaactgcaccgtgaagacctacagcaccagctacaccctggaggaccagaaccgggagttcatggtgtttgcccacgcccagtggaaggcccaggcccagagcatcttcagcctgctgatgagcagcagcagcggcttcctggacctcttcttcagccactgccgcagcctcttcaatgacaggaagctggtggagtacctgaaggagagcagctttgatgctgtgttcctggacccctttgacacctgtggcctcatcgtggccaagtacttcagcctgcccagcgtggtgttcacccggggcatcttctgccaccacctggaggagggcgcccagtgcccagcccccctgtcctatgtgcccaatgacctgctgggcttcagtgatgccatgaccttcaaggagcgggtgtggaaccacatcgtgcacctggaggaccacctgttctgccagtacctgttcagaaatgccctggagatcgccagcgagatcctgcagacccctgtgacagcctatgacctgtacagccacaccagcatctggctgctgaggacagactttgtgctggactaccccaagcctgtgatgcccaacatgatcttcatcggcggcatcaactgccaccagggcaagcccctgcccatggagtttgaggcctacatcaatgccagcggggagcacggcatcgtggtgttcagcctgggctccatggtgtctgagatccctgagaagaaggccatggccatcgcagatgccctgggcaagatcccccagacagtgctgtggagatacacaggcacccggcccagcaacctggccaacaacaccatcctggtgaagtggctgccccagaatgacctgctgggccaccccatgacccgggccttcatcacccacgccggcagccatggagtgtatgagagcatctgcaatggagtgcccatggtgatgatgcccctgtttggagaccagatggacaatgccaagaggatggagaccaagggggccggcgtgaccctgaatgtgctggagatgaccagcgaggacctggagaatgccctgaaggccgtcatcaatgacaagagctacaaggagaacatcatgaggctgagcagcctgcacaaggacaggcctgtggagcccctggacctggccgtgttctgggtggagtttgtgatgaggcacaagggggccccccacctgcggcctgctgcccatgacctgacctggtaccagtaccacagcctggatgtgattggcttcctgctggccgtggtgctgactgtggccttcatcaccttcaagtgctgtgcctacggctacaggaagtgcctgggcaagaagggccgggtgaagaaggcccacaagagcaagacccactag

SEQ ID NO: 201262 - DNA, 1593 bp, Artificial Sequence
  derived and/or modified sequence
atggcccgggccggctggaccagccccgtgcccctgtgcgtgtgcctcctccttacctgcggctttgcggaggccggaaagctcctggttgtaccaatggacggatcccactggttcacaatgcagtccgttgtcgaaaagcttattctgcggggacatgaagtggtagtggtgatgccagaagtgagttggcagttggagcgaagccttaactgtaccgtgaaaacatatagcacatcttatactctggaagatcagaatcgcgaatttatggtgttcgcacacgcccagtggaaagcacaggcccagtccatattttccctgctgatgtcgagtagcagcgggttcttggacctgtttttctcccattgccgcagcctctttaacgaccgcaagttggtcgaatatttaaaagagtccagcttcgacgccgtgtttctcgacccatttgatacctgcggtctgatcgtggccaagtacttttccctgccctccgttgtctttactagaggtattttctgccaccacctagaagagggcgctcaatgtccggcgcccctatcttatgtgcccaatgatttgttgggattttccgacgccatgaccttcaaagaaagggtgtggaatcatattgtgcatttagaggatcatctgttctgccagtacctgttccgtaacgcattagagattgctagcgagattttacaaacgccggttaccgcctatgacctttacagccatacaagcatatggcttctccgaactgattttgtgctggattaccccaagccggtgatgcccaacatgatttttatcggcggaattaactgccatcagggaaaaccattgccaatggaattcgaggcatatattaacgcgagcggggaacatggtatcgttgtcttctctctcgggtcaatggtttctgaaatccctgaaaaaaaggcaatggccattgctgacgctttagggaagatcccccaaactgtcctatggagatacacggggacacgcccctccaatctcgcaaataacaccattcttgtgaaatggctgccgcaaaacgatctgctgggacatcctatgaccagggccttcatcacgcacgcagggtcccatggggtgtacgaatcgatctgcaacggtgtgcccatggtgatgatgcctctgttcggggaccagatggataacgcgaagaggatggaaactaagggagctggcgttaccctaaacgtgttagaaatgacaagcgaggacctcgaaaacgctttgaaggccgtcattaatgacaagtcctataaggagaatatcatgcggctgtcttctctccacaaagataggccggtagaacctttggatctggctgtattttgggtagaattcgtcatgcggcacaaaggggcaccacacctccgccctgcagcccatgacctcacttggtaccagtatcattccctcgatgtgatcggtttcttgttagccgtggttttaaccgtagcattcattacattcaagtgttgcgcgtatggttatcgtaagtgtttgggtaaaaagggtcgggtcaagaaggcgcataaaagcaagacccactag

SEQ ID NO: 201263 - DNA, 1593 bp, Artificial Sequence
  derived and/or modified sequence
atggcaagggctggctggaccagccccgtcccattgtgcgtgtgtctcctgttaacatgcggatttgccgaggcaggcaagctgttggtggtgcctatggatgggtcacattggtttaccatgcagtcagtggtggagaaactgattctgcgcggtcatgaggtggtcgtcgtcatgcctgaggtaagctggcaattggagcgtagtctaaattgtacagttaagacgtactcaacctcctatacactagaagaccagaacagagagttcatggtgttcgctcatgcacagtggaaggcacaggctcagtccatattctccttgttaatgtcatcatcctctgggttcttggacctcttttttagtcactgccgcagcctcttcaacgaccgtaagctggtcgaatatctgaaggagtccagtttcgatgctgtgttcctggaccctttcgacacttgtggtctgatcgtggcgaaatatttttcactaccatctgtcgtgttcaccagagggattttttgccaccacctcgaggaaggagcacagtgtcctgctcctctgtcttatgtgccgaatgatctgctgggcttcagcgacgctatgacattcaaagaaagggtttggaaccatatcgtacatttggaggatcatttgttctgccagtacctgtttaggaacgctctggaaatcgcaagcgaaattcttcagactccagttaccgcttatgatctctacagccacactagcatctggctactgcgtacggacttcgtgcttgactaccctaaaccagtcatgcccaatatgatctttatcgggggaattaactgccaccaggggaaaccactcccaatggagtttgaagcttacattaatgctagcggcgaacatggcatcgtggtcttttcgctgggctccatggtctcagagattccagagaagaaagccatggccatcgctgacgccctggggaagatcccccaaactgtcctctggcgatacactggcacacgacccagtaatttggctaataatactatactggtgaaatggctgccgcagaacgatctgctgggacaccccatgaccagggcctttatcactcacgcaggttctcacggtgtctacgaaagtatctgcaacggagtgcctatggtcatgatgcctctgtttggcgaccagatggacaatgctaagcgaatggagacaaaaggggcaggagtgacactgaatgtgctggagatgactagcgaagaccttgagaatgctctcaaagctgtcatcaatgataaatcctacaaggagaacataatgagacttagcagtctgcacaaggatcgccctgtggagcccctggatctcgccgtcttttgggtcgagtttgtgatgaggcataagggagctccacacctacgtcctgctgcacacgaccttacttggtaccaataccattctctggatgtgatcggcttcctcttggccgtggtcctgaccgtcgcttttattacattcaagtgttgtgcttatggatatcgcaaatgtcttggaaaaaagggcagagtaaaaaaagcccacaagtccaaaacacactag

SEQ ID NO: 201264 - DNA, 2408 bp, Artificial Sequence
  derived and/or modified sequence
gtacttcttccgcctactgtatcatagcagcttagaatcccagctgctggctcgggctgcagttctctcatggctcgcgcagggtggaccagccccgttcctttatgtgtgtgtctactgctgacctgtggctttgccgaggcagggaagctgctggtagtgcccatggatgggagtcactggttcaccatgcagtcggtggtggagaaacttatcctcagggggcatgaggtggttgtagtcatgccagaggtgagttggcaactggaaagatcactgaattgcacagtgaagacttactcaacctcgtacactctggaagatcagaaccgggaattcatggttttcgcccatgctcaatggaaagcacaggcacaaagtatattttctctattaatgagttcatccagtggttttcttgacttatttttttcgcattgcaggagtttgtttaatgaccgaaaattagtagaatacttaaaggagagttcttttgatgcagtgtttctggatccttttgatacctgtggcttaattgttgctaaatatttctccctcccctctgtggtcttcaccaggggaatattttgccaccatcttgaagaaggtgcacagtgccctgctcctctttcctatgtccccaatgatctcttagggttctcagatgccatgactttcaaggagagagtatggaaccacatcgtgcacttggaggaccatttattttgccagtatctttttagaaatgccctagaaatagcctctgaaattctccaaacccctgtcacggcatatgatctctacagtcacacatcaatttggttgttgcgaacggactttgttttggactatcccaaacccgtgatgcccaacatgatcttcattggtggtatcaactgtcatcagggaaagccattgcctatggaatttgaagcctacattaatgcttctggagaacatggaattgtggttttctctttgggatcaatggtctcagaaattccagagaagaaagctatggcaattgctgatgctttgggcaaaatccctcagacagtcctgtggcggtacactggaacccgaccatcgaatcttgcgaacaacacgatacttgttaagtggctaccccaaaacgatctgcttggtcacccgatgacccgtgcctttatcacccatgctggttcccatggtgtttatgaaagcatatgcaatggcgttcccatggtgatgatgcccttgtttggtgatcagatggacaatgcaaagcgcatggagactaagggagctggagtgaccctgaatgttctggaaatgacttctgaagatttagaaaatgctctaaaagcagtcatcaatgacaaaagttacaaggagaacatcatgcgcctctccagccttcacaaggaccgcccggtggagccgctggacctggccgtgttctgggtggagtttgtgatgaggcacaagggcgcgccacacctgcgccccgcagcccacgacctcacctggtaccagtaccattccttggacgtgattggtttcctcttggccgtcgtgctgacagtggccttcatcacctttaaatgttgtgcttatggctaccggaaatgcttggggaaaaaagggcgagttaagaaagcccacaaatccaagacccattgagaagtgggtgggaaataaggtaaaattttgaaccattccctagtcatttccaaacttgaaaacagaatcagtgttaaattcattttattcttattaaggaaatactttgcataaattaatcagccccagagtgctttaaaaaattctcttaaataaaaataatagactcgctagtcagtaaagatatttgaatatgtatcgtgccccctctggtgtctttgatcaggatgacatgtgccatttttcagaggacgtgcagacaggctggcattctagattacttttcttactctgaaacatggcctgtttgggagtgcgggattcaaaggtggtcccacggctgcccctactgcaaatggcagttttaatcttatcttttggcttctgcagatggttgcaattgatccttaaccaataatggtcagtcctcatctctgtcgtgcttcataggtgccaccttgtgtgtttaaagaagggaagctttgtacctttagagtgtaggtgaaatgaatgaatggcttggagtgcactgagaacagcatatgatttcttgctttggggaaaaagaatgatgctatgaaattggtgggtggtgtatttgagaagataatcattgcttatgtcaaatggagctgaatttgataaaaacccaaaatacagctatgaagtgctgggcaagtttactttttttctgatgtttcctacaactaaaaataaattaataaatttatataaattctatttaa

SEQ ID NO: 201265 - protein, 530 aa, Artificial Sequence
  derived and/or modified sequence
MARTGWTSPIPLCVSLLLTCGFAEAGKLLVVPMDGSHWFTMQSVVEKLILRGHEVVVVMPEVSWQLGKSLNCTVKTYSTSYTLEDLDREFMDFADAQWKAQVRSLFSLFLSSSNGFFNLFFSHCRSLFNDRKLVEYLKESSFDAVFLDPFDACGLIVAKYFSLPSVVFARGIACHYLEEGAQCPAPLSYVPRILLGFSDAMTFKERVRNHIMHLEEHLFCQYFSKNALEIASEILQTPVTAYDLYSHTSIWLLRTDFVLDYPKPVMPNMIFIGGINCHQGKPLPMEFEAYINASGEHGIVVFSLGSMVSEIPEKKAMAIADALGKIPQTVLWRYTGTRPSNLANNTILVKWLPQNDLLGHPMTRAFITHAGSHGVYESICNGVPMVMMPLFGDQMDNAKRMETKGAGVTLNVLEMTSEDLENALKAVINDKSYKENIMRLSSLHKDRPVEPLDLAVFWVEFVMRHKGAPHLRPAAHDLTWYQYHSLDVIGFLLAVVLTVAFITFKCCAYGYRKCLGKKGRVKKAHKSKTH

SEQ ID NO: 201266 - DNA, 1593 bp, Artificial Sequence
  derived and/or modified sequence
atggccagaaccggctggaccagccccatccccctgtgcgtgagcctgctgctgacctgcggcttcgccgaggccggcaagctgctggtggtgcccatggacggcagccactggttcaccatgcagagcgtggtggagaagctgatcctgagaggccacgaggtggtggtggtgatgcccgaggtgagctggcagctgggcaagagcctgaactgcaccgtgaagacctacagcaccagctacaccctggaggacctggacagagagttcatggacttcgccgacgcccagtggaaggcccaggtgagaagcctgttcagcctgttcctgagcagcagcaacggcttcttcaacctgttcttcagccactgcagaagcctgttcaacgacagaaagctggtggagtacctgaaggagagcagcttcgacgccgtgttcctggaccccttcgacgcctgcggcctgatcgtggccaagtacttcagcctgcccagcgtggtgttcgccagaggcatcgcctgccactacctggaggagggcgcccagtgccccgcccccctgagctacgtgcccagaatcctgctgggcttcagcgacgccatgaccttcaaggagagagtgagaaaccacatcatgcacctggaggagcacctgttctgccagtacttcagcaagaacgccctggagatcgccagcgagatcctgcagacccccgtgaccgcctacgacctgtacagccacaccagcatctggctgctgagaaccgacttcgtgctggactaccccaagcccgtgatgcccaacatgatcttcatcggcggcatcaactgccaccagggcaagcccctgcccatggagttcgaggcctacatcaacgccagcggcgagcacggcatcgtggtgttcagcctgggcagcatggtgagcgagatccccgagaagaaggccatggccatcgccgacgccctgggcaagatcccccagaccgtgctgtggagatacaccggcaccagacccagcaacctggccaacaacaccatcctggtgaagtggctgccccagaacgacctgctgggccaccccatgaccagagccttcatcacccacgccggcagccacggcgtgtacgagagcatctgcaacggcgtgcccatggtgatgatgcccctgttcggcgaccagatggacaacgccaagagaatggagaccaagggcgccggcgtgaccctgaacgtgctggagatgaccagcgaggacctggagaacgccctgaaggccgtgatcaacgacaagagctacaaggagaacatcatgagactgagcagcctgcacaaggacagacccgtggagcccctggacctggccgtgttctgggtggagttcgtgatgagacacaagggcgccccccacctgagacccgccgcccacgacctgacctggtaccagtaccacagcctggacgtgatcggcttcctgctggccgtggtgctgaccgtggccttcatcaccttcaagtgctgcgcctacggctacagaaagtgcctgggcaagaagggcagagtgaagaaggcccacaagagcaagacccactag

SEQ ID NO: 201267 - DNA, 1593 bp, Artificial Sequence
  derived and/or modified sequence
atggctcgaaccggttggacctcccctatcccactgtgtgtgtctcttttattaacctgcgggtttgccgaggccggaaaactgctggtggtgccgatggacggatcacattggtttaccatgcagtccgttgtggaaaaactcattctgcgcggccacgaggtggtagttgttatgcccgaggtgtcttggcagttagggaaatccttgaactgcactgtgaaaacttactctactagttatacacttgaagatttagatagggaatttatggattttgcagacgcacagtggaaggcacaggtcagatccctgttcagtctctttctcagtagctcaaatgggttctttaaccttttcttcagtcactgtcgctctctgtttaacgacagaaaactagtcgagtatctgaaggagtccagctttgacgccgtattcctcgatccatttgacgcctgtggacttatcgtggccaagtatttctctctgcccagcgtggtgttcgctcgcggaatcgcttgtcactacctggaggaaggggcccagtgccccgctccactctcctacgtgccgcggattctgctgggattttctgatgctatgacatttaaggaacgagttagaaatcacattatgcatctggaggaacacctgttctgccagtacttcagtaagaatgccctggagatcgcaagtgagatcctccagacacctgtgactgcctacgacttgtactctcataccagcatttggcttctgagaacagacttcgtgctggactatcccaagccagtcatgcccaatatgatcttcattggtggcatcaattgtcaccaaggcaaaccactgcccatggagttcgaggcttacattaacgcttcaggcgagcacggtattgtcgtattttcactgggaagtatggtcagtgagataccagagaagaaggccatggccatcgcagatgcactggggaagatacctcagacggtcctttggagatacaccggcaccaggcccagtaaccttgccaataatactatcctggtgaagtggctgcctcagaacgacctcctgggccatcccatgactcgtgctttcatcacccacgccgggagccacggcgtctatgagagtatctgcaatggggtccccatggtaatgatgccactctttggagaccaaatggacaatgcaaagcggatggagacgaaaggtgctggagtaaccctgaacgtgctggagatgacctccgaagatctggagaacgccctgaaggcggtaataaacgataaaagctacaaagaaaatatcatgcgcctgagttctttgcacaaggacagacccgtggagcctctggatctcgcagttttctgggttgaattcgtaatgcgccataagggtgccccccacttaagacccgctgctcacgatctcacatggtatcagtaccacagccttgacgtgattgggtttttgctggccgtggtgctcaccgtggccttcattacttttaagtgctgcgcttatggctatcgcaagtgcctaggaaaaaaaggacgggtgaaaaaagctcataagagcaagactcactag

SEQ ID NO: 201268 - DNA, 1593 bp, Artificial Sequence
  derived and/or modified sequence
atggccaggacaggctggaccagccccatccccctgtgtgtgtccctgctgctgacctgtggctttgctgaggccggcaagctgctggtggtgcccatggatggcagccactggttcaccatgcagagcgtggtggagaagctgatcctgcggggccacgaggtggtggtggtgatgcctgaggtgtcctggcagctgggcaagagcctgaactgcaccgtgaagacctacagcaccagctacaccctggaggacctggaccgggagttcatggactttgctgatgcccagtggaaggcccaggtgcgcagcctcttcagcctcttcctgagcagcagcaatggcttcttcaacctcttcttcagccactgccgcagcctcttcaatgacaggaagctggtggagtacctgaaggagagcagctttgatgctgtgttcctggacccctttgatgcctgtggcctcatcgtggccaagtacttcagcctgcccagcgtggtgtttgcccggggcatcgcctgccactacctggaggagggcgcccagtgcccagcccccctgtcctatgtgccccgcatcctgctgggcttcagtgatgccatgaccttcaaggagcgggtgaggaaccacatcatgcacctggaggagcacctgttctgccagtacttcagcaagaatgccctggagatcgccagcgagatcctgcagacccctgtgacagcctatgacctgtacagccacaccagcatctggctgctgaggacagactttgtgctggactaccccaagcctgtgatgcccaacatgatcttcatcggcggcatcaactgccaccagggcaagcccctgcccatggagtttgaggcctacatcaatgccagcggggagcacggcatcgtggtgttcagcctgggctccatggtgtctgagatccctgagaagaaggccatggccatcgcagatgccctgggcaagatcccccagacagtgctgtggagatacacaggcacccggcccagcaacctggccaacaacaccatcctggtgaagtggctgccccagaatgacctgctgggccaccccatgacccgggccttcatcacccacgccggcagccatggagtgtatgagagcatctgcaatggagtgcccatggtgatgatgcccctgtttggagaccagatggacaatgccaagaggatggagaccaagggggccggcgtgaccctgaatgtgctggagatgaccagcgaggacctggagaatgccctgaaggccgtcatcaatgacaagagctacaaggagaacatcatgaggctgagcagcctgcacaaggacaggcctgtggagcccctggacctggccgtgttctgggtggagtttgtgatgaggcacaagggggccccccacctgcggcctgctgcccatgacctgacctggtaccagtaccacagcctggatgtgattggcttcctgctggccgtggtgctgactgtggccttcatcaccttcaagtgctgtgcctacggctacaggaagtgcctgggcaagaagggccgggtgaagaaggcccacaagagcaagacccactag

SEQ ID NO: 201269 - DNA, 1593 bp, Artificial Sequence
  derived and/or modified sequence
atggcccggaccggctggaccagccccatccccctgtgcgtgagcctgctgctgacatgtggttttgccgaagcaggtaagctgcttgtggtccctatggacggatctcactggtttacaatgcaaagtgtggtggagaagcttatcctgagaggtcacgaggttgtcgttgtcatgcctgaagtgagttggcaactgggcaagtctctgaattgtaccgtgaagacctatagcacctcatatactctggaagacttagatcgcgagtttatggatttcgccgatgctcagtggaaggcccaggtacgaagcttattcagcctctttctcagttctagtaatggcttctttaatctgttcttcagccattgccgttcccttttcaatgatcgaaagctcgttgaatacctcaaggagagttcattcgacgcagtctttctggacccctttgatgcttgcggcctcatagtcgccaagtacttcagcttgccttccgtggtgttcgcacgcggcattgcatgccactatcttgaagaaggggctcaatgtccagcacctcttagttacgtccccaggattctgctcgggttctctgacgcgatgacattcaaagaacgcgttcgtaatcatattatgcacctagaggagcacttgttttgtcaatatttctctaagaacgcccttgagattgctagcgagattctgcagactccagtgaccgcatacgacctgtactctcacacctctatctggctactaagaactgacttcgtcctcgattatcccaaaccagtcatgccaaatatgatttttattggcggcattaattgccatcaaggcaagcctcttcctatggaatttgaagcctacatcaacgcctccggggaacacggcatagtggtgtttagccttggaagcatggtgtcagaaattccagagaagaaagccatggctatcgctgacgcattaggaaagattccacaaaccgtcctgtggaggtatacaggcacacggcccagcaacctggcgaacaatacaatcttggtaaaatggctgcctcagaatgatctcctaggacaccctatgacgcgtgctttcatcacacacgctggctcccatggcgtgtatgagtccatttgcaacggtgtacctatggtcatgatgcccctattcggtgatcagatggataatgccaagcggatggagactaaaggagcaggcgtgacccttaatgttcttgagatgacgtcagaggacctcgagaacgctttgaaggcggtgatcaacgacaagagctacaaagaaaacattatgagactttccagtctccataaggacagacctgtggaacctctcgacctggcagtgttttgggtcgaatttgtgatgagacacaagggcgcaccccacctgaggcctgctgctcacgacttgacttggtaccagtatcactcactggacgtcatcgggttcctactggctgtggtgctaaccgtcgcattcatcacctttaaatgctgtgcgtacggttaccgcaagtgtctggggaagaagggacgagtgaagaaagcccacaaatccaagacccactag

SEQ ID NO: 201270 - DNA, 1593 bp, Artificial Sequence
  derived and/or modified sequence
atggcccgaactggctggacttcccccattcctctttgtgtgagcctgttgctaacatgtgggtttgctgaagcagggaagctcctggtggttcctatggatggtagtcactggttcactatgcagtctgtagttgagaaactcattctgcggggacacgaggttgtggtggttatgccggaagtgtcgtggcaactggggaagtcacttaactgcactgtgaaaacatattctacctcctataccctggaagacctggaccgcgagtttatggatttcgccgatgcccagtggaaggcccaggtaagaagcttattttctctcttccttagttcatcaaacgggttcttcaatctttttttctctcactgccgaagcctgttcaatgatagaaagttggtagagtacctaaaggaatcaagctttgacgctgtgtttctggacccattcgatgcttgcggtctcatcgtggcaaagtacttcagcctcccatcagtggttttcgccagagggatcgcctgccactatcttgaggagggcgcacagtgccccgcaccactgagctatgtaccgaggatcctgcttggattttccgacgctatgacgttcaaagaaagggtgaggaaccacattatgcatctggaggagcatctattttgccagtacttttccaaaaacgctttggaaattgccagcgaaattttgcagactccggtgacggcctatgatctgtacagtcatacgtccatttggctgttaaggactgacttcgtcttggactaccctaagcccgtcatgccaaacatgatttttataggcggaattaattgccaccaaggcaagccgctgcccatggagtttgaagcctatatcaacgcgtccggcgagcatggcatagttgtcttcagccttgggtccatggtcagtgagatcccagagaaaaaagccatggccatcgcggatgctctaggtaaaattccgcagacagtattgtggcggtatactgggactaggccgtctaatctggctaacaataccatactggtgaaatggcttccgcagaatgaccttttgggccacccaatgacaagagcctttattacacacgcaggaagtcacggggtctacgagtcaatttgtaatggggtccctatggtgatgatgccactgttcggggatcaaatggataacgccaaaagaatggaaacaaaaggcgcaggcgttacattgaacgtcttggagatgacctcggaagacttggagaacgccttaaaggccgtgataaacgacaaatcctataaagaaaacattatgagactgagcagcctccacaaagaccgccctgttgagcccctggacctggcagtgttctgggtggaattcgtcatgagacacaaaggagctccgcacctgcgcccagcggcacatgatctgacgtggtaccagtatcattcactagacgtaatcggatttctgcttgccgtggtcttgacagtcgcatttatcacattcaaatgttgcgcttatggctaccggaaatgcctgggtaaaaaggggagggtgaaaaaagcgcacaagtccaaaacccactag

SEQ ID NO: 201271 - DNA, 2407 bp, Artificial Sequence
  derived and/or modified sequence
cttccgcctactgtatcatagcagcttagaatcccagctgctggctcgggctgcagttctctcatggctcgcacagggtggaccagccccattcccctatgtgtttctctgctgctgacctgtggctttgctgaggcagggaagctgctggtagtgcccatggatgggagtcactggttcaccatgcagtcggtggtggagaaacttatcctcagggggcatgaggtggttgtagtcatgccagaggtgagttggcaactgggaaaatcactgaattgcacagtgaagacttactcaacctcatacactctggaggatctggaccgggaattcatggatttcgccgatgctcaatggaaagcacaagtacgaagtttgttttctctatttctgagttcatccaatggtttttttaacttatttttttcgcattgcaggagtttgtttaatgaccgaaaattagtagaatacttaaaggagagttcttttgatgcggtgtttcttgatccttttgatgcctgtggcttaattgttgccaaatatttctccctcccctctgtggtcttcgccaggggaatagcttgccactatcttgaagaaggtgcacagtgccctgctcctctttcctatgtccccagaattctcttagggttctcagatgccatgactttcaaggagagagtacggaaccacatcatgcacttggaggaacatttattttgccagtatttttccaaaaatgccctagaaatagcctctgaaattctccaaacacctgtcacagcatatgatctctacagccacacatcaatttggttgttgcgaacagactttgttttggactatcccaaacccgtgatgcccaatatgatcttcattggtggtatcaactgccatcagggaaagccattgcctatggaatttgaagcctacattaatgcttctggagaacatggaattgtggttttctctttgggatcaatggtctcagaaattccagagaagaaagctatggcaattgctgatgctttgggcaaaatccctcagacagtcctgtggcggtacactggaacccgaccatcgaatcttgcgaacaacacgatacttgttaagtggctaccccaaaacgatctgcttggtcacccgatgacccgtgcctttatcacccatgctggttcccatggtgtttatgaaagcatatgcaatggcgttcccatggtgatgatgcccttgtttggtgatcagatggacaatgcaaagcgcatggagactaagggagctggagtgaccctgaatgttctggaaatgacttctgaagatttagaaaatgctctaaaagcagtcatcaatgacaaaagttacaaggagaacatcatgcgcctctccagccttcacaaggaccgcccggtggagccgctggacctggccgtgttctgggtggagtttgtgatgaggcacaagggcgcgccacacctgcgccccgcagcccacgacctcacctggtaccagtaccattccttggacgtgattggtttcctcttggccgtcgtgctgacagtggccttcatcacctttaaatgttgtgcttatggctaccggaaatgcttggggaaaaaagggcgagttaagaaagcccacaaatccaagacccattgagaagtgggtgggaaataaggtaaaattttgaaccattccctagtcatttccaaacttgaaaacagaatcagtgttaaattcattttattcttattaaggaaatactttgcataaattaatcagccccagagtgctttaaaaaattctcttaaataaaaataatagactcgctagtcagtaaagatatttgaatatgtatcgtgccccctctggtgtctttgatcaggatgacatgtgccatttttcagaggacgtgcagacaggctggcattctagattacttttcttactctgaaacatggcctgtttgggagtgcgggattcaaaggtggtcccacggctgcccctactgcaaatggcagttttaatcttatcttttggcttctgcagatggttgcaattgatccttaaccaataatggtcagtcctcatctctgtcgtgcttcataggtgccaccttgtgtgtttaaagaagggaagctttgtacctttagagtgtaggtgaaatgaatgaatggcttggagtgcactgagaacagcatatgatttcttgctttggggaaaaagaatgatgctatgaaattggtgggtggtgtatttgagaagataatcattgcttatgtcaaatggagctgaatttgataaaaacccaaaatacagctatgaagtgctgggcaagtttactttttttctgatgtttcctacaactaaaaataaattaataaatttatataaattctatttaagtgtt

SEQ ID NO: 201272 - protein, 530 aa, Artificial Sequence
  derived and/or modified sequence
MARAGWTGLLPLYVCLLLTCGFAKAGKLLVVPMDGSHWFTMQSVVEKLILRGHEVVVVMPEVSWQLGRSLNCTVKTYSTSYTLEDQDREFMVFADARWTAPLRSAFSLLTSSSNGIFDLFFSNCRSLFNDRKLVEYLKESCFDAVFLDPFDACGLIVAKYFSLPSVVFARGIFCHYLEEGAQCPAPLSYVPRLLLGFSDAMTFKERVWNHIMHLEEHLFCPYFFKNVLEIASEILQTPVTAYDLYSHTSIWLLRTDFVLEYPKPVMPNMIFIGGINCHQGKPVPMEFEAYINASGEHGIVVFSLGSMVSEIPEKKAMAIADALGKIPQTVLWRYTGTRPSNLANNTILVKWLPQNDLLGHPMTRAFITHAGSHGVYESICNGVPMVMMPLFGDQMDNAKRMETKGAGVTLNVLEMTSEDLENALKAVINDKSYKENIMRLSSLHKDRPVEPLDLAVFWVEFVMRHKGAPHLRPAAHDLTWYQYHSLDVIGFLLAVVLTVAFITFKCCAYGYRKCLGKKGRVKKAHKSKTH

SEQ ID NO: 201273 - DNA, 1593 bp, Artificial Sequence
  derived and/or modified sequence
atggccagagccggctggaccggcctgctgcccctgtacgtgtgcctgctgctgacctgcggcttcgccaaggccggcaagctgctggtggtgcccatggacggcagccactggttcaccatgcagagcgtggtggagaagctgatcctgagaggccacgaggtggtggtggtgatgcccgaggtgagctggcagctgggcagaagcctgaactgcaccgtgaagacctacagcaccagctacaccctggaggaccaggacagagagttcatggtgttcgccgacgccagatggaccgcccccctgagaagcgccttcagcctgctgaccagcagcagcaacggcatcttcgacctgttcttcagcaactgcagaagcctgttcaacgacagaaagctggtggagtacctgaaggagagctgcttcgacgccgtgttcctggaccccttcgacgcctgcggcctgatcgtggccaagtacttcagcctgcccagcgtggtgttcgccagaggcatcttctgccactacctggaggagggcgcccagtgccccgcccccctgagctacgtgcccagactgctgctgggcttcagcgacgccatgaccttcaaggagagagtgtggaaccacatcatgcacctggaggagcacctgttctgcccctacttcttcaagaacgtgctggagatcgccagcgagatcctgcagacccccgtgaccgcctacgacctgtacagccacaccagcatctggctgctgagaaccgacttcgtgctggagtaccccaagcccgtgatgcccaacatgatcttcatcggcggcatcaactgccaccagggcaagcccgtgcccatggagttcgaggcctacatcaacgccagcggcgagcacggcatcgtggtgttcagcctgggcagcatggtgagcgagatccccgagaagaaggccatggccatcgccgacgccctgggcaagatcccccagaccgtgctgtggagatacaccggcaccagacccagcaacctggccaacaacaccatcctggtgaagtggctgccccagaacgacctgctgggccaccccatgaccagagccttcatcacccacgccggcagccacggcgtgtacgagagcatctgcaacggcgtgcccatggtgatgatgcccctgttcggcgaccagatggacaacgccaagagaatggagaccaagggcgccggcgtgaccctgaacgtgctggagatgaccagcgaggacctggagaacgccctgaaggccgtgatcaacgacaagagctacaaggagaacatcatgagactgagcagcctgcacaaggacagacccgtggagcccctggacctggccgtgttctgggtggagttcgtgatgagacacaagggcgccccccacctgagacccgccgcccacgacctgacctggtaccagtaccacagcctggacgtgatcggcttcctgctggccgtggtgctgaccgtggccttcatcaccttcaagtgctgcgcctacggctacagaaagtgcctgggcaagaagggcagagtgaagaaggcccacaagagcaagacccactag

SEQ ID NO: 201274 - DNA, 1593 bp, Artificial Sequence
  derived and/or modified sequence
atggcccgagccgggtggactgggctgttacctctgtacgtgtgcctgctgttgacgtgtggtttcgccaaggccggcaagctgctcgttgtgcccatggatggatcccactggttcactatgcaaagcgttgtggagaaactcatcctgcgggggcacgaagtggtggtcgtaatgcccgaagtgtcttggcaattaggccgctctctcaattgcactgtcaagacctattctacttcgtacactctggaagaccaggatagggagttcatggtgttcgcagacgcacggtggaccgcaccgctccgatcagctttctctctgcttacaagctcttccaacgggatctttgatcttttctttagtaattgtcggtcacttttcaacgatcgaaagttggtggagtatctcaaggagagctgtttcgacgcagtttttttagaccccttcgacgcgtgtggacttattgtggcaaagtattttagcctcccatcagtggtgtttgccaggggtatcttttgccactacctggaggaaggtgcacagtgtcccgctcccctgtcatacgtgcctcggctgctgctcggcttctccgacgccatgacttttaaggagcgcgtgtggaaccatattatgcatcttgaggagcatttgttctgtccctacttctttaaaaatgtgctggagatcgcctctgagattctccagactccagtcactgcatacgatctgtactcgcacactagcatctggctgctgaggactgactttgttctggagtacccgaaacccgttatgccaaacatgattttcataggcggtattaactgtcaccaagggaagcctgtgcccatggagtttgaagcatacatcaatgctagcggcgaacatggcattgtggtgtttagtctgggaagcatggtctcagagatacctgagaaaaaagccatggcaatcgctgacgctctggggaaaattcctcaaactgtcctgtggcggtacaccggcacgcgcccctcaaacctggctaacaacaccatattagtcaagtggttacctcaaaatgacctgttggggcacccgatgacaagagcgttcataactcacgccggtagccatggcgtttatgaatccatttgcaacggagtccccatggttatgatgccattgttcggagatcagatggataacgctaaaagaatggagaccaagggggcgggtgtaacattaaatgtactggagatgacctccgaagacctggaaaatgcccttaaggctgtgatcaacgacaaatcctacaaggagaatattatgaggctttctagtctccacaaggatagacccgtcgagcccttagacctcgcagtcttctgggttgagtttgtcatgcggcacaagggggcccctcatctgagacccgctgcccatgatcttacttggtaccagtaccattctctggatgtgatcgggtttcttctggctgttgtcttgaccgtcgcctttatcacgttcaaatgttgcgcttacggttatcggaaatgcctgggaaagaaaggccgcgtgaagaaggctcacaagtccaaaactcattag

SEQ ID NO: 201275 - DNA, 1593 bp, Artificial Sequence
  derived and/or modified sequence
atggcccgggccggctggacaggcctgctgcccctgtatgtgtgcctgctgctgacctgtggctttgccaaggccggcaagctgctggtggtgcccatggatggcagccactggttcaccatgcagagcgtggtggagaagctgatcctgcggggccacgaggtggtggtggtgatgcctgaggtgtcctggcagctgggccgcagcctgaactgcaccgtgaagacctacagcaccagctacaccctggaggaccaggaccgggagttcatggtgtttgctgatgcccgctggacagcccccctgcggagcgccttcagcctgctgaccagcagcagcaatggcatctttgacctcttcttcagcaactgccgcagcctcttcaatgacaggaagctggtggagtacctgaaggagagctgctttgatgctgtgttcctggacccctttgatgcctgtggcctcatcgtggccaagtacttcagcctgcccagcgtggtgtttgcccggggcatcttctgccactacctggaggagggcgcccagtgcccagcccccctgtcctatgtgccccggctgctgctgggcttcagtgatgccatgaccttcaaggagcgggtgtggaaccacatcatgcacctggaggagcacctgttctgcccctacttcttcaagaatgtgctggagatcgccagcgagatcctgcagacccctgtgacagcctatgacctgtacagccacaccagcatctggctgctgaggacagactttgtgctggagtaccccaagcctgtgatgcccaacatgatcttcatcggcggcatcaactgccaccagggcaagcctgtgcccatggagtttgaggcctacatcaatgccagcggggagcacggcatcgtggtgttcagcctgggctccatggtgtctgagatccctgagaagaaggccatggccatcgcagatgccctgggcaagatcccccagacagtgctgtggagatacacaggcacccggcccagcaacctggccaacaacaccatcctggtgaagtggctgccccagaatgacctgctgggccaccccatgacccgggccttcatcacccacgccggcagccatggagtgtatgagagcatctgcaatggagtgcccatggtgatgatgcccctgtttggagaccagatggacaatgccaagaggatggagaccaagggggccggcgtgaccctgaatgtgctggagatgaccagcgaggacctggagaatgccctgaaggccgtcatcaatgacaagagctacaaggagaacatcatgaggctgagcagcctgcacaaggacaggcctgtggagcccctggacctggccgtgttctgggtggagtttgtgatgaggcacaagggggccccccacctgcggcctgctgcccatgacctgacctggtaccagtaccacagcctggatgtgattggcttcctgctggccgtggtgctgactgtggccttcatcaccttcaagtgctgtgcctacggctacaggaagtgcctgggcaagaagggccgggtgaagaaggcccacaagagcaagacccactag

SEQ ID NO: 201276 - DNA, 1593 bp, Artificial Sequence
  derived and/or modified sequence
atggcccgggccggctggaccggcctgctgcccctgtacgtgtgcctactgctgacctgtggctttgccaaggccggcaagctcctggtggtgcccatggatggctcccattggttcaccatgcaatccgtggtggagaaactgatcctgaggggccatgaggtggtagttgtaatgcctgaagttagctggcagttgggccgatcattaaattgtacagtgaaaacttatagcactagttacactttggaggaccaggacagagaattcatggttttcgcagacgctcgctggacagcacccctgcgttcagcattctctttgcttacctcttcctctaacggcatcttcgatttgtttttcagtaactgtcggtccttatttaacgatcgcaaactggtggaatatttaaaagagtcctgtttcgacgccgtcttcctggaccctttcgacgcatgcggcttgatcgtcgctaagtacttttcactgccctcagtcgtgttcgctcgagggattttctgccactacctcgaggagggtgctcagtgccccgccccactaagttatgtgccgcgtctgttgctgggattctcagatgccatgacctttaaggagcgagtttggaatcacattatgcatctcgaggagcacttattctgtccgtattttttcaagaatgttcttgaaatcgcttctgagatactgcagacaccggtcactgcatatgatttgtattcccatacgtccatttggctcttgcgaacagactttgtgctcgagtacccgaagcccgtcatgcctaatatgatattcattggtggtattaactgtcaccagggtaaaccagtacccatggagtttgaggcgtatattaacgcttctggggagcatggcatcgtcgttttctccttggggtccatggtgtctgaaatcccagagaaaaaagccatggccatcgccgacgctctaggaaagatcccgcaaacagtcctgtggaggtacactggcacacgcccatcaaatctggcgaataacacaattctggtcaagtggctgccacaaaacgatctcctgggccaccctatgacccgggctttcatcacccatgcaggatctcacggtgtttatgagtctatctgtaacggggtcccaatggtgatgatgcccctgttcggcgatcaaatggataacgccaaacggatggagaccaagggggccggtgttacactgaacgtcctggaaatgacatcagaagacctggagaacgccctaaaagccgtgattaacgacaaaagctataaagagaatatcatgagacttagcagtctccacaaggaccgacccgtggaacccctggatctcgccgtgttctgggtagagttcgtcatgcgtcacaaaggggccccccacttacggccggccgcacatgatctcacgtggtatcaatatcattcactcgacgtgatcggcttcctcttggctgtcgtactgactgtcgccttcattacatttaaatgttgtgcctacggctaccggaagtgcctgggtaaaaagggacgggtaaagaaagcccacaagtcgaagacgcactag

SEQ ID NO: 201277 - DNA, 1593 bp, Artificial Sequence
  derived and/or modified sequence
atggcccgagccggttggaccgggttgcttcccctgtacgtttgtctgctgttaacttgtgggttcgcaaaagccggtaaactgctggtagtgccgatggacggttcacactggttcactatgcaaagcgtggtcgagaagctcatcctccggggtcacgaggtcgttgtcgtgatgccagaggtctcttggcagcttggaaggtctttgaactgtacggtgaaaacctactctacaagctacaccttggaggatcaggatcgtgaatttatggtattcgctgacgcgcgttggactgctccgctccggagtgccttttcgctcctcaccagctcttcaaatggcatttttgatctgttctttagcaattgtcggtctttatttaacgacaggaaactggtcgaatacttgaaagagtcctgctttgacgcagtgttcctggatccctttgacgcttgcggtctaatcgttgccaaatacttcagtctcccttctgtggtgtttgctcggggaatcttttgtcactatctggaagagggagcccagtgtccagcccctctgagctatgtgccccgacttctactaggattttctgatgccatgacctttaaggaaagggtttggaaccatattatgcatctggaggaacacctgttctgtccctatttctttaaaaacgtcctggaaatcgccagcgaaatcctgcagacccctgtgactgcctatgatctctactcccacacctccatttggttgctgaggaccgactttgtactcgagtaccctaaacccgtcatgcctaatatgatattcattggcggtattaactgccaccagggaaagcccgtgcccatggaatttgaagcgtacataaacgcctcaggcgagcatggcatagttgtgttctccctcgggtccatggtttccgaaatacctgaaaagaaagcaatggcaatcgccgatgccctggggaagattccccagacggtgttatggcgatataccggaactagaccctccaacctcgccaacaataccatacttgtcaagtggctgccccagaatgacctcttaggccacccgatgacacgagccttcatcactcacgccggttctcatggggtgtacgaatctatatgcaatggagtgccgatggttatgatgccgctgtttggggatcaaatggacaatgcgaagcggatggagactaagggagcaggcgtgacgctgaatgtattagagatgacttccgaagatctcgagaacgccctgaaggcagtgatcaatgataaatcatacaaggaaaatattatgagattgtccagcctgcacaaagatcgtcctgtagaacctctcgacctcgccgttttttgggtggagtttgtgatgcgccataagggcgctcctcacctgagaccagcggcacacgatctaacctggtaccaatatcattcactggatgtcataggtttcctgctggccgtggtgctcactgtagccttcattacctttaagtgctgtgcttatgggtacagaaagtgtcttggtaaaaagggaagagtgaaaaaggctcacaagtccaaaacccattag

SEQ ID NO: 201278 - DNA, 2333 bp, Artificial Sequence
  derived and/or modified sequence
atggctcgtgcagggtggactggcctccttcccctatatgtgtgtctactgctgacctgtggctttgccaaggcagggaagctgctggtagtgcccatggatgggagccactggttcaccatgcagtcggtggtggagaaactcatcctcagggggcatgaggtggtcgtagtcatgccagaggtgagttggcaactgggaagatcactgaattgcacagtgaagacttactcaacctcatacactctggaggatcaggaccgggagttcatggtttttgccgatgctcgctggacggcaccattgcgaagtgcattttctctattaacaagttcatccaatggtatttttgacttatttttttcaaattgcaggagtttgtttaatgaccgaaaattagtagaatacttaaaggagagttgttttgatgcagtgtttctcgatccttttgatgcctgtggcttaattgttgccaaatatttctccctcccctctgtggtcttcgccaggggaatattttgccactatcttgaagaaggtgcacagtgccctgctcctctttcctatgtccccagacttctcttagggttctcagacgccatgactttcaaggagagagtatggaaccacatcatgcacttggaggaacatttattttgcccctattttttcaaaaatgtcttagaaatagcctctgaaattctccaaacccctgtcacggcatatgatctctacagccacacatcaatttggttgttgcgaactgactttgttttggagtatcccaaacccgtgatgcccaatatgatcttcattggtggtatcaactgtcatcagggaaagccagtgcctatggaatttgaagcctacattaatgcttctggagaacatggaattgtggttttctctttgggatcaatggtctcagaaattccagagaagaaagctatggcaattgctgatgctttgggcaaaatccctcagacagtcctgtggcggtacactggaacccgaccatcgaatcttgcgaacaacacgatacttgttaagtggctaccccaaaacgatctgcttggtcacccgatgacccgtgcctttatcacccatgctggttcccatggtgtttatgaaagcatatgcaatggcgttcccatggtgatgatgcccttgtttggtgatcagatggacaatgcaaagcgcatggagactaagggagctggagtgaccctgaatgttctggaaatgacttctgaagatttagaaaatgctctaaaagcagtcatcaatgacaaaagttacaaggagaacatcatgcgcctctccagccttcacaaggaccgcccggtggagccgctggacctggccgtgttctgggtggagtttgtgatgaggcacaagggcgcgccacacctgcgccccgcagcccacgacctcacctggtaccagtaccattccttggacgtgattggtttcctcttggccgtcgtgctgacagtggccttcatcacctttaaatgttgtgcttatggctaccggaaatgcttggggaaaaaagggcgagttaagaaagcccacaaatccaagacccattgagaagtgggtgggaaataaggtaaaattttgaaccattccctagtcatttccaaacttgaaaacagaatcagtgttaaattcattttattcttattaaggaaatactttgcataaattaatcagccccagagtgctttaaaaaattctcttaaataaaaataatagactcgctagtcagtaaagatatttgaatatgtatcgtgccccctctggtgtctttgatcaggatgacatgtgccatttttcagaggacgtgcagacaggctggcattctagattacttttcttactctgaaacatggcctgtttgggagtgcgggattcaaaggtggtcccacggctgcccctactgcaaatggcagttttaatcttatcttttggcttctgcagatggttgcaattgatccttaaccaataatggtcagtcctcatctctgtcgtgcttcataggtgccaccttgtgtgtttaaagaagggaagctttgtacctttagagtgtaggtgaaatgaatgaatggcttggagtgcactgagaacagcatatgatttcttgctttggggaaaaagaatgatgctatgaaattggtgggtggtgtatttgagaagataatcattgcttatgtcaaatggagctgaatttgataaaaacccaaaatacagctatgaagtgctgggcaagtttactttttttctgatgtttcctacaactaaaaataaattaataaatttatataaattct

SEQ ID NO: 201279 - protein, 534 aa, Artificial Sequence
  derived and/or modified sequence
MATGLQVPLPQLATGLLLLLSVQPWAESGKVLVVPTDGSHWLSMREALRDLHARGHQVVVLTLEVNMYIKEENFFTLTTYAISWTQDEFDRLLLGHTQSFFETEHLLMKFSRRMAIMNNMSLIIHRSCVELLHNEALIRHLHATSFDVVLTDPFHLCAAVLAKYLSIPAVFFLRNIPCDLDFKGTQCPNPSSYIPRLLTTNSDHMTFLQRVKNMLYPLALSYLCHAVSAPYASLASELFQREVSVVDLVSHASVWLFRGDFVMDYPRPIMPNMVFIGGINCANGKPLSQEFEAYINASGEHGIVVFSLGSMVSEIPEKKAMAIADALGKIPQTVLWRYTGTRPSNLANNTILVKWLPQNDLLGHPMTRAFITHAGSHGVYESICNGVPMVMMPLFGDQMDNAKRMETKGAGVTLNVLEMTSEDLENALKAVINDKSYKENIMRLSSLHKDRPVEPLDLAVFWVEFVMRHKGAPHLRPAAHDLTWYQYHSLDVIGFLLAVVLTVAFITFKCCAYGYRKCLGKKGRVKKAHKSKTH

SEQ ID NO: 201280 - DNA, 1605 bp, Artificial Sequence
  derived and/or modified sequence
atggccaccggcctgcaggtgcccctgccccagctggccaccggcctgctgctgctgctgagcgtgcagccctgggccgagagcggcaaggtgctggtggtgcccaccgacggcagccactggctgagcatgagagaggccctgagagacctgcacgccagaggccaccaggtggtggtgctgaccctggaggtgaacatgtacatcaaggaggagaacttcttcaccctgaccacctacgccatcagctggacccaggacgagttcgacagactgctgctgggccacacccagagcttcttcgagaccgagcacctgctgatgaagttcagcagaagaatggccatcatgaacaacatgagcctgatcatccacagaagctgcgtggagctgctgcacaacgaggccctgatcagacacctgcacgccaccagcttcgacgtggtgctgaccgaccccttccacctgtgcgccgccgtgctggccaagtacctgagcatccccgccgtgttcttcctgagaaacatcccctgcgacctggacttcaagggcacccagtgccccaaccccagcagctacatccccagactgctgaccaccaacagcgaccacatgaccttcctgcagagagtgaagaacatgctgtaccccctggccctgagctacctgtgccacgccgtgagcgccccctacgccagcctggccagcgagctgttccagagagaggtgagcgtggtggacctggtgagccacgccagcgtgtggctgttcagaggcgacttcgtgatggactaccccagacccatcatgcccaacatggtgttcatcggcggcatcaactgcgccaacggcaagcccctgagccaggagttcgaggcctacatcaacgccagcggcgagcacggcatcgtggtgttcagcctgggcagcatggtgagcgagatccccgagaagaaggccatggccatcgccgacgccctgggcaagatcccccagaccgtgctgtggagatacaccggcaccagacccagcaacctggccaacaacaccatcctggtgaagtggctgccccagaacgacctgctgggccaccccatgaccagagccttcatcacccacgccggcagccacggcgtgtacgagagcatctgcaacggcgtgcccatggtgatgatgcccctgttcggcgaccagatggacaacgccaagagaatggagaccaagggcgccggcgtgaccctgaacgtgctggagatgaccagcgaggacctggagaacgccctgaaggccgtgatcaacgacaagagctacaaggagaacatcatgagactgagcagcctgcacaaggacagacccgtggagcccctggacctggccgtgttctgggtggagttcgtgatgagacacaagggcgccccccacctgagacccgccgcccacgacctgacctggtaccagtaccacagcctggacgtgatcggcttcctgctggccgtggtgctgaccgtggccttcatcaccttcaagtgctgcgcctacggctacagaaagtgcctgggcaagaagggcagagtgaagaaggcccacaagagcaagacccactag

SEQ ID NO: 201281 - DNA, 1605 bp, Artificial Sequence
  derived and/or modified sequence
atggcaacagggcttcaggtccctcttccgcagctcgccaccgggcttctgttgttgctttctgtacaaccctgggctgagtctgggaaagttctcgtggtgccaactgatggttcgcattggctgagcatgagggaggctcttagggacctgcatgcccgaggtcatcaggtggtagtgcttactctcgaggtcaatatgtacattaaagaagaaaatttcttcacccttactacatatgccatctcttggacacaggatgaatttgataggttgctgctcgggcatacacagagctttttcgagactgagcaccttctgatgaaattctcccggaggatggctattatgaataacatgtccctcatcatccataggtcctgcgttgagcttctgcacaacgaagccttgatcagacacctccacgccacaagttttgacgtcgtactgacagacccattccatctttgcgcggccgtattggccaagtatctgagcattcccgctgtgttcttcctcaggaatataccatgcgatttagatttcaagggcacgcagtgtccgaacccttcctcttacatcccgcgcctactaaccacaaactctgatcacatgacgtttcttcagcgagtgaagaacatgctttatcctctggccctttcatacttatgccatgctgtctcagccccctatgcctctttggcgagtgaactcttccagcgcgaggtctcagtagtagatctggtatctcacgcctctgtctggctcttcagaggagacttcgtcatggattaccccagaccaataatgccgaacatggtctttattggaggtatcaactgcgccaacgggaaacccctgtcccaggagttcgaggcttacattaacgcctctggtgagcacggtatagttgtgttcagtcttggatctatggtgtctgagattcccgagaaaaaagctatggcgattgcagatgccctaggcaagataccacaaactgtgctgtggcgatacaccggcacacggccgagtaatctcgcaaacaacaccatcctcgtgaaatggctgcctcagaacgaccttctgggccaccccatgacccgcgcattcattacacatgccggctctcacggagtgtatgaaagtatttgtaacggcgttcccatggtcatgatgcccttgttcggcgaccaaatggacaacgctaagaggatggagaccaagggcgcaggtgtgacattaaatgtactcgagatgacttcagaagatttagagaacgccctcaaggcagtcattaatgataagagctacaaagaaaatatcatgcggttgagcagtttgcacaaggaccgccccgtggagccgctggacctcgcagttttctgggttgagttcgtcatgcggcacaagggagctcctcacttgagacctgccgctcacgacctgacgtggtaccaataccatagcctggatgtgatcggctttttacttgcagtcgttctgaccgtcgcttttattactttcaagtgctgtgcatatgggtaccgaaagtgcttaggaaaaaagggccgcgtgaaaaaggcccataagtctaaaacacactag

SEQ ID NO: 201282 - DNA, 1605 bp, Artificial Sequence
  derived and/or modified sequence
atggccaccggcctgcaggtgcccctgccccagctggccaccggcctgctgctgctgctgtctgtgcagccctgggccgagagcggcaaggtgctggtggtgcccacagatggcagccactggctgtccatgagggaggccctgcgggacctgcacgcccggggccaccaggtggtggtgctgaccctggaggtgaacatgtacatcaaggaggagaacttcttcaccctgaccacctacgccatctcctggacccaggatgaatttgaccggctgctgctgggccacacccagagcttctttgaaacagagcacctgctgatgaagttcagcaggaggatggccatcatgaacaacatgagcctcatcatccacaggagctgtgtggagctgctgcacaatgaggccctgatccgccacctgcacgccaccagctttgatgtggtgctgacagaccccttccacctgtgtgccgctgtgctggccaagtacctgagcatcccagctgtgttcttcctgaggaacatcccctgtgacctggacttcaagggcacccagtgccccaaccccagcagctacatcccccggctgctgaccaccaacagcgaccacatgaccttcctgcagagggtgaagaacatgctgtaccccctggccctgagctacctgtgccacgctgtgtctgccccctatgccagcctggccagcgagctgttccagcgggaggtgtctgtggtggacctggtgtcccatgcctctgtgtggctgttccggggggactttgtgatggactacccccggcccatcatgcccaacatggtgttcatcggcggcatcaactgtgccaacgggaagcccctgagccaggagtttgaggcctacatcaatgccagcggggagcacggcatcgtggtgttcagcctgggctccatggtgtctgagatccctgagaagaaggccatggccatcgcagatgccctgggcaagatcccccagacagtgctgtggagatacacaggcacccggcccagcaacctggccaacaacaccatcctggtgaagtggctgccccagaatgacctgctgggccaccccatgacccgggccttcatcacccacgccggcagccatggagtgtatgagagcatctgcaatggagtgcccatggtgatgatgcccctgtttggagaccagatggacaatgccaagaggatggagaccaagggggccggcgtgaccctgaatgtgctggagatgaccagcgaggacctggagaatgccctgaaggccgtcatcaatgacaagagctacaaggagaacatcatgaggctgagcagcctgcacaaggacaggcctgtggagcccctggacctggccgtgttctgggtggagtttgtgatgaggcacaagggggccccccacctgcggcctgctgcccatgacctgacctggtaccagtaccacagcctggatgtgattggcttcctgctggccgtggtgctgactgtggccttcatcaccttcaagtgctgtgcctacggctacaggaagtgcctgggcaagaagggccgggtgaagaaggcccacaagagcaagacccactag

SEQ ID NO: 201283 - DNA, 1605 bp, Artificial Sequence
  derived and/or modified sequence
atggccaccggcctgcaggtgcccctgccccagctggccaccggccttctgctgctgcttagtgtccagccatgggctgaatcagggaaggtcctggtcgtgcctacagacgggagccactggttaagcatgagggaggcgctgcgagacttgcatgcccgtggccaccaggtggttgtgctcaccctagaggtgaacatgtatatcaaagaggagaatttcttcacgctcactacttatgccatctcttggacacaggacgaatttgaccggctgctgttgggtcacactcaatctttcttcgagactgagcacctgctcatgaagtttagtcgccgtatggcaattatgaataacatgagcctcatcattcataggtcctgcgtggagctgcttcataatgaagccctgattcgccacctgcatgctaccagttttgatgtggtgttgaccgacccctttcatctttgtgcagctgtgttggccaaatacctaagtatccccgccgtgttctttcttcgaaatattccctgtgacttggactttaaggggacgcagtgtccgaaccctagctcatacatccctcgactgttgaccacaaattctgaccatatgacatttttgcagagggttaagaacatgttgtatcccctggcgttgagctatctgtgtcatgccgttagcgcaccatatgcttccctggcttctgagctctttcagcgggaagtcagcgttgtggatttagtttcccacgcttccgtgtggctgttccggggcgattttgtgatggactacccgcggccgatcatgcccaacatggtgttcattggcggcatcaactgtgccaatggcaagcccttatcacaggagtttgaggcttatatcaatgctagcggagagcacggaatagtagtattctcgcttggctctatggtgtcagagatccctgagaaaaaagctatggccatcgctgacgcccttggcaagattcctcaaaccgtcctctggcgttacaccgggacaaggccatccaacctggcaaataatacaatccttgtcaaatggctcccacaaaatgacctgctggggcaccccatgactcgggcctttatcacacacgccggtagccacggagtgtatgagtctatatgcaacggggtgccaatggttatgatgcccttattcggcgatcagatggataatgcgaagcgtatggaaacaaagggcgccggtgtgaccttaaatgtactggagatgaccagtgaagacctggagaatgcactgaaggccgtgatcaatgataagtcatacaaagagaacatcatgagattgagtagccttcataaggacaggcccgtggagcccctggacctcgctgtgttttgggtggaattcgtaatgcggcacaaaggagctcctcatctgcgcccggccgcccacgacctaacttggtaccagtatcatagcctggatgtgatcggcttcctcctggctgtggtcttaacagtggcttttatcacatttaaatgttgcgcatatgggtacaggaaatgtctgggcaagaagggacgcgtgaagaaggcacacaagagtaaaacccactag

SEQ ID NO: 201284 - DNA, 1605 bp, Artificial Sequence
  derived and/or modified sequence
atggccaccgggctacaggtccccctaccccagctggcaaccggtctcctgcttctgctgtctgttcagccctgggcagagtcaggaaaggtgttagtggtacccacagacggatcacactggttaagcatgcgggaagccctgcgcgacttgcacgcacgagggcatcaggtagtggtactcaccctggaagtcaacatgtacatcaaagaggagaatttcttcactcttaccacatacgccatctcctggacccaggatgaatttgaccgactgttgcttgggcatacacaaagtttctttgagaccgaacatttactcatgaaattttctcgcaggatggccattatgaacaatatgtctttgataatacatcgttcatgcgtggagctgctgcataatgaagccctcattaggcatctacacgcaacctcgtttgacgtcgttctcacggaccccttccatctctgcgccgcagtcctggcaaagtatctcagcataccagcggttttttttcttaggaacattccatgcgacctggacttcaaaggcactcaatgtccaaacccttcatcctacatcccacggctgctgaccaccaattctgatcatatgaccttcctgcaacgcgtcaagaatatgctgtatcccctagccctatcctacctctgtcatgcagttagcgccccttacgcctccctcgccagcgaactgtttcagcgggaggtttctgtcgtggatttagtcagccatgcttccgtgtggctcttccgcggtgacttcgtgatggactatccaaggcccatcatgccaaacatggtgtttataggcggtataaactgcgccaacgggaaaccactatctcaggaattcgaggcatatataaatgcctccggggagcatggtatagttgttttcagtctaggatctatggtgtcagagattccggagaagaaagcaatggccatcgccgacgccctaggtaagattccccagaccgttttgtggagatacacaggcaccaggccttctaatctggctaataatactatcctggtgaaatggctcccacagaatgaccttcttggtcaccccatgactagggcctttataactcacgcaggatcacacggtgtttacgagagcatctgcaacggggtaccaatggtgatgatgcctctgttcggggaccagatggacaatgcaaagcggatggaaaccaagggggcaggagtgacactgaatgtgttagagatgacatcagaagatttggagaacgctctgaaagccgttataaacgacaaatcatataaggagaacattatgaggttatctagtctccataaggaccgtcccgtcgagccactggacctggcggtattctgggtcgagtttgtgatgcgccataaaggggctccacacctgcgacctgctgcccacgatctcacttggtatcagtatcactctttggacgtgattggctttctgcttgccgttgtactcactgttgcctttattaccttcaagtgttgtgcctatggctaccgcaagtgtctgggaaagaaagggagggtgaaaaaggcacacaaatccaagacccattag

SEQ ID NO: 201285 - DNA, 2345 bp, Artificial Sequence
  derived and/or modified sequence
atggccacaggactccaggttcccctgccgcagctggccacaggactgctgcttctcctcagtgtccagccctgggctgagagtgggaaggtgctggtggtgcccactgatggcagccactggctcagcatgcgggaggccttgcgggacctccatgcgagaggccaccaggtggtggtcctcaccctggaggtgaatatgtacatcaaagaagagaactttttcaccctgacaacgtatgccatttcatggacccaggacgaatttgatcgccttttgctgggtcacactcaatcgttctttgaaacagaacatcttctgatgaaattttctagaagaatggcaattatgaacaatatgtctttgatcatacataggtcttgtgtggagctactgcataatgaggccctgatcaggcacctgcatgctacttcctttgatgtggttctaacagacccctttcacctctgcgcggcggtgctggctaagtacctgtcgattcctgctgtgtttttcttgaggaacattccatgtgatttagactttaagggcacacagtgtccaaacccttcctcctatattcctagattactaacgaccaattcagaccacatgacattcctgcaaagggtcaagaacatgctctaccctctggccctgtcctacctttgccatgctgtttctgctccttatgcaagccttgcctctgagctttttcagagagaggtgtcagtggtggatcttgtcagccatgcatctgtgtggctgttccgaggggactttgtgatggattaccccaggccgatcatgcccaacatggtcttcattgggggcatcaactgtgccaacgggaagccactatctcaggaatttgaagcctacattaatgcttctggagaacatggaattgtggttttctctttgggatcaatggtctcagaaattccagagaagaaagctatggcaattgctgatgctttgggcaaaatccctcagacagtcctgtggcggtacactggaacccgaccatcgaatcttgcgaacaacacgatacttgttaagtggctaccccaaaacgatctgcttggtcacccgatgacccgtgcctttatcacccatgctggttcccatggtgtttatgaaagcatatgcaatggcgttcccatggtgatgatgcccttgtttggtgatcagatggacaatgcaaagcgcatggagactaagggagctggagtgaccctgaatgttctggaaatgacttctgaagatttagaaaatgctctaaaagcagtcatcaatgacaaaagttacaaggagaacatcatgcgcctctccagccttcacaaggaccgcccggtggagccgctggacctggccgtgttctgggtggagtttgtgatgaggcacaagggcgcgccacacctgcgccccgcagcccacgacctcacctggtaccagtaccattccttggacgtgattggtttcctcttggccgtcgtgctgacagtggccttcatcacctttaaatgttgtgcttatggctaccggaaatgcttggggaaaaaagggcgagttaagaaagcccacaaatccaagacccattgagaagtgggtgggaaataaggtaaaattttgaaccattccctagtcatttccaaacttgaaaacagaatcagtgttaaattcattttattcttattaaggaaatactttgcataaattaatcagccccagagtgctttaaaaaattctcttaaataaaaataatagactcgctagtcagtaaagatatttgaatatgtatcgtgccccctctggtgtctttgatcaggatgacatgtgccatttttcagaggacgtgcagacaggctggcattctagattacttttcttactctgaaacatggcctgtttgggagtgcgggattcaaaggtggtcccacggctgcccctactgcaaatggcagttttaatcttatcttttggcttctgcagatggttgcaattgatccttaaccaataatggtcagtcctcatctctgtcgtgcttcataggtgccaccttgtgtgtttaaagaagggaagctttgtacctttagagtgtaggtgaaatgaatgaatggcttggagtgcactgagaacagcatatgatttcttgctttggggaaaaagaatgatgctatgaaattggtgggtggtgtatttgagaagataatcattgcttatgtcaaatggagctgaatttgataaaaacccaaaatacagctatgaagtgctgggcaagtttactttttttctgatgtttcctacaactaaaaataaattaataaatttatataaattct

SEQ ID NO: 201286 - protein, 336 aa, Artificial Sequence
  derived and/or modified sequence
MARRRSQRVCASGPSMLNSARGAPELLRGTATNAEVSAAAAGATGSEELPPGDRGCRNGGGRGPAATTSSTGVAVGAEHGEDSLSRKPDPEPGRMDHHQPGTGRYQVLLNEEDNSESSAIEQPPTSNPAPQIVQAASSAPALETDSSPPPYSSITVEVPTTSDTEVYGEFYPVPPPYSVATSLPTYDEAEKAKAAAMAAAAAETSQRIQEEECPPRDDFSDADQLRVGNDGIFMLAFFMAFIFNWLGFCLSFCITNTIAGRYGAICGFGLSLIKWILIVRFSDYFTGYFNGQYWLWWIFLVLGLLLFFRGFVNYLKVRNMSESMAAAHRTRYFFLL

SEQ ID NO: 201287 - DNA, 1011 bp, Artificial Sequence
  derived and/or modified sequence
atggctagaaggagatcccagagggtgtgcgcctcagggccatcgatgttgaactctgcccggggggcccccgagctcctgcggggcacagccacaaatgccgaggtgagcgctgccgccgccggggctaccggctcagaggagctcccaccaggagaccgcggctgtagaaatggagggggcagggggcctgccgctacaactagttcgaccggagtggcagtgggggcagaacacggcgaagactcactcagccggaaaccagatccagagcccggccgtatggatcaccatcagcctgggacgggccgctaccaggtgctgctgaacgaggaagataactcagagtccagcgcaatcgagcagccccccacctcaaatcctgcaccccagattgtgcaggctgcctcatctgctccagcactcgagaccgatagcagtccaccaccctattcctctattacagttgaagttcccacaacctcagatacagaggtttacggcgaattctatccagttcctccgccctacagcgtagcaaccagtttgccaacatacgatgaagctgaaaaagccaaagccgcagcaatggcagcagcggctgccgagaccagtcagcgaattcaagaagaggagtgtccgccaagagacgacttctctgacgccgatcaattacgagtgggcaatgacgggattttcatgcttgctttctttatggcttttattttcaattggctaggcttctgcttgagtttctgtattactaacacaatcgccggtcggtatggtgcaatttgtggatttgggctgtccttaatcaaatggatcctcatcgtcagattttccgattactttaccggctattttaacggccaatactggctatggtggatcttcttggtgctgggccttttactgttctttaggggatttgtgaactacttgaaggtcaggaatatgtcagaatcaatggccgctgcccaccgtacacgctacttctttcttctgtag

SEQ ID NO: 201288 - DNA, 1011 bp, Artificial Sequence
  derived and/or modified sequence
atggcccggcggcgcagccagagggtgtgtgccagcggccccagcatgctgaacagcgcccggggggcccctgagctgctgcggggcacagccaccaatgctgaggtgtctgctgctgctgctggggccaccggcagcgaggagctgcccccaggggaccggggctgcagaaatggaggcggccggggccctgctgccaccaccagcagcactggagtggccgtgggcgctgagcacggggaggacagcctgagcaggaagccagaccctgagcccggccgcatggaccaccaccagcccggcaccggccgctaccaggtgctgctgaatgaggaggacaacagcgagagcagcgccatcgagcagccccccaccagcaacccagccccccagatcgtgcaggccgccagcagcgccccagccctggagacagacagcagccccccaccctacagcagcatcaccgtggaggtgcccaccaccagtgacacagaggtgtatggagagttctaccctgtgcccccaccctacagcgtggccaccagcctgcccacctatgatgaagctgagaaggccaaggctgctgccatggctgctgctgctgctgagaccagccagaggatccaggaggaggagtgccccccaagagatgacttcagtgatgctgaccagctgcgggtgggcaatgatggcatcttcatgctggccttcttcatggccttcatcttcaactggctgggcttctgcctgtccttctgcatcaccaacaccatcgccggccgctacggggccatctgtggcttcggcctgagcctcatcaagtggatcctgattgtgcgcttcagtgactacttcaccggctacttcaacggccagtactggctgtggtggatcttcctggtgctgggcctgctgctcttcttccggggctttgtgaactacctgaaggtgaggaacatgtctgagagcatggccgccgcccacaggacccgctacttcttcctgctgtag

SEQ ID NO: 201289 - DNA, 1011 bp, Artificial Sequence
  derived and/or modified sequence
atggcccggcggcggagccagcgggtgtgcgccagcggccccagcatgttaaactctgctaggggtgctccggagctgttgagaggaaccgctaccaatgcagaggtgagcgctgcagcggcgggggcaacaggtagcgaggagttaccacctggcgaccgcggatgcagaaacggcggggggcgcggccccgccgcgaccacttcctctactggcgttgcggtgggggccgagcatggggaggactcactgtcccggaagccagaccctgagcccggtcggatggatcaccaccaaccggggactgggagatatcaggtgttgctgaatgaagaagataattctgagagttccgccattgagcaacctcccacgtccaatcccgcccctcagatcgtccaggccgcctccagcgcccctgccctcgagacagactcgagccctccaccctactccagtatcaccgtggaagtgccaacaacttccgacaccgaagtgtatggtgaattctacccagttccccctccttactccgtggccacttcccttcctacatatgatgaagcagaaaaggcaaaggcggcagcaatggcagcagccgccgcagaaacatcacagcgtatacaggaggaagagtgccctccaagggatgacttctccgacgcggaccagttgcgggttggcaacgatgggatctttatgttagccttcttcatggcgttcatctttaattggctaggattttgtctgtcattttgcataactaacacgatagccgggcgctatggagcgatttgcggattcggactgagcctcattaaatggatcttaatcgtcaggttcagtgactattttacggggtacttcaacggccagtattggctgtggtggatttttttggtgcttgggcttctccttttctttcgtggttttgtgaactacctgaaagtgaggaatatgtcggagtctatggcggccgcccatcgcactcgttatttcttcttgttgtag

SEQ ID NO: 201290 - DNA, 4625 bp, Artificial Sequence
  derived and/or modified sequence
cttacttttccatctcctcccacccagctataccctcccactggcggcgcggatggcacgccggcggagccagcgagtctgcgcgagcggtccgagcatgctcaatagcgcgcgcggcgccccggagcttctccgcggaaccgcgaccaacgcggaggtctcggcggccgctgcgggagccacaggaagtgaagagcttccgccgggagaccgcggctgcaggaacggaggcggaaggggccctgcggcgacgacgtcgtcgacgggggtggccgtgggagctgagcacggagaagactccctctctcggaagccggatcccgagccgggcaggatggatcaccaccagccggggactgggcgctaccaggtgcttcttaatgaagaggataactcagaatcatcggctatagagcagccacctacttcaaacccagcaccgcagattgtgcaggctgcgtcttcagcaccagcacttgaaactgactcttcccctccaccatatagtagtattactgtggaagtacctacaacttcagatacagaagtttacggtgagttttatcccgtgccacctccctatagcgttgctacctctcttcctacatacgatgaagctgagaaggctaaagctgctgcaatggcagctgcagcagcagaaacatctcaaagaattcaggaggaagagtgtccaccaagagatgacttcagtgatgcagaccagctcagagtggggaatgatggcattttcatgctggcatttttcatggcatttattttcaactggcttggattttgtttatccttctgtatcaccaataccatagctggaaggtatggtgctatctgcggatttggcctttccttgatcaaatggatccttattgtcaggttttctgattattttactggatatttcaatggacagtattggctttggtggatatttcttgtacttggcctgctccttttcttcagaggatttgttaattatctaaaagtcagaaacatgtctgaaagtatggcagctgctcatagaacaaggtatttcttcttattgtagagactgcatcaacccgacattcctttcttataccaatgtgaaatttccagatcatctgtaaacctacaactttaatagaagactactaataacagaagacaaattagtgaagaaaagacggagtttcgaaattgaatggcagggtggtttttgcttacaagccatttctgttcattctttaagtatctatatttcatttgttttgcacatatgcatatgtgcccatttaagatatttgcatatacttgatagaaaccataaagttgtagcagttaagtccagtcacatttggttaatcagtgtttgatataattgaaagagttgagtggataaacagtcttccagcttgtaaatgccattgacttctgacctgacatttagtataataaaaatgaaattcttaaccatgtcaaatgatttagtttctggctcttagactcatctggcagttctacacatgaaacatcttttgttatataaggtgtattgaaacctgcagtgctgattattagaaaggatttgtcagatttttgaacatgatatttacattattatttaggaaaactcttcctgtaaataaccatgcataacttactttctgcaatgttttcttagaaattgtgtccagatagctttcactaattttaaattaagtgaactaaatatatatgtgtatatgtatacacatatatatacacacacacatatatatatttagaaacgtgagtgttaaagatagaatttgttttaggacaaattttaagaaaatgtgggaataccaaatgtcctttataagaaaaataaattttattttaagggacatactagttttagggattttcagatgggaagctgcatttttaggattgcccatcttaagagatcttgcaggaagagattgtattagatattatatttatttcatttaagataattttcaaagttaattttctaaataagataattctcatttgtgtttgtcttttaaaaggccaataaaatatctttcagtatcattgtaataattttttagagtttaatttgtaaagcttagcaaataaaatcttgtactatgaatagcttcttgctttatgactttaggattaacttgtaaaaaacatatcctgaactgagatatgcaaaatactcattttcaagttatggaaatgtgtttgtggcatataggactgtggggtctgtgtgtgtagtgagagtgtgtagccactattataactggaatttaatttacattcataaactactatatttcccatcttgcaaatcattttatgtctcatctgtttttcctttcggttatatctttggttttgaataccaacatttaaaatgatggtattttatcttttaaacttaaaaattatttaatacagctatatggaccttataaaattgatttcttatttattattagacattactactaaaaggtacatctaactattcagggacatttttccatttccaaaaaataaaatttattatgctttataacctcttctgtattttctaattttttcattgtctttgataaataaaacagttttgttttgctaatatagcctattttttgttttgtctcattcagtttactttcctgcgtagaatttttattgttatattaaaatttttattgttgtattaaagtacctgtgttacaccccttgaagtaagacagtagcatggggtaaagaaaaaatatttagtttagttgcctaatttggaagttaattaaaattaaactgtactaataacatattcaaactcatgctggatctctttcatattaatttcttatagacctgtactttattctttcaataatttttaaatgaaattaagctttgctacatggtaattaaataattactaggaagcttagctatcaaacatcgacttactaaaatttcattttagcttttatggtatatgtgcttgttttctgaatatggatacatgttacttttgatccagcatcaaaacttcactttttgttttgacttttccccccaaatctgtaaggttcaagtatacatattactgaatcctctataattggcataattcaatggtagccttaaatctcatcatgtaagcaggggaatcagaatgttattttcaagaacttaatgttcccttcagatatataaaatcctgcatacttcatttcctgtgagcttgaacagctgctgttgtgttttggggatgcttgatcatctttgcactctgccttaaagattgaaaaatcaaaactcttgttagggtatctaaacatttttgagtgtgaactggggattggaagttaatacaaaaaaatttcaaattatttctattgtaaatgaataagctagtcatggctaggataatccattttcatgtatttatgcaataaactgaattttaaggcaaaaacaacacttttctatatagtgtatgcaggacagattttagaaacttagattaaaatacaaatcccattacatttggttaaaatgaaaatctctgcttaatggaaaaaatactaatctttagcctattttgagtctataagatatatttcattttagacatgccttctaagttgttcacagatttttacctgctaaaacaatattatttccagtaaaacctctcctaacaggaaaagtggagttcaaaatatccaattggagaaaaattcagagttccttcattaaatataatttttttcatctagtatgtactatttcaagaagtgcaaaaagtaatgatagtgaatgtgataccatacttaactaaggtaatatatatccttagtttgctcaaaagagtcctggttattcctgttttctcagcttaatagtgcctcatcgtactctcaaaagtgttctaatttggaggataagttatatgatcatcctgtgtataattgtagactgtaccaagaagcaactaccttagctccactgccctttgagggatggaactggggtaagggcaggagccagttattattgccacagtgttttctaatgaaccatttggcctgtagaagaggaatagtattttttttaatagttgtatttgaatgattccagcttatcgtaaatactaaactgaatggcttttatatttttaactgctgttaaatgttattttagcatttattagttgtttattatttaattcttcaaatagtcatatgaaaacatatatttgataaaggtcaattgttagatgataatgtgccattcattatcataggaatgtccttgcccatatataaaacatgctggcatgtattttacttgttaataaagttgtatagatgtggaagtgtgaacctgtgatgcatccttttcaaaatcagtttaagattcgcatattatcatgactgtgacctcactaaactgtttatgtgacaaacctttcaagattggagatgaaaacaacacttgtgaaattaggttggggttgcaacatcttttaacttctcagttatttgtatgtcaggagacagattgtggtttaattttaataaacaaaatatcatctttttgaaaat

SEQ ID NO: 201291 - DNA, 1011 bp, Artificial Sequence
  derived and/or modified sequence
atggccagacgcagatcccaacgggtgtgtgcctccggcccaagcatgttgaacagcgccagaggtgccccagagcttctgcggggtacagcgaccaacgctgaggtctccgccgctgccgctggggctacggggtcagaggagctcccacctggggatagagggtgccgtaacggaggcggacgcggacccgctgcgactaccagttccacgggcgtggccgtcggtgcagaacacggcgaagactccttgtccaggaagccggatcctgaaccagggaggatggatcaccatcagcctggcacgggcagatatcaagtgctcctgaatgaggaagacaattccgagtccagcgccatcgaacagcctcccaccagtaatcctgctccacagattgtccaagccgcttcatccgcacccgcactggagaccgatagcagcccaccaccctatagttccatcacggttgaggtgcctaccactagtgacactgaagtctacggagaattttatccggtaccacccccttacagcgtggctacaagcctccctacttatgacgaggcagaaaaagccaaagctgctgccatggctgctgcagcagcggagacctctcaacgaatccaggaggaggaatgcccaccaagagatgattttagcgatgctgatcagctccgagttgggaatgatgggatttttatgctcgcatttttcatggcattcatttttaattggcttggcttttgtctgagtttttgtatcacgaacacaatcgccggtagatacggtgccatttgcggctttggattgtccctcattaagtggattctgatcgtgagattctcggattacttcaccggatatttcaacgggcagtactggctctggtggatttttctggtcttgggacttctgctgttctttcggggattcgtgaactacctcaaagtgagaaacatgtcagaaagtatggcagctgcgcataggacacgctacttctttctgttgtag

SEQ ID NO: 201292 - DNA, 1011 bp, Artificial Sequence
  derived and/or modified sequence
atggccagaagaagaagccagagagtgtgcgccagcggccccagcatgctgaacagcgccagaggcgcccccgagctgctgagaggcaccgccaccaacgccgaggtgagcgccgccgccgccggcgccaccggcagcgaggagctgccccccggcgacagaggctgcagaaacggcggcggcagaggccccgccgccaccaccagcagcaccggcgtggccgtgggcgccgagcacggcgaggacagcctgagcagaaagcccgaccccgagcccggcagaatggaccaccaccagcccggcaccggcagataccaggtgctgctgaacgaggaggacaacagcgagagcagcgccatcgagcagccccccaccagcaaccccgccccccagatcgtgcaggccgccagcagcgcccccgccctggagaccgacagcagcccccccccctacagcagcatcaccgtggaggtgcccaccaccagcgacaccgaggtgtacggcgagttctaccccgtgccccccccctacagcgtggccaccagcctgcccacctacgacgaggccgagaaggccaaggccgccgccatggccgccgccgccgccgagaccagccagagaatccaggaggaggagtgcccccccagagacgacttcagcgacgccgaccagctgagagtgggcaacgacggcatcttcatgctggccttcttcatggccttcatcttcaactggctgggcttctgcctgagcttctgcatcaccaacaccatcgccggcagatacggcgccatctgcggcttcggcctgagcctgatcaagtggatcctgatcgtgagattcagcgactacttcaccggctacttcaacggccagtactggctgtggtggatcttcctggtgctgggcctgctgctgttcttcagaggcttcgtgaactacctgaaggtgagaaacatgagcgagagcatggccgccgcccacagaaccagatacttcttcctgctgtag

SEQ ID NO: 201293 - protein, 547 aa, Artificial Sequence
  derived and/or modified sequence
MEDSEALGFEHMGLDPRLLQAVTDLGWSRPTLIQEKAIPLALEGKDLLARARTGSGKTAAYAIPMLQLLLHRKATGPVVEQAVRGLVLVPTKELARQAQSMIQQLATYCARDVRVANVSAAEDSVSQRAVLMEKPDVVVGTPSRILSHLQQDSLKLRDSLELLVVDEADLLFSFGFEEELKSLLCHLPRIYQAFLMSATFNEDVQALKELILHNPVTLKLQESQLPGPDQLQQFQVVCETEEDKFLLLYALLKLSLIRGKSLLFVNTLERSYRLRLFLEQFSIPTCVLNGELPLRSRCHIISQFNQGFYDCVIATDAEVLGAPVKGKRRGRGPKGDKASDPEAGVARGIDFHHVSAVLNFDLPPTPEAYIHRAGRTARANNPGIVLTFVLPTEQFHLGKIEELLSGENRGPILLPYQFRMEEIEGFRYRCRDAMRSVTKQAIREARLKEIKEELLHSEKLKTYFEDNPRDLQLLRHDLPLHPAVVKPHLGHVPDYLVPPALRGLVRPHKKRKKLSSSCRKAKRAKSQNPLRSFKHKGKKFRPTAKPS

SEQ ID NO: 201294 - DNA, 1644 bp, Artificial Sequence
  derived and/or modified sequence
atggaagactcagaggccctgggattcgagcacatgggactcgacccaagactcctgcaggccgtaaccgacctgggatggtcaagacctacgctcatccaggagaaggccattcccctggcactcgaaggcaaggacctgcttgctcgcgctcggactgggtcgggcaaaaccgcggcgtacgctatccctatgctgcaactgctgttgcataggaaagccactggccctgtggtggagcaggctgtgcgaggcttggtgctggtgccgacaaaggagctcgctcgccaagcgcagtccatgatccaacagctggcaacatactgcgctcgtgacgtgcgtgtggcgaatgttagcgccgcggaggacagcgtcagccagagggcggttctaatggaaaaacccgacgtagttgtcggaacaccctcccgcattctgtctcatctccaacaagacagtctgaagctcagagattcactcgaactcctggtcgtggatgaagcagatttgctctttagtttcggcttcgaggaagagctcaaatcgctgttgtgccacctgcctagaatttatcaggccttcttaatgtctgctactttcaacgaggacgtgcaagcactgaaagaacttatcctacataatccagtgaccctgaaactacaggagtcccaacttccaggccctgatcagttgcagcagtttcaggttgtttgcgaaacagaggaggataagttcctgctgctctacgccctattgaaattgtctctaatacgcggtaagtcgctgttattcgtgaacacccttgaacgctcatatagattgagattgtttctagaacagttcagtatcccgacttgcgttctcaatggcgagcttccactgaggtcccggtgccatatcattagtcagttcaatcaagggttttacgattgtgtaattgccacagacgccgaagtcctgggagctcctgtgaaaggcaaaaggcgcgggcggggacctaagggggataaagcctccgaccccgaggccggagtcgctcggggtatcgactttcatcacgtgtcagccgtgttgaattttgatctacccccaactccggaggcttatatccaccgggctggacggaccgcacgcgccaacaatccaggcattgtacttaccttcgtactacccactgaacagttccacctcgggaagatcgaggaactcctgagcggggagaatagaggccctatcctgctcccatatcagttccggatggaggaaatcgagggatttagatatcggtgtcgcgatgcaatgaggagtgttacaaaacaggctattcgggaggcccgactgaaagaaatcaaagaagagctacttcattccgaaaagttgaaaacttatttcgaggacaacccccgcgatctgcagttgctgaggcacgatctaccactccatcccgccgtggtgaagccccacttgggccacgtgcccgactacttggtcccccccgctctccgggggctggtccgaccccataagaagaggaagaaactaagctcttcatgccgcaaagccaagagggccaagtcacaaaacccactccgcagtttcaagcataaggggaaaaaatttaggccaaccgccaagccttcatag

SEQ ID NO: 201295 - DNA, 1644 bp, Artificial Sequence
  derived and/or modified sequence
atggaggacagcgaggccctgggctttgagcacatgggcctggacccccggctgctgcaggccgtgacagacctgggctggagccggcccaccctcatccaggagaaggccatccccctggccctggagggcaaggacctgctggcccgggccaggactggaagtggcaagacagctgcctatgccatccccatgctgcagctgctgctgcacaggaaggccactggacctgtggtggagcaggccgtgcggggcctggtgctggtgcccaccaaggagctggcccggcaggcccagagcatgatccagcagctggccacctactgtgccagagatgtgcgggtggccaacgtgtctgctgctgaggacagcgtgtcccagagagctgtgctgatggagaagccagatgtggtggtgggcacccccagccgcatcctgagccacctgcagcaggacagcctgaagctgcgggacagcctggagctgctggtggtggatgaggccgacctgctcttctcctttggatttgaggaggagctgaagagcctgctgtgccacctgccccgcatctaccaggccttcctgatgtctgccaccttcaatgaagatgtgcaggccctgaaggagctgatcctgcacaaccctgtgaccctgaagctgcaggagagccagctgcccggccctgaccagctgcagcagttccaggtggtgtgtgaaacagaggaggacaagttcctgctgctgtatgccctgctgaagctgagcctcatccggggcaagagcctgctgtttgtgaacaccctggagaggagctaccgcctgcggctcttcctggagcagttcagcatccccacctgtgtgctgaatggagagctgcccctgcggagccgctgccacatcatcagccagttcaaccagggcttctatgactgtgtgattgccacagatgctgaggtgctgggcgcccctgtgaagggcaagaggcggggccggggccccaagggggacaaggccagtgaccctgaggccggcgtggcccggggcatcgacttccaccacgtgtctgctgtgctgaactttgacctgccccccaccccagaggcctacatccacagagctggccgcacagcccgggccaacaaccctggcatcgtgctgacctttgtgctgcccacagagcagttccacctgggcaagattgaggagctgctgtctggagaaaatagaggccccatcctgctgccctaccagttcaggatggaggagattgagggcttccgctaccgctgcagagatgccatgaggtctgtgaccaagcaggccatccgggaggcccggctgaaggagatcaaggaggagctgctgcacagcgagaagctgaagacctactttgaggacaacccccgggacctgcagctgctgcggcatgacctgcccctgcaccctgctgtggtgaagccccacctgggccacgtgcctgactacctggtgcccccagccctgcggggcctggtgcggccccacaagaagaggaagaagctgagcagcagctgcaggaaggccaagagggccaagagccagaaccccctgcggagcttcaagcacaagggcaagaagttccggcccacagccaagcccagctag

SEQ ID NO: 201296 - DNA, 1644 bp, Artificial Sequence
  derived and/or modified sequence
atggaggacagcgaggccctgggcttcgagcacatgggcctggacccccgcctcctgcaggccgtgacagacttaggctggtctcggcctactcttattcaggaaaaggcaattcccctggctctggaggggaaggacttgctggctcgggcccgcacaggctcaggaaaaaccgctgcatacgcaattcctatgctgcagcttctgctccacagaaaagctacaggccctgtggttgagcaggccgtgcggggacttgttctcgtcccgacaaaagagctggctagacaggcacaatctatgatccagcagctcgccacgtattgtgctcgcgatgtgagggtggcaaacgtctcagctgcggaagactcggtttcacagagggcggtgcttatggagaagccagatgtcgtcgtgggtactccatcaaggattctgagccaccttcagcaagacagcctgaaacttcgcgactcccttgagttgctggtcgtagatgaggctgacctgctattctcctttggctttgaagaagaactgaagtcactgctgtgccacttgcccaggatctaccaagcgtttttaatgtcagccacattcaatgaggatgtgcaagctcttaaagaattaatccttcataatccggtgactctgaaactgcaggagtcacaattacctggccccgaccaattgcagcagttccaggtggtgtgcgagaccgaagaggataaattcctgttattgtacgctctcttgaagctcagcctgattagaggaaaaagcctgttgtttgtgaatactctggagcggagctaccgcctgaggctgttcctcgagcagttctccatacctacctgcgtcttgaatggcgagctcccccttcgatcacgctgccatatcatctcccagtttaaccagggcttttacgactgtgtgattgccacggatgctgaagtcctgggtgctcccgtgaagggcaagcgtcgcggaagagggcctaaaggcgacaaggcgtccgaccctgaagcaggtgtagctcggggtattgattttcaccatgtgtctgccgtactcaattttgatctcccgccgacccccgaggcgtacattcacagggcaggcaggacagcgagggcaaacaaccctggcatcgtgctcaccttcgtcctgcctacagagcagtttcatctgggcaagatagaagaattgctgtcaggggaaaaccggggcccaatcctactgccttaccagtttcgcatggaagaaatagagggcttcagatatagatgtcgggatgctatgcggagcgtgacaaagcaggcaattagagaagcacggctaaaagaaattaaggaagaactcctgcactccgaaaaactcaaaacctattttgaggataacccacgcgatctgcagctcttgaggcacgatctgcccctgcatccagcagtagtgaagccccatctcggacacgtacccgattacctggtgccccctgcgctccgggggctggttcgcccacataagaaaaggaaaaagctgagctcttcctgccgaaaggctaagcgggcaaaaagtcagaacccacttaggtccttcaagcataaggggaaaaagttccggcctacagccaagcctagttag

SEQ ID NO: 201297 - DNA, 1644 bp, Artificial Sequence
  derived and/or modified sequence
atggaggattctgaggcattggggtttgagcacatgggcctggacccacgcctgctgcaggcggtgacagaccttggttggtcccgccctacgttaattcaagaaaaagctattccgctggcactagaggggaaagacctgctggccagagcacggacaggcagcggaaagacagccgcttatgcgatccccatgctccagctgcttctacaccgcaaagctactggccctgtcgtcgagcaggcagtgagggggctggtgctggtccctacaaaagagctggcaagacaggcccaatccatgatccagcagctcgctacatattgtgcccgagacgttagggtcgcaaacgtgagcgcagctgaagattccgtgtcccagcgggcagtgctcatggagaagccagatgtcgtcgtcggtaccccttccaggatattaagtcatttacagcaggatagccttaaattaagagacagtctggagctgttagtggtagatgaggcagaccttctatttagcttcggctttgaggaagagttaaaaagtttgctgtgccatctccccagaatttaccaagctttccttatgtcagcaacatttaatgaagatgtgcaggccctcaaggagctcatcctgcacaatccagtgacactgaagcttcaggagtctcaactgccaggaccggaccagctacagcagtttcaggttgtctgtgagaccgaggaagacaaattccttctgctgtacgccctgctgaaactgagtttgatccgcggaaaatctctgctgtttgtcaacacgctggaaaggtcctaccgcctgaggctgttccttgagcaattcagtattcctacatgtgttttaaacggggagcttcccctccggtcacgctgtcatataatttctcagttcaaccagggtttttatgactgcgttatcgccacggacgccgaagtcctgggagcacccgtaaaagggaaacgcaggggacgtggtcccaaaggtgataaggccagtgaccctgaagccggtgtcgccagggggatcgatttccaccacgtgagcgcagtacttaactttgacctccctccgactccagaagcttacattcacagggctggacgtacagcacgggctaataatcccggtatcgtgctgactttcgtattacccaccgaacagttccatctaggtaagatcgaagaactcctgtccggcgagaaccgcggtcctatccttttgccttatcagttcagaatggaggagattgaaggtttcaggtaccggtgtcgagacgccatgagatctgtaaccaaacaggcaataagagaagccagactgaaagaaatcaaggaggaactcctccattcagagaagctgaaaacctattttgaagacaacccaagggacctgcagttgttacggcacgacctgccattacaccccgctgttgtaaaaccacacttgggtcacgttcctgactatctggtgccacctgccctcagaggcctcgttcgcccacacaaaaaacgaaagaaactttcatcaagctgccgaaaggccaagagagctaaatcacagaaccccttgcggtcttttaagcataaggggaaaaaattcagacctacagctaagccttcttag

SEQ ID NO: 201298 - DNA, 2336 bp, Artificial Sequence
  derived and/or modified sequence
ccgggaagtgacttcgtctccgaagccgattggttgttgctttgctcccgctcgcgtcggtggcgtttttcctgcagcgcgtgcgtgctgcgctactgagcagcgccatggaggactctgaagcactgggcttcgaacacatgggcctcgatccccggctccttcaggctgtcaccgatctgggctggtcgcgacctacgctgatccaggagaaggccatcccactggccctagaagggaaggacctcctggctcgggcccgcacgggctccgggaagacggccgcttatgctattccgatgctgcagctgttgctccataggaaggcgacaggtccggtggtagaacaggcagtgagaggccttgttcttgttcctaccaaggagctggcacggcaagcacagtccatgattcagcagctggctacctactgtgctcgggatgtccgagtggccaatgtctcagctgctgaagactcagtctctcagagagctgtgctgatggagaagccagatgtggtagtagggaccccatctcgcatattaagccacttgcagcaagacagcctgaaacttcgtgactccctggagcttttggtggtggacgaagctgaccttcttttttcctttggctttgaagaagagctcaagagtctcctctgtcacttgccccggatttaccaggcttttctcatgtcagctacttttaacgaggacgtacaagcactcaaggagctgatattacataacccggttacccttaagttacaggagtcccagctgcctgggccagaccagttacagcagtttcaggtggtctgtgagactgaggaagacaaattcctcctgctgtatgccctgctcaagctgtcattgattcggggcaagtctctgctctttgtcaacactctagaacggagttaccggctacgcctgttcttggaacagttcagcatccccacctgtgtgctcaatggagagcttccactgcgctccaggtgccacatcatctcacagttcaaccaaggcttctacgactgtgtcatagcaactgatgctgaagtcctgggggccccagtcaagggcaagcgtcggggccgagggcccaaaggggacaaggcctctgatccggaagcaggtgtggcccggggcatagacttccaccatgtgtctgctgtgctcaactttgatcttcccccaacccctgaggcctacatccatcgagctggcaggacagcacgcgctaacaacccaggcatagtcttaacctttgtgcttcccacggagcagttccacttaggcaagattgaggagcttctcagtggagagaacaggggccccattctgctcccctaccagttccggatggaggagatcgagggcttccgctatcgctgcagggatgccatgcgctcagtgactaagcaggccattcgggaggcaagattgaaggagatcaaggaagagcttctgcattctgagaagcttaagacatactttgaagacaaccctagggacctccagctgctgcggcatgacctacctttgcaccccgcagtggtgaagccccacctgggccatgttcctgactacctggttcctcctgctctccgtggcctggtgcgccctcacaagaagcggaagaagctgtcttcctcttgtaggaaggccaagagagcaaagtcccagaacccactgcgcagcttcaagcacaaaggaaagaaattcagacccacagccaagccctcctgaggttgttgggcctctctggagctgagcacattgtggagcacaggcttacacccttcgtggacaggcgaggctctggtgcttactgcacagcctgaacagacagttctggggccggcagtgctgggccctttagctccttggcacttccaagctggcatcttgccccttgacaacagaataaaaattttagctgccccagtttgtgcctccagcatatgaaaaggactatttgaatccccaaaacatcaggagtcgggaaacttcggaagacagctgtgcctggctctgtggctgcatgcagtgcttcacttggccagcagaggtcagctgtgccgagctgccccagccatgagaagagaagcctgcccttgctggcaggtggctatggccggcccagagccttcctgcccagctcctgcagccctgctgcctgggatcaggctgggagatgggccttcctgaccgccagccttcctctccccgagcacacgcacatgtagattcggggggaagctgcctgctcttccttagaggagccggggcagctatctgctggtccctttctgaacaactgttgatgtgtga

SEQ ID NO: 201299 - DNA, 1644 bp, Artificial Sequence
  derived and/or modified sequence
atggaggacagcgaggccctgggcttcgagcacatgggcctggaccccagactgctgcaggccgtgaccgacctgggctggagcagacccaccctgatccaggagaaggccatccccctggccctggagggcaaggacctgctggccagagccagaaccggcagcggcaagaccgccgcctacgccatccccatgctgcagctgctgctgcacagaaaggccaccggccccgtggtggagcaggccgtgagaggcctggtgctggtgcccaccaaggagctggccagacaggcccagagcatgatccagcagctggccacctactgcgccagagacgtgagagtggccaacgtgagcgccgccgaggacagcgtgagccagagagccgtgctgatggagaagcccgacgtggtggtgggcacccccagcagaatcctgagccacctgcagcaggacagcctgaagctgagagacagcctggagctgctggtggtggacgaggccgacctgctgttcagcttcggcttcgaggaggagctgaagagcctgctgtgccacctgcccagaatctaccaggccttcctgatgagcgccaccttcaacgaggacgtgcaggccctgaaggagctgatcctgcacaaccccgtgaccctgaagctgcaggagagccagctgcccggccccgaccagctgcagcagttccaggtggtgtgcgagaccgaggaggacaagttcctgctgctgtacgccctgctgaagctgagcctgatcagaggcaagagcctgctgttcgtgaacaccctggagagaagctacagactgagactgttcctggagcagttcagcatccccacctgcgtgctgaacggcgagctgcccctgagaagcagatgccacatcatcagccagttcaaccagggcttctacgactgcgtgatcgccaccgacgccgaggtgctgggcgcccccgtgaagggcaagagaagaggcagaggccccaagggcgacaaggccagcgaccccgaggccggcgtggccagaggcatcgacttccaccacgtgagcgccgtgctgaacttcgacctgccccccacccccgaggcctacatccacagagccggcagaaccgccagagccaacaaccccggcatcgtgctgaccttcgtgctgcccaccgagcagttccacctgggcaagatcgaggagctgctgagcggcgagaacagaggccccatcctgctgccctaccagttcagaatggaggagatcgagggcttcagatacagatgcagagacgccatgagaagcgtgaccaagcaggccatcagagaggccagactgaaggagatcaaggaggagctgctgcacagcgagaagctgaagacctacttcgaggacaaccccagagacctgcagctgctgagacacgacctgcccctgcaccccgccgtggtgaagccccacctgggccacgtgcccgactacctggtgccccccgccctgagaggcctggtgagaccccacaagaagagaaagaagctgagcagcagctgcagaaaggccaagagagccaagagccagaaccccctgagaagcttcaagcacaagggcaagaagttcagacccaccgccaagcccagctag

SEQ ID NO: 201300 - protein, 372 aa, Artificial Sequence
  derived and/or modified sequence
MELEGQWWRGQLAADIHQALRYKELKLPSYKGQSPQLSLRRYFADLIAIVSNRFTLCPSARHLAVYLLDLFMDRYDISIQQLHLVALSCLLLASKFEEKEDSVPKLEQLNSLGCMTNMNLVLTKQNLLHMELLLLETFQWNLCLPTAAHFIEYYLSEAVHETDLHDGWPMICLEKTKLYMAKYADYFLEVSLQVAAACVASSRIILRLSPTWPTRLHRLTAYSWDFLVQCIERLLIAHDNDVKEANKQRGQAGPQSAQLSVFQTASQPSRPVHFQQPQYLHQTHQTSLQYRHPTSEQPSCQQIVSTTHTSSYTLQTCPAGFQTSVQGLGHMQTGVGMSLAIPVEVKPCLSVSYNRSYQINEHYPCITPCFER

SEQ ID NO: 201301 - DNA, 1119 bp, Artificial Sequence
  derived and/or modified sequence
atggagctggaaggacagtggtggaggggacagctcgcagccgacattcatcaggcccttagatacaaagagctgaagctgcccagctacaaaggccagagccctcagctgagtttgcggaggtacttcgcagatctgattgccatcgtatctaatagattcacactgtgtcccagcgcccgacaccttgccgtgtatctattagacctgtttatggatcgctatgacatcagtattcagcagctccatctggtcgccctctcatgcctgctccttgcgtcgaagtttgaggagaaggaagatagcgtcccgaagctggaacaattgaatagtctcggctgcatgacaaacatgaatctggttctgactaagcagaatctcctgcacatggaactcctgctccttgagactttccaatggaacctgtgtctcccaaccgctgctcactttatcgagtattatctgtccgaggccgtacacgaaacggacttgcacgacggatggcctatgatttgcctggagaagactaagctctacatggctaaatatgccgactacttcctggaggtgtcgctgcaggtcgccgccgcctgtgtcgcctctagtagaatcatactgcggctgtctcctacctggccaacacgcctccacagattgacagcatattcttgggactttctggtacaatgtattgagagactgctgattgcgcatgataacgatgtaaaagaagccaataagcaaagaggccaggccggacctcagtctgcgcagctttcagtgtttcagaccgctagtcagccttcccggcccgttcactttcagcagccccagtatcttcaccaaacccaccagactagtctgcagtaccggcaccctacaagcgagcagccctcatgtcagcagattgtgtctacgacccacaccagctcctacacactgcagacgtgtcccgcaggattccagacaagtgtgcaaggactgggccacatgcagacaggcgtcggcatgtcccttgccattcccgtagaagttaagccctgcctttccgttagctacaatcgaagttaccaaattaatgagcattatccttgtatcacaccatgctttgagcgatag

SEQ ID NO: 201302 - DNA, 1119 bp, Artificial Sequence
  derived and/or modified sequence
atggagttagagggccagtggtggcgcggacagctggccgcggacatccatcaggcccttcgttataaggaacttaagctacctagttataaagggcagtctccacagctttcactgaggcgatacttcgctgacctgatagccattgtgtcaaatagatttactctatgcccctctgcccgtcatctggcggtgtatctgctagacctgttcatggataggtacgatataagcatccagcagctccatctggtggccctgtcgtgtctgttattggcttcgaaatttgaagaaaaagaggactccgttcctaagttggagcaactcaactcacttgggtgtatgactaacatgaatctggtgctcacgaagcagaatctgctgcatatggaactgctcctccttgagacgtttcagtggaacctgtgcttgcctaccgcagctcacttcatcgaatattatctgagcgaggccgtccacgagacggacctacacgatggatggcctatgatatgtctggagaagacaaagctctacatggcgaagtacgctgattattttctagaagtaagcctacaggtcgctgctgcatgtgtcgctagctcgcgcattatactgcggctctctcctacttggcctacccggctccatcggctgaccgcctactcatgggatttcctcgtccaatgtatagaacggctcctcattgctcatgacaatgatgtgaaggaagctaataaacagcgtggacaggctggaccccagtcagcccaattatctgtctttcaaacagcatcccagccttccagaccggttcacttccagcagcctcagtacctgcaccagacacatcagacatcgttgcagtatcggcaccctacgtctgagcaacccagttgtcagcagatcgtgagtacaacccacactagttcctacacattgcagacctgccccgcaggatttcagacttctgtgcagggcctagggcacatgcagacaggggttgggatgtctcttgcgattcctgtggaggttaaaccctgcttgagtgtgtcctacaaccgctcataccaaattaatgaacactacccttgcatcaccccttgttttgagagatag

SEQ ID NO: 201303 - DNA, 1119 bp, Artificial Sequence
  derived and/or modified sequence
atggagctggagggccagtggtggaggggccagctggccgctgacatccaccaggccctgcgctacaaggagctgaagctgcccagctacaagggccagagcccccagctgagcctgcggcgctactttgctgacctgattgccatcgtgagcaaccgcttcaccctgtgccccagcgcccggcacctggccgtgtacctgctggacctcttcatggacagatatgacatcagcatccagcagctgcacctggtggccctgagctgcctgctgctggccagcaagtttgaggagaaggaggacagcgtgcccaagctggagcagctgaacagcctgggctgcatgaccaacatgaacctggtgctgaccaagcagaacctgctgcacatggagctgctgctgctggagaccttccagtggaacctgtgcctgcccacagctgcccacttcatcgagtactacctgtctgaggccgtgcatgaaacagacctgcatgatggctggcccatgatctgcctggagaagaccaagctgtacatggccaagtatgctgactacttcctggaggtgtccctgcaggtggccgccgcctgtgtggccagcagccgcatcatcctgcggctgagccccacctggcccacccggctgcaccggctgacagcctacagctgggacttcctggtgcagtgcatcgagcggctgctgattgcccatgacaatgatgtgaaggaggccaacaagcagaggggccaggccggcccccagagcgcccagctgagcgtcttccagacagccagccagcccagcaggcctgtgcacttccagcagccccagtacctgcaccagacccaccagaccagcctgcagtaccgccaccccaccagcgagcagcccagctgccagcagatcgtgtccaccacccacaccagcagctacaccctgcagacctgcccagctggcttccagacctctgtgcagggcctgggccacatgcagacaggagtgggcatgagcctggccatccctgtggaggtgaagccctgcctgtctgtgtcctacaacagaagctaccagatcaatgagcactacccctgcatcaccccctgctttgagaggtag

SEQ ID NO: 201304 - DNA, 1119 bp, Artificial Sequence
  derived and/or modified sequence
atggagctggagggccagtggtggcggggccagctggccgccgacatccatcaggcactgcgctacaaagagctgaagctgccaagttataagggacagtccccacagctgtcgctgcgtcggtattttgctgacctgatcgccatcgttagcaatcgcttcaccctgtgcccctcggcacgtcacctggccgtgtatttgctcgaccttttcatggatcgttacgatattagcatccagcagcttcaccttgtcgctctgtcctgcctgttgctcgcatctaagttcgaagagaaagaagattcagtgccaaagctggagcagctgaacagcttaggctgtatgacaaacatgaacttggtactgacaaagcagaacctactccacatggagttgttgcttctggagacattccagtggaatctgtgcctcccaacggcggcgcattttatcgaatattacctgtccgaagccgtacacgaaaccgacctccacgatggatggccaatgatttgcctcgaaaagaccaagctgtatatggcaaagtacgcagattattttctggaagttagcctgcaagtggccgccgcttgcgttgcaagcagtcgaataattctacgtctgagtccaacatggcctacgaggctgcacagactgaccgcatactcctgggatttcctggttcagtgcatcgaacgcctgcttatcgcgcacgacaatgacgtcaaggaggcgaataagcagaggggacaggccggaccccagagtgcccagctgagcgtgttccagacggccagtcagccatctcgccccgttcattttcagcagccacagtatctccaccagactcaccagacatctttacaataccgacacccaacatccgagcagcctagctgccaacaaatcgtctctactacccataccagcagttatacccttcagacatgtccggccggatttcagacctccgtccaaggccttggccacatgcaaaccggtgtcggcatgtcgctcgcgattcctgtggaggtcaaaccatgcctctctgtgagttataatagaagctatcaaattaacgaacactatccatgtatcaccccctgcttcgagcgatag

SEQ ID NO: 201305 - DNA, 1119 bp, Artificial Sequence
  derived and/or modified sequence
atggagctggagggccagtggtggcggggccagctggccgccgacattcatcaggcgctgcggtataaggaacttaaactgccaagctataagggtcaaagcccacaactgtccctgaggaggtacttcgcagacctgattgctatcgtgtcgaatcggttcactctatgtcccagcgcgaggcacctggcagtgtatttactcgacttattcatggatcggtacgatatcagtatccaacagctccatctggtggcgctgtcttgcttgctgcttgcaagtaagtttgaagagaaggaggatagcgtgcccaaactggagcagttgaacagcctgggttgcatgaccaatatgaatctggtgctgacaaagcagaacttgttgcatatggaacttttgttgctcgagaccttccagtggaacctgtgtctacccaccgccgcccatttcatagagtattatctgtctgaagctgtgcacgagaccgatttacatgacgggtggcccatgatttgtctggaaaaaacgaaactgtacatggccaaatacgcagactacttcctcgaggtgagcttgcaggttgccgccgcctgcgtcgcctcaagccggatcatcctgagactgtccccgacatggcctacacgcctgcatcgcctcacagcctattcctgggatttccttgtgcaatgtatagaaaggctgctgattgcgcatgacaacgatgtgaaagaggcaaataagcaaaggggacaggccggcccccagagcgcccagctaagcgtctttcagactgcaagtcagcccagtaggcccgtccattttcagcagccccagtatctacaccagactcatcagacctctctgcagtacagacatccaacctctgaacagccctcctgtcaacagattgttagcaccacccacacttcaagctacacattgcagacttgcccagccggctttcagacctccgtgcaaggtttgggccatatgcagacaggagtcggcatgagcctcgccattcctgttgaggttaagccctgcctgtccgtgtcatacaaccgttcgtaccagatcaacgaacactacccatgcatcacgccgtgtttcgagaggtag

SEQ ID NO: 201306 - DNA, 1119 bp, Artificial Sequence
  derived and/or modified sequence
atggaacttgagggccagtggtggaggggccaacttgcagccgacatacatcaagctttaagatataaggaactgaaactcccaagttataaggggcaatccccacagctgtctctgcgtcgttattttgctgatctgattgccattgtcagcaatcgtttcactctttgcccatcagctcgccacctggcagtataccttcttgatttgtttatggaccgatatgacattagtatccaacagttgcatctagttgcgctgtcttgcctcttgttagccagcaagtttgaggagaaggaggactctgtccccaaactggagcagttaaattctttgggatgcatgaccaatatgaacttagttttgactaagcagaacctgctccatatggagttactcctgctagaaacttttcaatggaacttatgcctgccaaccgccgcacacttcatagagtattacctgtcggaggctgtgcacgaaaccgacctgcacgacggctggccgatgatttgtctggaaaagactaaactatacatggcaaaatacgccgactattttttagaggtttcattgcaagtggctgccgcttgtgtggcatctagtaggatcatcctccgactaagtcccacctggcccacgcgcctgcaccgcctgacagcgtacagctgggatttcctcgtgcagtgtattgaacggctgctgatcgcccatgacaatgatgtcaaagaggccaacaagcaaaggggccaggccggaccccaatccgcccaactttccgtgttccagactgcttctcagccaagtcgtccagttcattttcagcagccccagtatctgcaccagacgcaccagaccagcctgcagtaccgccatcctacgtcagagcagccaagttgtcagcagatcgtgagtactacacataccagcagctataccctgcagacctgtcctgcgggatttcaaacttctgtgcaaggtctggggcacatgcaaactggtgtgggcatgtctttagcgatacctgtggaggtgaaaccctgtctttctgtgagctataataggtcttaccagatcaacgagcattatccttgcatcacaccctgtttcgagcgttag

SEQ ID NO: 201307 - DNA, 1119 bp, Artificial Sequence
  derived and/or modified sequence
atggagttggaaggccaatggtggcgtggacagctggccgctgatattcaccaagctcttaggtataaggaattgaaattgcctagctataaaggccaaagcccacagctcagcctgaggcgttatttcgctgatctgatcgccatagtgtccaatcgcttcaccctgtgccccagtgccaggcacctggccgtctatctgctggatttgtttatggaccgctatgacatttccatccagcaattacacctggttgctttatcctgcttgttgctcgcaagcaagttcgaggaaaaggaagactcagtgccgaagcttgaacaactcaattctttgggctgcatgacaaacatgaacctggtcctgacaaagcaaaacttattgcatatggagctgctgttgctggaaacatttcagtggaatctctgcctgcccacagctgctcattttattgaatactatctcagtgaagccgtgcacgagacagatctccatgacggatggcctatgatctgcttggagaaaactaagttgtatatggcaaaatacgccgattactttctcgaagtctccctgcaggtggccgctgcctgcgttgcgagctcaaggatcatcctgcggctttcccctacatggcccactagactacatcgcctgactgcttacagttgggactttctcgtccagtgtattgaacgcctcctaatcgcccatgataatgacgtaaaggaggcgaacaagcagcgcggacaggccggaccccagtcagctcagctaagtgtctttcaaaccgcttcgcagccatctaggcctgtccactttcaacagcctcagtatttgcaccagacacatcagacgagtctgcagtaccgccatccaacaagcgaacagcccagttgccagcaaattgtttctactacccacactagttcttacacactgcaaacctgcccggctgggttccagaccagtgtccaggggctagggcacatgcagactggagtgggcatgagcctagccattcctgtggaagttaagccttgcctgtcagtgagttacaaccggtcttaccaaattaatgagcattacccctgcatcactccctgcttcgaaaggtag

SEQ ID NO: 201308 - DNA, 4115 bp, Artificial Sequence
  derived and/or modified sequence
cgtgcgggatgctgaccgtacccaggcgggagccgccgcgccgccgcctggcgctgcacctgggcccggcccggccgccaattggacggctcggggcgaccccgctgtatcgcgagacgagattggcagcggcggggcctcaagtgcccccgcgctggctttgtatgcggagccgcctgccggtcctttaacaatgggcggcgcgagcgtccaggcgctgggctctagctgaggccggcgcttagcggcccactgtccgcagcatgagcggggccggcgtccgccgcacgacggcggggctggggctgtgagggccgcggttccggactcgagttgccgcgtcgggctgggcgcgccgccgggtcccatggagctggaggggcagtggtggcgaggacagctggccgccgatattcaccaagcgcttcgctacaaggagctgaagttgccctcctataaaggccagtcccctcagttaagtctcagacggtattttgctgacttgattgccattgtgagcaatcgcttcacactctgcccttctgcccgccatcttgctgtctatttactggacctgtttatggaccgctatgacatctctatccagcagctgcatttagttgcgctttcctgcctgcttctagcaagtaaatttgaagaaaaagaagacagtgtgcctaagctggagcagctcaacagcctgggttgtatgactaatatgaatctagtattaacaaaacaaaatttgctacatatggaactattattattagaaacctttcagtggaacctctgccttccaacagccgcccatttcattgagtattatctctctgaagcagtacacgaaacagatcttcatgacggctggccaatgatttgcttggaaaagactaaactctacatggccaaatatgcagattacttcctggaagtatctttgcaagtagctgctgcatgtgtggcttcttcgaggattatacttcgtctttctccaacgtggcctacaagactacatcgtcttactgcctactcttgggatttcttagtgcagtgtattgaacgactgttgatcgctcatgataatgatgtgaaagaagcaaacaaacagagagggcaagcaggacctcagtcagcgcaactaagtgtattccagacagcctcccagccatcacggccagttcactttcagcaacctcagtatctccatcagacacatcagacctcactgcagtatcgccatcctacgtcagaacaaccaagctgtcagcagattgtatcgaccacacacacctcatcttacacactacagacatgtcctgctggcttccaaactagtgttcagggccttgggcacatgcagactggtgttgggatgtcactggcaataccagtagaagttaagccctgtctgagtgtttcttacaaccggagttatcagataaatgaacattacccttgtattactccatgttttgaaaggtgattatttgtgaagctgataaccgacccagactgctttgtgacatgaagctatgggtaagcgttttgtaaacttctgttcaaaaggaaagggatctaaatgacatcagaactcttcaggtaccagcaccaggaagactgaatatcctttttaatgcaccatgaatcctgggagactaagcaaattaacagtatgtcaaattctgttacaacaaatccctgtatgacaaaaatgttcaagtcctggctgatggtccaaatatttcaaaaatattcagtacaacagaaaatttggacagacttcaatttgccattttgagatttgacctgtggtagcatctgggcctaatgttggcttctaagtcaaagactaaatgtttatctcatctatggacttgccaaacagtcttttatgaaggaaagttacagtattaatttttgaaaaggttttttttattctgcaattttttatttttgttctacacatgaatttttgactaagtttaaactcatgaattgttatgctataccaatctgcagtaaaaaaaatttttttagatgattctatataacttcgtctcacaaatagtgtaggtatctgggtttatatactaaaattaagggtggagaagatcttattttttaaatcatggtcataatttttctttttttccctaagtgatcaacatcaaatttttagaattaaaatacatttaactcagggaatttgtactacttggaaacacttaactgtaatgcaacatgccttgggaatgttatagtgtgaactacctttataacataggttaaaatacgcttgctagggtgtgttttcaaatgagaacataatatagctcagaatgaagtggtagttcctgtgattcataatacatatgtaggttttgcatatctcagtgcaatccatgatttatactcagaatcgacattcttaaaaagttatttcaagggatggcataactgtaagaggtcagtgctagaataaagtcctgtaggtttattttggaagggactgtggccagggtagttctcaggttgtgctagagcagcactttgttatgtggaagacaggttttttaagcaacctttgaatccagctctagtcagtctaagcaggcaaaggtaactgatgactaaatttcagtagctactttcattggattgaccctacaactgccctgggacatttcactgtaccagtattaactgcaaacagcaataattgtcattacagcaagggcagtttgggggtaaagcattttggaggaataaccttaaaaagttaaaaagtcattgtaataactgataaactgtatacattgtgctcctttctgtgggagaagaaagatttggtggagggaagctttctggtttaaaaattagtaaggtgtgtctttttgttttttttaagatagcacttgaatagaagggaaaactgcatggcagatacgtgactgccacaatatgcatcgaagacaaacttactataaagatgttgtgggtatgcagcaggagtctcagtaatcaagccaatggcctttgtcaggaagggaaggggctcaacacagtgatggactgatccagatggctcccggggatgaatgtgggtgggtagcttctgtcagtatcaatgcttagagaaatatcctttccttaaaaagaaaataacttttatatttagagtacatagggcatgatgtggatttattagtctggtagataaaatgaaaaaccactcaggtaagaacactcactcatggcagtttttaagcatgaaaattgttttctgaaagtatcatcacttttcctttttaaagaaggctgctaattggattttggtagttcttacctcaagaaaacttgaattatttgggggaaagtaggctcaaaagagaatatatctttcacattcacattcagaacccagcaacctggagtccaattttcagtattttaactacctcaataatgctatgaatgtaagatattgggatagagatcccaacttgaaacaacagccagtgcctgtggtaacttaatgtcttgtcaaatacttttattgattggtttatatgccattcttgttatagaagaatatgccttttaaaaaagcttattaataacactttcccaatttatattttaaaaagctaaagaacactggattaataatcttttgggagggtagaataaaataattgattactattgctgcatacccggggtgggatggggtggttggagaaccagaactatttttaaaacattaggtttcaatataaatacaactcacaactgctagctttggggggtgggggaacattgtgtgggttttgttttgtttaatttattgattagtctttaaagtaggcttttttttttttttttgagaatactggaccatcattaaatgtgtactgtgaagagattaatatgtatgaagggctttaccaaagtccactaaataaacactactcaagtacagactgcaaaccaaaatgtatctgtgttacgacattaattgcaaatagcaagtatggtgctaaagtctacaccaatggaattagatgagtgctatgcacttaattttaaaataaaactagttttcagtaaaa

SEQ ID NO: 201309 - DNA, 3031 bp, Artificial Sequence
  derived and/or modified sequence
aacaatgggcggcgcgagcgtccaggcgctgggctctagctgaggccggcgcttagcggcccactgtccgcagcatgagcggggccggcgtccgccgcacgacggcggggctggggctgtgagggccgcggttccggactcgagttgccgcgtcgggctgggcgcgccgccgggtcccatggagctggaggggcagtggtggcgaggacagctggccgccgatattcaccaagcgcttcgctacaaggagctgaagttgccctcctataaaggccagtcccctcagttaagtctcagacggtattttgctgacttgattgccattgtgagcaatcgcttcacactctgcccttctgcccgccatcttgctgtctatttactggacctgtttatggaccgctatgacatctctatccagcagctgcatttagttgcgctttcctgcctgcttctagcaagtaaatttgaagaaaaagaagacagtgtgcctaagctggagcagctcaacagcctgggttgtatgactaatatgaatctagtattaacaaaacaaaatttgctacatatggaactattattattagaaacctttcagtggaacctctgccttccaacagccgcccatttcattgagtattatctctctgaagcagtacacgaaacagatcttcatgacggctggccaatgatttgcttggaaaagactaaactctacatggccaaatatgcagattacttcctggaagtatctttgcaagtagctgctgcatgtgtggcttcttcgaggattatacttcgtctttctccaacgtggcctacaagactacatcgtcttactgcctactcttgggatttcttagtgcagtgtattgaacgactgttgatcgctcatgataatgatgtgaaagaagcaaacaaacagagagggcaagcaggacctcagtcagcgcaactaagtgtattccagacagcctcccagccatcacggccagttcactttcagcaacctcagtatctccatcagacacatcagacctcactgcagtatcgccatcctacgtcagaacaaccaagctgtcagcagattgtatcgaccacacacacctcatcttacacactacagacatgtcctgctggcttccaaactagtgttcagggccttgggcacatgcagactggtgttgggatgtcactggcaataccagtagaagttaagccctgtctgagtgtttcttacaaccggagttatcagataaatgaacattacccttgtattactccatgttttgaaaggtgattatttgtgaagctgataaccgacccagactgctttgtgacatgaagctatgggtaagcgttttgtaaacttctgttcaaaaggaaagggatctaaatgacatcagaactcttcaggtaccagcaccaggaagactgaatatcctttttaatgcaccatgaatcctgggagactaagcaaattaacagtatgtcaaattctgttacaacaaatccctgtatgacaaaaatgttcaagtcctggctgatggtccaaatatttcaaaaatattcagtacaacagaaaatttggacagacttcaatttgccattttgagatttgacctgtggtagcatctgggcctaatgttggcttctaagtcaaagactaaatgtttatctcatctatggacttgccaaacagtcttttatgaaggaaagttacagtattaatttttgaaaaggttttttttattctgcaattttttatttttgttctacacatgaatttttgactaagtttaaactcatgaattgttatgctataccaatctgcagtaaaaaaaatttttttagatgattctatataacttcgtctcacaaatagtgtaggtatctgggtttatatactaaaattaagggtggagaagatcttattttttaaatcatggtcataatttttctttttttccctaagtgatcaacatcaaatttttagaattaaaatacatttaactcagggaatttgtactacttggaaacacttaactgtaatgcaacatgccttgggaatgttatagtgtgaactacctttataacataggttaaaatacgcttgctagggtgtgttttcaaatgagaacataatatagctcagaatgaagtggtagttcctgtgattcataatacatatgtaggttttgcatatctcagtgcaatccatgatttatactcagaatcgacattcttaaaaagttatttcaagggatggcataactgtaagaggtcagtgctagaataaagtcctgtaggtttattttggaagggactgtggccagggtagttctcaggttgtgctagagcagcactttgttatgtggaagacaggttttttaagcaacctttgaatccagctctagtcagtctaagcaggcaaaggtaactgatgactaaatttcagtagctactttcattggattgaccctacaactgccctgggacatttcactgtaccagtattaactgcaaacagcaataattgtcattacagcaagggcagtttgggggtaaagcattttggaggaataaccttaaaaagttaaaaagtcattgtaataactgataaactgtatacattgtgctcctttctgtgggatggggtggttggagaaccagaactatttttaaaacattaggtttcaatataaatacaactcacaactgctagctttggggggtgggggaacattgtgtgggttttgttttgtttaatttattgattagtctttaaagtaggcttttttttttttttttgagaatactggaccatcattaaatgtgtactgtgaagagattaatatgtatgaagggctttaccaaagtccactaaataaacactactcaagtacagactgcaaaccaaaatgtatctgtgttacgacattaattgcaaatagcaagtatggtgctaaagtctacaccaatggaattagatgagtgctatgcacttaattttaaaataaaactagttttcagt

SEQ ID NO: 201310 - DNA, 1119 bp, Artificial Sequence
  derived and/or modified sequence
atggagctggagggccagtggtggagaggccagctggccgccgacatccaccaggccctgagatacaaggagctgaagctgcccagctacaagggccagagcccccagctgagcctgagaagatacttcgccgacctgatcgccatcgtgagcaacagattcaccctgtgccccagcgccagacacctggccgtgtacctgctggacctgttcatggacagatacgacatcagcatccagcagctgcacctggtggccctgagctgcctgctgctggccagcaagttcgaggagaaggaggacagcgtgcccaagctggagcagctgaacagcctgggctgcatgaccaacatgaacctggtgctgaccaagcagaacctgctgcacatggagctgctgctgctggagaccttccagtggaacctgtgcctgcccaccgccgcccacttcatcgagtactacctgagcgaggccgtgcacgagaccgacctgcacgacggctggcccatgatctgcctggagaagaccaagctgtacatggccaagtacgccgactacttcctggaggtgagcctgcaggtggccgccgcctgcgtggccagcagcagaatcatcctgagactgagccccacctggcccaccagactgcacagactgaccgcctacagctgggacttcctggtgcagtgcatcgagagactgctgatcgcccacgacaacgacgtgaaggaggccaacaagcagagaggccaggccggcccccagagcgcccagctgagcgtgttccagaccgccagccagcccagcagacccgtgcacttccagcagccccagtacctgcaccagacccaccagaccagcctgcagtacagacaccccaccagcgagcagcccagctgccagcagatcgtgagcaccacccacaccagcagctacaccctgcagacctgccccgccggcttccagaccagcgtgcagggcctgggccacatgcagaccggcgtgggcatgagcctggccatccccgtggaggtgaagccctgcctgagcgtgagctacaacagaagctaccagatcaacgagcactacccctgcatcaccccctgcttcgagagatag

SEQ ID NO: 201311 - protein, 540 aa, Artificial Sequence
  derived and/or modified sequence
MAAGGSAPEPRVLVCLGALLAGWVAVGLEAVVIGEVHENVTLHCGNISGLRGQVTWYRNNSEPVFLLSSNSSLRPAEPRFSLVDATSLHIESLSLGDEGIYTCQEILNVTQWFQVWLQVASGPYQIEVHIVATGTLPNGTLYAARGSQVDFSCNSSSRPPPVVEWWFQALNSSSESFGHNLTVNFFSLLLISPNLQGNYTCLALNQLSKRHRKVTTELLVYYPPPSAPQCWAQMASGSFMLQLTCRWDGGYPDPDFLWIEEPGGVIVGKSKLGVEMLSESQLSDGKKFKCVTSHIVGPESGASCMVQIRGPSLLSEPMKTCFTGGNVTLTCQVSGAYPPAKILWLRNLTQPEVIIQPSSRHLITQDGQNSTLTIHNCSQDLDEGYYICRADSPVGVREMEIWLSVKEPLNIGGIVGTIVSLLLLGLAIISGLLLHYSPVFCWKVGNTSRGQNMDDVMVLVDSEEEEEEEEEEEEDAAVGEQEGAREREELPKEIPKQDHIHRVTALVNGNIEQMGNGFQDLQDDSSEEQSDIVQEEDRPV

SEQ ID NO: 201312 - DNA, 1623 bp, Artificial Sequence
  derived and/or modified sequence
atggccgccggcggcagcgcccccgagcccagagtgctggtgtgcctgggcgccctgctggccggctgggtggccgtgggcctggaggccgtggtgatcggcgaggtgcacgagaacgtgaccctgcactgcggcaacatcagcggcctgagaggccaggtgacctggtacagaaacaacagcgagcccgtgttcctgctgagcagcaacagcagcctgagacccgccgagcccagattcagcctggtggacgccaccagcctgcacatcgagagcctgagcctgggcgacgagggcatctacacctgccaggagatcctgaacgtgacccagtggttccaggtgtggctgcaggtggccagcggcccctaccagatcgaggtgcacatcgtggccaccggcaccctgcccaacggcaccctgtacgccgccagaggcagccaggtggacttcagctgcaacagcagcagcagacccccccccgtggtggagtggtggttccaggccctgaacagcagcagcgagagcttcggccacaacctgaccgtgaacttcttcagcctgctgctgatcagccccaacctgcagggcaactacacctgcctggccctgaaccagctgagcaagagacacagaaaggtgaccaccgagctgctggtgtactaccccccccccagcgccccccagtgctgggcccagatggccagcggcagcttcatgctgcagctgacctgcagatgggacggcggctaccccgaccccgacttcctgtggatcgaggagcccggcggcgtgatcgtgggcaagagcaagctgggcgtggagatgctgagcgagagccagctgagcgacggcaagaagttcaagtgcgtgaccagccacatcgtgggccccgagagcggcgccagctgcatggtgcagatcagaggccccagcctgctgagcgagcccatgaagacctgcttcaccggcggcaacgtgaccctgacctgccaggtgagcggcgcctacccccccgccaagatcctgtggctgagaaacctgacccagcccgaggtgatcatccagcccagcagcagacacctgatcacccaggacggccagaacagcaccctgaccatccacaactgcagccaggacctggacgagggctactacatctgcagagccgacagccccgtgggcgtgagagagatggagatctggctgagcgtgaaggagcccctgaacatcggcggcatcgtgggcaccatcgtgagcctgctgctgctgggcctggccatcatcagcggcctgctgctgcactacagccccgtgttctgctggaaggtgggcaacaccagcagaggccagaacatggacgacgtgatggtgctggtggacagcgaggaggaggaggaggaggaggaggaggaggaggaggacgccgccgtgggcgagcaggagggcgccagagagagagaggagctgcccaaggagatccccaagcaggaccacatccacagagtgaccgccctggtgaacggcaacatcgagcagatgggcaacggcttccaggacctgcaggacgacagcagcgaggagcagagcgacatcgtgcaggaggaggacagacccgtgtag

SEQ ID NO: 201313 - DNA, 1623 bp, Artificial Sequence
  derived and/or modified sequence
atggcagctggcgggtccgcgcccgagcccagggtgctggtatgtttaggcgccctgctcgccgggtgggtagccgtcggactggaagcagttgttattggagaggtgcacgagaatgtgactctgcattgcggtaatatttctggtctgcgaggacaggtgacctggtaccgtaataattccgaacccgtgtttctgctgtccagtaactcttctttgcgtcccgctgagcctcgtttctctttagtggacgccacgtctctgcacattgagtctcttagccttggcgatgaagggatctacacttgccaggaaatcctaaatgtgacacaatggttccaagtttggctgcaggtggcgagcggtccttatcagatagaggtgcatattgtggcgaccggaaccctgcctaatggaactttatatgccgcacgaggctctcaggtggacttctcgtgtaactcttcatctcgtcctccaccagtggtggagtggtggtttcaggctctgaactcatcctcggagtccttcggtcacaaccttaccgtgaatttttttagcctcctgctcataagccccaacttacagggaaactatacctgcctcgctctgaatcaattgtctaagagacaccgtaaggtgactacagagcttctggtgtactatccgccaccttcagcccctcagtgctgggcccagatggcgtctggttcctttatgctgcaactgacatgccgttgggacggcggctaccctgatcctgacttcctctggatagaggagccgggcggtgtcatcgtaggtaaatctaagctgggggtggagatgctgagtgaaagccagttatcagacggtaagaaatttaaatgcgtcacgagccatatcgtgggcccagagtcgggagcgagctgtatggttcaaattcgcggacctagtctgctgtctgagccgatgaaaacatgcttcaccggcggaaacgtcactctgacatgtcaagtttcaggggcctacccccccgcaaagatcttatggttgcggaatctgacacaaccagaggtgataatccagcctagttcgcgccacctgatcacacaggatgggcagaatagcaccctgacaattcataactgttctcaggatcttgatgagggatactacatatgcagggccgactcccctgtgggtgtacgcgagatggagatttggctctcagtcaaagagccccttaacattggcggcatcgtcggaacgatcgtttccctgctgcttctgggacttgctattatcagcgggctgctcctccactactcccctgtgttttgctggaaagtcgggaacacctccaggggacagaatatggatgatgtaatggtgctggtcgattcagaagaggaagaggaggaggaggaggaagaagaagaggatgccgctgtgggggaacaagagggggctcgtgagcgtgaggagctccccaaggaaattcctaagcaggaccatattcacagggtgacggccctcgtgaacgggaacatagagcagatgggaaacgggtttcaggatctgcaggacgactcttcagaagaacagtcggacattgttcaggaggaagacaggcccgtatag

SEQ ID NO: 201314 - DNA, 1623 bp, Artificial Sequence
  derived and/or modified sequence
atggctgctgggggcagcgcccctgagccccgggtgctggtgtgcctgggcgccctgctggccggctgggtggccgtgggcctggaggccgtggtgattggagaggtgcatgaaaatgtgaccctgcactgcggcaacatcagcggcctgcggggccaggtgacctggtacagaaacaacagcgagcctgtgttcctgctgagcagcaacagcagcctgcggcctgctgagccccgcttcagcctggtggatgccaccagcctgcacatcgagagcctgagcctgggagatgagggcatctacacctgccaggagatcctgaatgtgacccagtggttccaggtgtggctgcaggtggccagcggcccctaccagatcgaggtgcacatcgtggccaccggcaccctgcccaacggcaccctgtatgctgcccggggcagccaggtggacttcagctgcaacagcagcagcaggcctcctcctgtggtggagtggtggttccaggccctgaacagcagcagcgagagctttggccacaacctgactgtgaacttcttcagcctgctgctgatcagccccaacctgcagggcaactacacctgcctggccctgaaccagctgagcaagaggcacaggaaggtgaccacagagctgctggtgtactaccccccacccagcgccccccagtgctgggcccagatggccagcggcagcttcatgctgcagctgacctgccgctgggatggcggctacccagaccctgacttcctgtggattgaggagcccggcggcgtcatcgtgggcaagagcaagctgggcgtggagatgctgtctgagagccagctgagtgatggcaagaagttcaagtgtgtgaccagccacatcgtgggccctgagagcggggccagctgcatggtgcagatccggggccccagcctgctgtctgagcccatgaagacctgcttcaccggcggcaatgtgaccctgacctgccaggtgtctggggcctaccccccagccaagatcctgtggctgaggaacctgacccagcctgaggtgatcatccagcccagcagccgccacctgatcacccaggacggccagaacagcaccctgaccatccacaactgcagccaggacctggatgagggctactacatctgcagagctgacagccctgtgggcgtgcgggagatggagatctggctgtctgtgaaggagcccctgaacattggaggcatcgtgggcaccatcgtgtccctgctgctgctgggcctggccatcatcagcggcctgctgctgcactacagccctgtgttctgctggaaggtgggcaacaccagccggggccagaacatggatgatgtgatggtgctggtggacagcgaggaggaggaggaggaggaggaggaggaggaggaggatgctgctgtgggggagcaggagggcgcccgggagcgggaggagctgcccaaggagatccccaagcaggaccacatccaccgggtgacagccctggtgaatggaaatattgagcagatgggaaatggcttccaggacctgcaggatgacagcagcgaggagcagagcgacatcgtgcaggaggaggacaggcctgtgtag

SEQ ID NO: 201315 - DNA, 1623 bp, Artificial Sequence
  derived and/or modified sequence
atggccgccggcggcagcgcccccgagccccgggtgctggtgtgcctgggagctctgctggccgggtgggtggcagtagggctggaggctgtggtgattggggaggtgcatgaaaatgtgactcttcactgcggcaatatttcgggactccgcggccaggtaacctggtaccgaaacaacagcgagcccgtgtttttgctgagcagcaacagctctctgcgccctgcagaacctcggttcagcctagtagatgcaactagcttacacatagaatccctgtctcttggggatgagggcatttatacttgccaagagatactaaacgtcacgcaatggtttcaggtctggcttcaggtcgcctcaggcccttatcagatagaggtgcacattgtggcaactggaactctacccaatggtaccctttacgcagccagagggtctcaggtggacttcagttgcaatagcagctcacgccctcctccagtggtggagtggtggttccaggctctgaactctagctcagaatcttttggccacaatctgaccgtcaattttttcagcctcctattaatttccccgaacctgcaggggaactacacatgcctggcactgaaccagctgtcaaaaagacatcgcaaagtaaccacggagcttttagtgtattacccacctccctccgccccccagtgctgggcccagatggcaagcgggtcattcatgctacagctgacctgtaggtgggacggcggctatcccgaccccgacttcctctggatagaggagcccggcggagttatcgtgggtaagagtaagctgggggtcgaaatgctgtccgaaagccagcttagtgacggaaagaagttcaaatgtgttacaagccacatagttgggcccgagagtggggcttcttgtatggtgcaaattcgagggcccagcctcctctctgagccgatgaagacctgtttcacgggcggaaatgtaactctcacctgtcaagtgagtggcgcatacccaccagcaaaaatcctctggctaagaaatctaactcagccagaagttatcattcagcctagttcccggcatttgatcactcaagacggacaaaactctactctgactatccacaattgttcgcaggacctagacgagggctactatatatgccgcgctgacagcccagttggagtgagggaaatggagatttggctttcagtgaaagagcccttgaatataggcggcatcgtgggcaccatagtgagtctgctcctgctgggattggccatcatttctgggctcctgctgcattatagtcccgttttttgctggaaggttggaaacacctccagggggcagaacatggatgacgtgatggtcctcgtggactcagaggaagaagaagaagaagaagaagaggaagaggaagatgccgctgttggagagcaggagggagcacgcgagcgggaggagttaccaaaagaaatccctaagcaggaccacatccatcgggtaaccgccttggttaacggtaatatagaacagatgggtaatggatttcaggatctgcaggatgattcctccgaggagcaatccgacatcgtccaggaagaagatcggcctgtgtag

SEQ ID NO: 201316 - DNA, 1623 bp, Artificial Sequence
  derived and/or modified sequence
atggccgcaggcggaagcgcgcctgagcctcgggtgctggtctgtcttggagcccttctggccggttgggtcgccgtgggcctcgaggccgtcgtgatcggcgaggtgcacgagaatgtgacacttcattgtgggaacatatccggactgcgagggcaggtcacttggtataggaacaatagtgaaccggtctttcttttgtctagtaactctagtttaagaccagctgaacccagattctccctggtcgatgcaacttccctgcatattgagtcactgagtctcggcgacgaaggaatctatacgtgtcaagagatcctcaacgtgactcagtggttccaggtgtggctacaggtggcttctggtccttaccagattgaggttcacatcgttgctactggcacactgccaaacgggaccctatacgccgctcggggtagccaggtggatttcagctgcaatagcagcagcagacctcctcctgtggtggaatggtggtttcaagccctgaatagctcgagtgaaagttttggacataacctcaccgtcaattttttctctctcctgctcattagcccaaatctgcagggcaattatacatgcctggcccttaatcaattgagcaagcgccacaggaaggtcactaccgagctcctcgtctactatcctcccccaagcgctccccagtgctgggctcagatggcgagtggctcgttcatgctccagctgacgtgtaggtgggacgggggttatcctgaccctgactttctgtggattgaggagcccggaggcgttatcgtcggaaagagcaaactcggagtggagatgttgtcagagtcccaattgagtgacgggaaaaaattcaagtgtgtaactagccacatcgtgggtcctgaatcgggcgctagttgtatggtgcagatcaggggacctagtctattgagcgagcctatgaagacctgttttaccgggggaaacgttactcttacatgtcaggtttctggagcctatcccccagccaaaatcctgtggctgaggaatcttacacagcccgaagtgatcatacagccaagttcccgacacctgattacgcaggacggtcagaatagcacactcacgatccataactgcagtcaggatttagacgaaggatattatatctgtcgagcggattctccggtgggcgtgcgtgagatggagatttggctgtcagttaaagaaccgctgaatattgggggaatcgtggggacaatcgttagcctgctcttacttggcctcgcaatcatttccggcctgcttctgcactatagtcccgtcttttgttggaaggttgggaacacaagtcgaggccaaaatatggacgacgtgatggtgctggtagatagtgaagaagaggaggaggaggaggaagaagaggaagaggatgcggctgtgggcgagcaggagggagccagagaaagagaagagcttcccaaagagatccctaaacaggatcatatccaccgggtgaccgcgctcgtgaatggcaatatcgagcagatgggaaacggctttcaagacctccaggatgattcgtccgaagagcagagtgatatcgttcaggaggaagaccggccagtctag

SEQ ID NO: 201317 - DNA, 4946 bp, Artificial Sequence
  derived and/or modified sequence
cggcaggagtaggctggcgggcgcagggggcggggtgcgccctccctccccggccagggcgctcgggagcggggacccgagcctgcagccgagctccgctgccggccctggacactcggctcagccaagcatccttcctgggggccgaggaagtggggccactctgccgttccgaggacctgggaggagccctcggtaccccgggccccggggccctggggcacacacgtccagcccagcccgagcctgcgtttcctgagccgggatctggggcgagatggccgcaggcggcagtgcgcccgagccccgcgtcctcgtctgcctcggggcgctcctggccggctgggtcgccgtaggattggaggctgttgtcattggagaagttcatgagaatgttactctgcactgtggcaacatctcgggactgaggggccaggtgacctggtaccggaacaactcggagcctgtcttccttctctcgtccaactctagcctccggccagctgagcctcgcttctctctagtggatgccacctccctgcacattgaatcgctgagcctgggagatgagggaatctacacctgccaggagatcctgaatgtgactcagtggttccaagtgtggctgcaggtggccagcggcccctatcagattgaggtccacatcgtggccaccggcacactccccaacggcaccctctacgcagccaggggctcccaggtggacttcagctgcaacagcagctccaggccaccacccgtggttgaatggtggttccaggccctgaattccagcagcgagtcctttggccacaacctgacagtcaactttttctcactgttactgatatcgccaaacctccaagggaactacacctgtttagccttgaatcagctcagcaagagacatcgaaaggtgaccaccgagctcctggtctactatccccctccatcagctccccagtgctgggcacagatggcatcaggatcgttcatgttgcagcttacctgtcgctgggatgggggataccctgaccctgacttcctgtggatagaagagccaggaggtgtaatcgtggggaagtcaaagctgggggtggaaatgctgagcgagtcccagctgtcggatggcaagaagttcaagtgtgttacaagccacatagttgggccagagtcgggcgccagctgcatggtgcagatcaggggtccctcccttctctctgagcccatgaagacttgcttcactgggggcaatgtgacgcttacatgccaggtgtctggggcctacccccctgccaagatcctgtggctgaggaaccttacccagcccgaggtgatcatccagcctagcagccgccatctcattacccaggatggccagaactccaccctcactatccacaactgctcccaggacctggatgagggctactacatctgccgagctgacagccctgtaggggtgagggagatggaaatctggctgagtgtgaaagaacctttaaatatcggggggattgtgggaaccattgtgagcctccttctgctgggactggccattatctcagggcttctgttgcattatagccctgtgttctgctggaaagtaggaaacacttccaggggacaaaacatggatgatgtcatggttttggtggattcagaagaggaagaggaggaggaggaggaggaggaggaagatgctgcagtaggggaacaggagggagcacgtgagagagaggagttgccaaaagaaatacctaagcaggaccacattcacagagtgaccgccttggtgaatgggaacatagaacagatgggaaatggattccaggatcttcaagatgacagcagtgaggagcaaagtgacattgttcaagaagaagacaggccagtctgaagaagaggatggtccatggttgtcttgctctgaaagcttggagagctacattgaagacgagctcttcattcagctttgactccacctgcacccctggcgggggcttgcactaacaatgtttgggtctcagcaaaaaacaaaaccaagcacacacatctttccttccatgtattgaaaaacattggtttgatttgctctaagttttcccaatgatgtttaaaagctttgagaaggaaagctgctttggtgtctgaggtgccacttctgctgtgaatcctggctttatccaggttgatctactgtgatagatgctgatttagagggaacagaggtcagggaagcactgggtcttggtgccttttgccgcttttttttttttttttttttttttttgagacggagtctccctctattgcccaggctggagtgcaatggcacgatcttggctcaccacaacttctgcctcccaggttcaagcgattctcctgcctcagccacggcaccttgcaaatatcagctccttggaacaggtgaagttccaggtaccaatgccaatcagaggaaggcagtttggttcaggctttggagttagaaacacctgaagttgaatctgggctctgttgcttccttctttcatgggctagagcacgactctttacctctctcttggcctcaatttcctcacctgtaaaatagatgaggaagctgctcacttattattgtctcgttctgaaagcttggaaagctacatcgaagatgagctcttcattcagctttgatttgacctgtacccctggtgggggattgcactggcaacatttgggtctcagcaaaaaaaccaagcacacacatctttccttccatttattgaaaaacatctttgtaagatccattcattgaaaaacataatccatttattgaaaaatatctttgtaagatcacctgctaaatatgaaaatctgacttgaatttgtactctttaaagttgcgtatctgctctagtgggcaggacctagggcttaaaggggaacttcctttctccatttctaagaactgggactctaaaatgagaagctggttgtctgaagtaaccctgcaggtgtggttggggaaggtctgttttcttggatgaaggaactaaactaagcatatcagagcactgtcttaaccagttttatttccctggagatagaattcttttaaaaagagttagggagctggtaataggaagtgcctttcattataactacattttgcagagcttcatatttatatacaagcctcctaggtgatacactgttagcttgcagactttcctatgcttcatttctcctgttgctttcaaagaaggcaggagacacgtttaataacggagtatctggtgataagaattgcttgggcaaaccagctcatctggactctttctcagtcttggaagtgggaagaggaaaacttgtttccttcctgcttcttaaggatattctgagggtacactgatcaataacactaaatttggaatgaaaataccatgtgatgagtttagcctgctgatgcttccagtagatccttgtatagtttcaagatttaagttttccgatttcatataaatttcttaaagtcgaggaccttataagggtgcaatggatgtttgctaaatatgaaaaactgacttgaatttgcactctttaatgttgcgtatctgctctagtgggcaggacctagggcttaaaggggaacttcctttctccaattctaggaactgggactctaaaatgagaagctggttgtctgaagtaaccctgcaggtgtggttggggaaggtctgttttcttggatgaagggattaaactgagcaaatcactagaagtatgccctgtcccctgctcagaacactggggagctcaagagtgggctgcaatgtgcacccctcaggaatagctgtgaattgcaggtctactggctttttgctttttgtcttttgctgcaaggtaccccacgtacttaaccattctcaacagtgtaaatcagtgtcattttagaatgagatactcagcttgcttctaaagtcactgaattactgagtgagtctctcctttagagtcttcggcaaccaaattccagaattgaagagtctactactcagaggcaacaagattaaaaaaagaaaacacaaaaactgttgaggtgaaaaaaaaaaaaaaccctagctaggaacacagagaatgttttgtaggatcactgggatattttccacaacttcctcttctctagcacacacatctgttgataggaaatatttgagggtttttccactaccaaatgggagcttcatggtcctggtgtcaaacactataaacctttgaccagctgagctgtgactgctgtcacatatctgagtcctgtgtgcacagtaatatcctgggtcaggtaaaatccaggtcttcaagttttaaggattttttgaagaattcgggcttctttaagacgatccatgcccaaatccacaagcttgttgacagtggattacagtttgtgtggcaaagtccaagttgttacactgtgctttaaaaaaaatcttatctgcatgtattgttaacttagagaccatgagatctatttatcaggaccaggaagatacacacttcaggtccattgcaactgacttttttcttgtttttctcaaaccctggtggagcctgggaagggggcctccacaattctgtggctttgatattagccccaattctcacaagcacatacaagccccataattgccgcaggaaaacacaagatggaaaattgcaataacccatgcactgagacttagaaaatcatccttactaggcaaaatgtattatgatgcaataagtgccaactgatatttctcacgttgggactggccaggaactgctgcaaagaaaaataagcagctccttctccattatttacattttaagatgtggtggggggaggttgggagaaattagttctgaggttatcatatgccttttttaaaagataatggaataaagctatttttaagtaa

SEQ ID NO: 201318 - protein, 204 aa, Artificial Sequence
  derived and/or modified sequence
MSDLRITEAFLYMDYLCFRALCCKGPPPARPEYDLVCIGLTGSGKTSLLSKLCSESPDNVVSTTGFSIKAVPFQNAILNVKELGGADNIRKYWSRYYQGSQGVIFVLDSASSEDDLEAARNELHSALQHPQLCTLPFLILANHQDKPAARSVQEIKKYFELEPLARGKRWILQPCSLDDMDALKDSFSQLINLLEEKDHEAVRM

SEQ ID NO: 201319 - DNA, 615 bp, Artificial Sequence
  derived and/or modified sequence
atgagcgacctgagaatcaccgaggccttcctgtacatggactacctgtgcttcagagccctgtgctgcaagggccccccccccgccagacccgagtacgacctggtgtgcatcggcctgaccggcagcggcaagaccagcctgctgagcaagctgtgcagcgagagccccgacaacgtggtgagcaccaccggcttcagcatcaaggccgtgcccttccagaacgccatcctgaacgtgaaggagctgggcggcgccgacaacatcagaaagtactggagcagatactaccagggcagccagggcgtgatcttcgtgctggacagcgccagcagcgaggacgacctggaggccgccagaaacgagctgcacagcgccctgcagcacccccagctgtgcaccctgcccttcctgatcctggccaaccaccaggacaagcccgccgccagaagcgtgcaggagatcaagaagtacttcgagctggagcccctggccagaggcaagagatggatcctgcagccctgcagcctggacgacatggacgccctgaaggacagcttcagccagctgatcaacctgctggaggagaaggaccacgaggccgtgagaatgtag

SEQ ID NO: 201320 - DNA, 615 bp, Artificial Sequence
  derived and/or modified sequence
atgagtgacttaagaattacagaagcgttcctgtacatggattatctctgcttccgggccctctgttgcaaaggaccaccgcctgcaagacccgagtacgatttagtttgtattgggctcacagggagcggaaaaactagccttctgagcaagttgtgtagtgagtcacccgataatgttgtgtccactactggcttttccatcaaggcggtacctttccaaaacgcaattctcaatgtcaaagagcttggaggagctgataatatccgtaaatattggtcacgttactaccagggaagccaaggggtgattttcgtgcttgacagcgcgagttcggaggacgatctagaggcggcacggaacgaactgcactccgcgcttcagcatccccagctttgcacgcttcccttcctcattctggccaaccatcaggataaaccagccgctcgtagcgtccaggaaataaagaagtacttcgagctggagccactggccaggggtaaacgatggatcctgcagccttgttccctggacgacatggacgccctgaaggattcattctcacaactcattaatctcttggaggagaaggatcacgaggccgtgagaatgtag

SEQ ID NO: 201321 - DNA, 615 bp, Artificial Sequence
  derived and/or modified sequence
atgtctgacctgcgcatcacagaggccttcctgtacatggactacctgtgcttccgggccctgtgctgcaagggccccccaccagcccggccagaatatgacctggtgtgcatcggcctgactggaagtggcaagaccagcctgctgagcaagctgtgcagcgagagcccagacaacgtggtgtccaccaccggcttcagcatcaaggctgtgcccttccagaatgccatcctgaatgtgaaggagctgggcggcgctgacaacatcaggaagtactggagccgctactaccagggcagccagggcgtcatctttgtgctggacagcgccagcagtgaagatgacctggaggccgccagaaatgagctgcacagcgccctgcagcacccccagctgtgcaccctgcccttcctgatcctggccaaccaccaggacaagccagctgcccggtctgtgcaggagatcaagaagtactttgagctggagcccctggcccggggcaagcgctggatcctgcagccctgcagcctggatgacatggatgccctgaaggacagcttcagccagctgatcaacctgctggaggagaaggaccatgaagctgtgaggatgtag

SEQ ID NO: 201322 - DNA, 615 bp, Artificial Sequence
  derived and/or modified sequence
atgagcgacctgcggatcaccgaggccttcctgtacatggactacctatgcttccgcgcactgtgttgtaaaggaccaccaccggcccggcccgagtacgatctggtttgtatcggtctgactggctccggtaaaacatcacttctgtcgaaactttgctctgagtcccccgacaacgtggtttccaccaccgggttttctatcaaggcggtcccattccagaatgctatactcaatgtgaaagaactcggaggcgccgacaacattcggaaatattggagtagatactaccagggaagccagggggtgatttttgtgctggactctgctagcagcgaagatgacttagaggctgcccgaaatgagcttcactctgctctgcagcatccacaactgtgtacactgccctttttgattttggcaaaccatcaggataagcccgctgctaggagcgtacaagagatcaaaaaatacttcgagctggagccattggcgaggggcaagagatggattcttcagccatgtagtctggacgatatggacgccctcaaggacagcttcagccaattaatcaatctacttgaggagaaggaccatgaggctgttaggatgtag

SEQ ID NO: 201323 - DNA, 615 bp, Artificial Sequence
  derived and/or modified sequence
atgtctgatctgaggattacagaggcgttcctgtacatggactacctatgctttcgcgcattgtgctgtaagggcccaccccctgctagacctgaatacgatctcgtgtgtattgggctgacaggctccggcaaaaccagtcttctttccaaactgtgttcggagtctccagacaacgtcgtctcaacaaccggcttttccattaaagccgtaccctttcagaacgccatactgaacgtaaaggaacttggtggtgccgataacattcgtaagtactggagccggtactaccagggctcccaaggtgtcatatttgtgttagattcggctagctctgaggatgacctcgaagcagccaggaatgagttgcacagtgcccttcagcaccctcaactgtgcacactgcccttcttaatactggctaaccaccaggataagccagccgcacggtccgtgcaagaaattaagaagtactttgagctggaacccttggcacgaggtaaacgttggattctgcagccttgcagcctcgatgacatggacgcactgaaagactcctttagccaattaatcaatctccttgaggagaaggaccacgaggccgtgaggatgtag

SEQ ID NO: 201324 - DNA, 2486 bp, Artificial Sequence
  derived and/or modified sequence
gttgctggctttttcaggagctgctcgctcgcagccagagacgctgctttttttttccgggttcggagccgttccggatgctttaggctgccggatgtctgatctccgaataactgaggcgtttctgtacatggattatctgtgttttagagcactttgctgcaagggaccaccacctgcacgaccagaatatgacctggtttgcataggcctcacaggttctggcaaaaccagtctgttgtccaaactctgcagtgaaagccccgataacgtcgtgtcgaccacaggttttagtattaaagcagtgccattccagaatgccatcttgaatgtaaaagaacttggaggggctgataacatccggaaatactggagccgctactaccaaggatctcaaggggtaatatttgtattagacagtgcctcttcagaggatgatttagaagctgctagaaatgagctgcactcagctcttcagcatccacagttatgcactttaccctttttaatattggccaatcatcaagacaagccagcagctcgctcagtacaagagatcaaaaaatattttgaacttgaaccacttgcacgtggaaaacgctggattctacagccctgctcactggatgacatggatgcactgaaagacagcttctctcagctgattaatttgttagaagaaaaagaccatgaagctgtaagaatgtgaaatctggcaaagaaaacaggctcccaaaaggccttgaacctatcatgttagtttctcattttaattttattttggtatcaagactatattggcttcagtatctattttcctctggtcatttcagactctcatctctctattaaagtgaatattctgtagatcagatgaattatcatcggcattaacgtcaagtacacactactgagagagaatttattctctgtttaccactaattatcttccccgcatgtctcttccttctgttgttctaagcatctcttctatactctgtgctgaaacggatggaattcatggcttatggaaatcaaatcccttttgaaggactcagaaagactcacaagaccttgatcattttctctgggtttgggagtggagtattatgtgactgggactccacaaaatatttatattattttcaagacctattgggggttttgttttattttatctaatttttttttttttttggtatactgagcttatagactatgagagaaaagtgagcaccaaaaacttcattaatcaccttatcaggaaggaatatcctgccatagtaaaattggctctgaagagcttagaggcaagttacacaatgttttcttgattacatctgaagtctcttctcttttaagagcaaagacattgtttcagtttctgagagtggttagaggaaatttaggtacaatgcatgcatcacagactgtatttgattgattcgagtcttcaaatattgtttaatggaatgatgagcctgcataaagtgaagctgcaatgtaacataggtatctttttctaaaaacttcaagtgtttgattaaaatagagaaaataatttttaaaataatagataaaaattttaaaaacagccagaaaaagtataatttatactggttagggtttaagatggcatggatttgacaaagataacaaagacagaatcatctatatattcattcattacgtgttactgtagtttattggaatctgttaatgccttcctctagtagttaaaggtttatcagtatttctattataaacctctattttcaggggtttcaatgtgcccttaaaattgtgctggggctgcagcaaataaataatattgggactcatattcagtctttggaactagttttttttccatttaatttaaatgacaaaattgcatagggataaatgtacagttttactaaggtttagcacctttgatcttttctaaatcaggaaaaaaatctatgcatattgaggttcacagatgaaatattctttggcatactttgtagactttgaccacttaaaatactaagtggccaaatgataaaaaaaactgctccctgcacatgagtgtaaaaacatgtttgtaattttaagtaaaatggactgatacccaaataccacagactcacactatattacagaatgatgtaatacctggtaattctccagaagatagacttcagacccttaatgccatttaaatgtagtttttgtggtttaatcttatgagtagattgtaatgaaatcattacctttgaaacatcaaacacttctttaagctttttttttttaatgtcatgaatcaggaaggatacatagtgattcgtatacaattttgtctgcagcattcttgaatatttttaacactgtgtaatccctgagcagcacaaaacttttattccgatgaccagttacacaattcctgtttttattttgtcctgttgtgctcatcttctatgaaaaataaatgattattaggc

SEQ ID NO: 201325 - protein, 531 aa, Artificial Sequence
  derived and/or modified sequence
MAPTIQTQAQREDGHRPNSHRTLPERSGVVCRVKYCNSLPDIPFDPKFITYPFDQNRFVQYKATSLEKQHKHDLLTEPDLGVTIDLINPDTYRIDPNVLLDPADEKLLEEEIQAPTSSKRSQQHAKVVPWMRKTEYISTEFNRYGISNEKPEVKIGVSVKQQFTEEEIYKDRDSQITAIEKTFEDAQKSISQHYSKPRVTPVEVMPVFPDFKMWINPCAQVIFDSDPAPKDTSGAAALEMMSQAMIRGMMDEEGNQFVAYFLPVEETLKKRKRDQEEEMDYAPDDVYDYKIAREYNWNVKNKASKGYEENYFFIFREGDGVYYNELETRVRLSKRRAKAGVQSGTNALLVVKHRDMNEKELEAQEARKAQLENHEPEEEEEEEMETEEKEAGGSDEEQEKGSSSEKEGSEDEHSGSESEREEGDRDEASDKSGSGEDESSEDEARAARDKEEIFGSDADSEDDADSDDEDRGQAQGGSDNDSDSGSNGGGQRSRSHSRSASPFPSGSEHSAQEDGSEAAASDSSEADSDSD

SEQ ID NO: 201326 - protein, 288 aa, Artificial Sequence
  derived and/or modified sequence
MATGPIPTGLCLRGLEWSAESSTAIASLISPSTPSSSPTPSTRTVLLDPADEKLLEEEIQAPTSSKRSQQHAKVVPWMRKTEYISTEFNRYGISNEKPEVKIGVSVKQQFTEEEIYKDRDSQITAIEKTFEDAQKSISQHYSKPRVTPVEVMPVFPDFKMWINPCAQVIFDSDPAPKDTSGAAALEMMSQAMIRGMMDEEGNQFVAYFLPVEETLKKRKRDQEEEMDYAPDDVYDYKIAREYNWNVKNKASKGYEENYFFIFREGDGVYYNELETSIQYSHMLYNLVA

SEQ ID NO: 201327 - DNA, 1596 bp, Artificial Sequence
  derived and/or modified sequence
atggcccccaccatccagacccaggcccagagagaggacggccacagacccaacagccacagaaccctgcccgagagaagcggcgtggtgtgcagagtgaagtactgcaacagcctgcccgacatccccttcgaccccaagttcatcacctaccccttcgaccagaacagattcgtgcagtacaaggccaccagcctggagaagcagcacaagcacgacctgctgaccgagcccgacctgggcgtgaccatcgacctgatcaaccccgacacctacagaatcgaccccaacgtgctgctggaccccgccgacgagaagctgctggaggaggagatccaggcccccaccagcagcaagagaagccagcagcacgccaaggtggtgccctggatgagaaagaccgagtacatcagcaccgagttcaacagatacggcatcagcaacgagaagcccgaggtgaagatcggcgtgagcgtgaagcagcagttcaccgaggaggagatctacaaggacagagacagccagatcaccgccatcgagaagaccttcgaggacgcccagaagagcatcagccagcactacagcaagcccagagtgacccccgtggaggtgatgcccgtgttccccgacttcaagatgtggatcaacccctgcgcccaggtgatcttcgacagcgaccccgcccccaaggacaccagcggcgccgccgccctggagatgatgagccaggccatgatcagaggcatgatggacgaggagggcaaccagttcgtggcctacttcctgcccgtggaggagaccctgaagaagagaaagagagaccaggaggaggagatggactacgcccccgacgacgtgtacgactacaagatcgccagagagtacaactggaacgtgaagaacaaggccagcaagggctacgaggagaactacttcttcatcttcagagagggcgacggcgtgtactacaacgagctggagaccagagtgagactgagcaagagaagagccaaggccggcgtgcagagcggcaccaacgccctgctggtggtgaagcacagagacatgaacgagaaggagctggaggcccaggaggccagaaaggcccagctggagaaccacgagcccgaggaggaggaggaggaggagatggagaccgaggagaaggaggccggcggcagcgacgaggagcaggagaagggcagcagcagcgagaaggagggcagcgaggacgagcacagcggcagcgagagcgagagagaggagggcgacagagacgaggccagcgacaagagcggcagcggcgaggacgagagcagcgaggacgaggccagagccgccagagacaaggaggagatcttcggcagcgacgccgacagcgaggacgacgccgacagcgacgacgaggacagaggccaggcccagggcggcagcgacaacgacagcgacagcggcagcaacggcggcggccagagaagcagaagccacagcagaagcgccagccccttccccagcggcagcgagcacagcgcccaggaggacggcagcgaggccgccgccagcgacagcagcgaggccgacagcgacagcgactag

SEQ ID NO: 201328 - DNA, 1596 bp, Artificial Sequence
  derived and/or modified sequence
atggcgccaacaatccagactcaggcccagagagaagacggccacagaccaaacagccatcgtacactgcctgagcggtcaggcgttgtgtgccgcgttaaatattgtaactccctgccggatatccctttcgatccaaaattcatcacatacccctttgatcaaaaccggttcgtgcagtataaggctacaagcctggagaagcaacataagcatgacctcctcactgagcccgaccttggagtgactattgatctcattaatcccgacacctacaggattgaccccaatgttttgctggaccctgctgatgaaaagctgcttgaagaagagatccaggctccgacctccagcaagaggtcccagcagcacgcgaaggtagtgccatggatgcggaaaacagaatatatatctactgaatttaaccggtacggtatctccaatgagaaaccagaagttaaaatcggagtgagcgtgaagcaacagttcactgaggaagagatatacaaagaccgtgacagtcaaattacagcaatcgaaaagacattcgaggacgcccaaaagtccatctcgcagcactatagcaagcccagagtgacgcctgtcgaggtcatgccggtctttccagatttcaagatgtggatcaacccatgcgctcaagtgatattcgatagcgatccagccccaaaggacaccagtggagctgcagccctagaaatgatgtctcaggccatgatccgagggatgatggacgaagagggaaatcagttcgtggcttacttcttgcccgtggaggagacgctgaaaaaacgcaaaagggaccaagaagaagaaatggactatgctcctgacgatgtttatgactataagatcgccagagagtacaactggaacgtcaagaacaaagcatctaagggttacgaggagaactatttttttattttccgggaaggggatggagtttattataatgagttggaaacacgcgttcgcctttccaagcgacgagctaaagcaggagttcaatcgggaacaaacgcactgctggtggtgaagcatagggacatgaatgagaaagaattggaagctcaggaggcacggaaggcacagcttgagaaccacgagccggaggaggaggaggaggaagaaatggagactgaagagaaagaggcaggcgggtcagacgaagagcaggagaaaggatcctcaagcgaaaaagaaggatccgaggacgagcacagcgggagcgaatccgaacgtgaagaaggggaccgagatgaggcctcagacaagtccggctctggcgaagatgagagctccgaggacgaagcaagagccgctcgcgataaggaagaaatctttggctccgatgctgattctgaggatgacgccgatagtgatgatgaagacagggggcaggcgcaaggtggttccgataatgatagcgatagtggctctaacggcggaggacagcggagccgcagtcatagcagatctgccagccctttcccgtctggctccgagcactccgcacaagaggacgggagtgaggccgctgcctctgatagcagtgaagccgattccgacagcgactag

SEQ ID NO: 201329 - DNA, 1596 bp, Artificial Sequence
  derived and/or modified sequence
atggcccccaccatccagacccaggcccagcgggaggatggccaccggcccaacagccacaggaccctgcctgagaggtctggagtggtgtgccgggtgaagtactgcaacagcctgcctgacatcccctttgaccccaagttcatcacctacccctttgaccagaacagatttgtgcagtacaaggccaccagcctggagaagcagcacaagcatgacctgctgacagagccagacctgggcgtgaccatcgacctgatcaacccagacacctacagaattgaccccaacgtgctgctggaccctgcagatgagaagctgctggaggaggagatccaggcccccaccagcagcaagaggagccagcagcacgccaaggtggtgccctggatgaggaagacagagtacatcagcacagagttcaacagatatggcatcagcaatgagaagccagaggtgaagattggagtgtctgtgaagcagcagttcacagaggaggagatctacaaggaccgggacagccagatcacagccatcgagaagacctttgaagatgcccagaagagcatcagccagcactacagcaagccccgggtgacccctgtggaggtgatgcctgtgtttcctgacttcaagatgtggatcaacccctgtgcccaggtgatctttgacagcgaccctgcccccaaggacaccagcggggccgccgccctggagatgatgagccaggccatgatccggggcatgatggatgaggagggcaaccagtttgtggcctacttcctgcctgtggaggagaccctgaagaagaggaagagggaccaggaggaggagatggactatgccccagatgatgtgtatgactacaagatcgcccgggagtacaactggaatgtgaagaacaaggccagcaagggctatgaggagaactacttcttcatcttccgggagggagatggagtgtactacaatgagctggagaccagggtgcggctgagcaagagaagagccaaggccggcgtgcagagcggcaccaatgccctgctggtggtgaagcaccgggacatgaatgagaaggagctggaggcccaggaggccaggaaggcccagctggagaaccacgagcctgaggaggaggaggaggaggagatggagacagaggagaaggaggccggcggcagtgatgaggagcaggagaagggcagcagcagcgagaaggagggctctgaagatgagcacagcggcagcgagagcgagcgggaggagggggacagagatgaggccagtgacaagagcggcagcggggaggatgagagcagtgaagatgaggcccgggccgcccgggacaaggaggagatcttcggcagtgatgctgacagtgaagatgatgctgacagtgatgatgaagatcggggccaggcccagggcggcagtgacaatgacagcgacagcggcagcaatggaggcggccagaggagccgcagccacagccgcagcgccagccccttccccagcggcagcgagcacagcgcccaggaggatggcagcgaggccgccgccagtgacagcagcgaggccgacagcgacagcgactag

SEQ ID NO: 201330 - DNA, 1596 bp, Artificial Sequence
  derived and/or modified sequence
atggcccccaccatccagacccaggcccagcgggaggacggccaccgtcccaacagccatcggaccctccctgagcgtagcggtgttgtttgccgggtcaagtactgtaacagcctgcctgacattcctttcgatccgaaattcattacctatcccttcgatcagaataggtttgttcagtacaaggcaactagcttagaaaaacaacataagcacgacctcttgaccgaacctgaccttggcgttacaatcgacctcattaaccctgacacttaccggattgatcccaatgtactgcttgacccagccgacgaaaaacttttggaggaggagatccaggcacccaccagttcgaaacgtagccagcaacacgcaaaagtcgttccttggatgcgcaaaaccgagtacatctcaacagaatttaatcggtatggtatcagcaacgagaagcctgaagtgaaaatcggagttagtgtaaaacagcagttcactgaagaagaaatctacaaggatagggactcccagattaccgctattgaaaaaaccttcgaagatgcacagaaatcaatttcacagcattactccaaaccaagggtcactcccgtcgaagtgatgcccgtgtttcccgactttaagatgtggatcaacccctgtgctcaagtgatcttcgacagcgatcccgcccctaaggacacatcgggagctgcagccttggaaatgatgagccaggctatgatccgtggcatgatggacgaagaagggaaccagtttgtggcttattttctgcctgtggaggaaacattaaagaaaagaaaacgggaccaggaggaggagatggactatgcccctgatgatgtctacgactacaagatagcccgcgagtataactggaatgttaagaataaagcaagcaaagggtatgaagaaaattatttctttattttcagggagggagatggagtgtactacaatgagctcgagacccgcgtgcggctgtcaaaaagaagagccaaggcaggggtacagagtgggacgaatgctctgttagttgtgaagcaccgtgacatgaatgagaaggagctggaggcccaagaggccaggaaagcccagttggagaatcatgagcccgaggaagaggaagaagaagagatggaaactgaggagaaggaagccggaggaagcgacgaagaacaggaaaagggatcaagtagcgaaaaagaggggagcgaggacgaacacagcgggagtgagagcgaaagggaggagggagaccgcgatgaggcctccgataagtctggtagcggcgaagatgagagctcagaggatgaggctcgggcggctagagacaaggaagaaatctttgggtctgatgcagactccgaagacgacgcggattcagacgacgaagatcggggccaggcacagggcggctcagacaacgactctgattctggttcaaatgggggaggacagcgctccagaagccactcgcggtcagccagtcctttcccgtctggcagcgagcacagcgctcaggaggatgggagcgaagctgccgcaagtgattcatctgaggctgactctgattccgattag

SEQ ID NO: 201331 - DNA, 2127 bp, Artificial Sequence
  derived and/or modified sequence
ctgagtctcgctggagctcttctcgcccgcccacctcatctcaacccactttccgcggggagcggcgccaagctgggccttcctcggatcaggcgtcccctgaagtcggcacgcccctctgcgtcccccttcggtcccgctaggaccccgtccgggctgccgtcgcctcgtcgctatggcgcccaccatccagacccaggcccagcgggaggatggccacaggcccaattcccaccggactctgcctgagaggtctggagtggtctgccgagtcaagtactgcaatagcctccctgatatccccttcgaccccaagttcatcacctaccccttcgaccagaacaggttcgtccagtacaaagccacttccttggagaaacagcacaaacatgacctcctgactgagccagacctgggggtcaccatcgatctcatcaatcctgacacctaccgcatcgaccccaatgttcttctagatccagctgatgagaaacttttggaagaggagattcaggcccccaccagctccaagagatcccagcagcacgcgaaggtggtgccatggatgcgaaagacagagtacatctccactgagttcaaccgttatggcatctccaatgagaagcctgaggtcaagattggggtttctgtgaagcagcagtttaccgaggaagaaatatacaaagacagggatagccagatcacagccattgagaagacttttgaggatgcccagaaatcaatctcacagcattacagcaaaccccgagtcacaccggtggaggtcatgcctgtcttcccagactttaagatgtggatcaatccatgtgctcaggtgatctttgactcagacccagcccccaaggacacgagtggtgcagctgcgttggagatgatgtctcaggccatgattaggggcatgatggatgaggaagggaaccagtttgtggcctatttcctgcctgtagaagagacgttgaagaaacgaaagcgggaccaggaggaggagatggactatgcaccagatgatgtgtatgactacaaaattgctcgggagtacaactggaacgtgaagaacaaagctagcaagggctatgaggaaaactacttcttcatcttccgagagggtgacggggtttactacaatgagttggaaaccagggtccgccttagtaagcgccgggccaaggctggggttcagtcaggcaccaacgccctgcttgtggtcaaacatcgggacatgaatgagaaggaactggaagctcaggaggcacggaaggcccagctagaaaaccacgaaccggaggaggaagaggaagaggagatggagacagaagagaaagaagctgggggctcagatgaggagcaggagaagggcagcagcagtgagaaggagggcagtgaagatgagcactcgggcagcgagagtgaacgggaggaaggtgacagggacgaggccagtgacaagagtggcagtggtgaggacgagagcagcgaggatgaggcccgggctgcccgtgacaaagaggagatctttggcagtgatgctgattctgaggacgatgccgactctgatgatgaggacagaggacaggcccaaggtggcagtgacaatgattcagacagcggcagcaatgggggtggccagcggagccggagccacagccgcagcgccagtcccttccccagtggcagcgagcactcggcccaggaggatggcagtgaagctgcagcttctgattccagtgaagctgatagtgacagtgactgagtcccagggcattcagggctggttcagacaccattattgtgagcagcaaagcacttttctagtggtctgtttgtgagcctttcacttgtttgttccccacccccaaacctttgctgttaataaagtcaacttctctttacttcccctcccagcccctatgatgtcattcagcccagcacatacctcccgcaacccccaggtgctcaaggatcttggcttgaggcttagaaacacaggccagaggcagggccaatggtttcccacaaaatgtagcacaacgaaggtcagaattcgttttttttgtttgttttttttttttccaaaataagcccagaccattaaacaagtgaaactcc

SEQ ID NO: 201332 - DNA, 1596 bp, Artificial Sequence
  derived and/or modified sequence
atggccccaaccatacagacccaggcccagagggaggacggacaccgtccaaactcccaccgaacactacctgagagaagcggtgtggtgtgtagggttaaatattgtaattcacttcctgacattccatttgatcccaagtttattacttaccctttcgaccagaatcgatttgtccagtacaaggcaacctcgcttgaaaaacagcacaaacacgatctgttgactgagcccgatctcggcgtgaccattgatcttataaatcctgacacctaccggattgatcccaatgtgctgctcgatccagcggatgaaaagctcctggaggaggaaatacaggctccaacctccagcaaaaggagtcagcagcacgccaaagttgtgccttggatgcgcaagacagagtacatctctaccgaattcaatagatatggaatcagtaacgagaaacctgaggtgaagataggggtgtctgtcaaacaacagtttactgaggaggagatctataaagatcgcgacagccagatcactgctatcgaaaagaccttcgaagacgcccaaaaatctatatcccaacactacagcaaacctagagtgaccccggtggaagtcatgccggtgtttcctgacttcaaaatgtggatcaacccatgcgctcaggtaattttcgactccgaccctgctcccaaggataccagtggtgccgcagcattagaaatgatgtcacaggccatgattagaggaatgatggacgaggaaggcaatcaattcgtggcctattttctccctgtggaggagacgctgaaaaagcgcaagcgtgaccaggaggaggagatggattacgctccagatgacgtatacgattacaaaatcgcacgtgaatacaactggaacgtcaaaaacaaggcttccaaagggtatgaggaaaattacttttttatatttcgagagggagatggggtgtattacaacgaactggaaacccgggtgcggctctcaaaaaggcgggcaaaagccggagtccagagtggtacaaacgcacttcttgtggttaagcaccgagacatgaacgaaaaagaactggaggcccaggaagcacgtaaggcacagcttgaaaaccacgagcctgaggaagaggaggaggaagaaatggagaccgaagaaaaggaggctggtggatccgatgaggagcaggagaagggcagctctagcgaaaaagagggttcagaggatgaacatagtggctctgaatctgagagggaagagggggaccgcgacgaggcttcggataagagcggttctggcgaggacgaatccagtgaggacgaagctcgtgccgcacgggataaagaggagatattcggaagcgatgctgactccgaggatgacgccgattctgatgacgaagatcggggtcaagcccaggggggttcagataacgattctgacagcggttcgaatgggggaggtcagaggtctaggtcacacagccggtctgcttcacctttcccgagcggatcagagcactccgcacaggaggatggcagcgaggctgccgcatccgattctagcgaagcagactccgacagcgactag

SEQ ID NO: 201333 - protein, 1047 aa, Artificial Sequence
  derived and/or modified sequence
MAHCGQLTNWLCLAWERKESPDFLSIFLRYIDLTPKLHKICSDKTITQKTHCLLPLISSALSSIVLIQGWWQKTAHKYAYKGAKHIEQQNPQSRHRPRPAGALPQISRDSRQRCLLLRFLVRPRGFSFSFAEPAAAFPGATAMAASLSERLFSLELLVDWVRLEARLLPSPAAAVEQEEEEEEKEQGEASSPRGLCPAVAFRLLDFPTLLVYPPDGPGAPAAEPWPGVIRFGRGKSCLFRLQPATLHCRLLRTPLATLLLQLPPGRPTPTPQLLGACDISLATAAHRVVGPAASGCSHRHRGRFPLHNRVGERTGDIALAYRLTDLGSRLLSQLERPLTFTRTGGGAEVSPQTQQERQQLQQPASQPSPKEADKPLGELEIPEAQKDLKEMVKSKAECDNVGSVENGKTNSVVTCSGAGNGRNVSSLNEEVTELDMETNIFCPPPLYYTNLTQEKPPPAQAKITIEPQMNAPEEMDDASPEKKRVNPPAHRSCLKHPSSAAHEHPPMLVNPPHIQNIGATNQTCQTEQNRINTIRQLPLLNALLVELSLLYDQPVTSPAHIHPHLAWLYRTEDKKSPESSAKSTCRSEAKKDKRSVGGCEKSVSLQYKKNQIENYKEDKYSEKSSGALHKRVPKGRLLYGLTNTLRLRLKLTNPDMLVVHEKRELYRKRQSQMLGTKFRIPSSKVKLLSSAEQSQKPQLPEDKYLDSDASFTENSDTSRQISGVFDEPSTSKETKLKYATEKKTVDCSKNRINNVSLEEVVSPANSIIPERLTPTNILGGNVEMKIQSPCVFQQDAVVDRIVDKEIDIRQVKTTDNDILMADISDKRTGKNSCYENISELKYSDDLSSPCYSEDFCTSEDTSRSFKAHDSSSRTENPKHSQYTSKSSDTGVSKKKNSSDRSSILSPPFSAGSPVHSYRKFHISKTQDKSLEEASSISASDLSSTHWTEQKENQIDQNSMHNSEITKRAQDISVKTRSSWKSLEKSQSPQTSQVSSYLPSNVSELNVLDSSTSDHFEEGNDDVGSLNISKQCKDICELVINKLPGYTM

SEQ ID NO: 201334 - DNA, 3144 bp, Artificial Sequence
  derived and/or modified sequence
atggcccactgcggccagctgaccaactggctgtgcctggcctgggagagaaaggagagccccgacttcctgagcatcttcctgagatacatcgacctgacccccaagctgcacaagatctgcagcgacaagaccatcacccagaagacccactgcctgctgcccctgatcagcagcgccctgagcagcatcgtgctgatccagggctggtggcagaagaccgcccacaagtacgcctacaagggcgccaagcacatcgagcagcagaacccccagagcagacacagacccagacccgccggcgccctgccccagatcagcagagacagcagacagagatgcctgctgctgagattcctggtgagacccagaggcttcagcttcagcttcgccgagcccgccgccgccttccccggcgccaccgccatggccgccagcctgagcgagagactgttcagcctggagctgctggtggactgggtgagactggaggccagactgctgcccagccccgccgccgccgtggagcaggaggaggaggaggaggagaaggagcagggcgaggccagcagccccagaggcctgtgccccgccgtggccttcagactgctggacttccccaccctgctggtgtacccccccgacggccccggcgcccccgccgccgagccctggcccggcgtgatcagattcggcagaggcaagagctgcctgttcagactgcagcccgccaccctgcactgcagactgctgagaacccccctggccaccctgctgctgcagctgccccccggcagacccacccccaccccccagctgctgggcgcctgcgacatcagcctggccaccgccgcccacagagtggtgggccccgccgccagcggctgcagccacagacacagaggcagattccccctgcacaacagagtgggcgagagaaccggcgacatcgccctggcctacagactgaccgacctgggcagcagactgctgagccagctggagagacccctgaccttcaccagaaccggcggcggcgccgaggtgagcccccagacccagcaggagagacagcagctgcagcagcccgccagccagcccagccccaaggaggccgacaagcccctgggcgagctggagatccccgaggcccagaaggacctgaaggagatggtgaagagcaaggccgagtgcgacaacgtgggcagcgtggagaacggcaagaccaacagcgtggtgacctgcagcggcgccggcaacggcagaaacgtgagcagcctgaacgaggaggtgaccgagctggacatggagaccaacatcttctgccccccccccctgtactacaccaacctgacccaggagaagcccccccccgcccaggccaagatcaccatcgagccccagatgaacgcccccgaggagatggacgacgccagccccgagaagaagagagtgaacccccccgcccacagaagctgcctgaagcaccccagcagcgccgcccacgagcacccccccatgctggtgaaccccccccacatccagaacatcggcgccaccaaccagacctgccagaccgagcagaacagaatcaacaccatcagacagctgcccctgctgaacgccctgctggtggagctgagcctgctgtacgaccagcccgtgaccagccccgcccacatccacccccacctggcctggctgtacagaaccgaggacaagaagagccccgagagcagcgccaagagcacctgcagaagcgaggccaagaaggacaagagaagcgtgggcggctgcgagaagagcgtgagcctgcagtacaagaagaaccagatcgagaactacaaggaggacaagtacagcgagaagagcagcggcgccctgcacaagagagtgcccaagggcagactgctgtacggcctgaccaacaccctgagactgagactgaagctgaccaaccccgacatgctggtggtgcacgagaagagagagctgtacagaaagagacagagccagatgctgggcaccaagttcagaatccccagcagcaaggtgaagctgctgagcagcgccgagcagagccagaagccccagctgcccgaggacaagtacctggacagcgacgccagcttcaccgagaacagcgacaccagcagacagatcagcggcgtgttcgacgagcccagcaccagcaaggagaccaagctgaagtacgccaccgagaagaagaccgtggactgcagcaagaacagaatcaacaacgtgagcctggaggaggtggtgagccccgccaacagcatcatccccgagagactgacccccaccaacatcctgggcggcaacgtggagatgaagatccagagcccctgcgtgttccagcaggacgccgtggtggacagaatcgtggacaaggagatcgacatcagacaggtgaagaccaccgacaacgacatcctgatggccgacatcagcgacaagagaaccggcaagaacagctgctacgagaacatcagcgagctgaagtacagcgacgacctgagcagcccctgctacagcgaggacttctgcaccagcgaggacaccagcagaagcttcaaggcccacgacagcagcagcagaaccgagaaccccaagcacagccagtacaccagcaagagcagcgacaccggcgtgagcaagaagaagaacagcagcgacagaagcagcatcctgagcccccccttcagcgccggcagccccgtgcacagctacagaaagttccacatcagcaagacccaggacaagagcctggaggaggccagcagcatcagcgccagcgacctgagcagcacccactggaccgagcagaaggagaaccagatcgaccagaacagcatgcacaacagcgagatcaccaagagagcccaggacatcagcgtgaagaccagaagcagctggaagagcctggagaagagccagagcccccagaccagccaggtgagcagctacctgcccagcaacgtgagcgagctgaacgtgctggacagcagcaccagcgaccacttcgaggagggcaacgacgacgtgggcagcctgaacatcagcaagcagtgcaaggacatctgcgagctggtgatcaacaagctgcccggctacaccatgtag

SEQ ID NO: 201335 - DNA, 3144 bp, Artificial Sequence
  derived and/or modified sequence
atggcccactgcggacagctcactaattggctgtgtctggcctgggagcgcaaggaaagtcctgattttctgagtatttttctgaggtatatcgatctgacaccaaaattgcacaagatctgttccgataaaacgattacacagaagacccactgcctgctgcctttgatcagttccgctctttcatctatagtgctgatccagggttggtggcagaaaaccgctcataagtacgcttacaaaggggctaagcatattgagcagcagaacccacagagccggcacaggcccagacctgccggcgctctgccccagatctcccgagacagtagacagcggtgtctcctgctgcgcttcctggttcggcctagagggttctctttctccttcgcagaacctgccgcagcctttcctggggcaaccgcgatggctgcatctctgtcggagagactgttctcacttgaactcctggtggattgggtgcggttagaagccagactcttaccatcaccagctgccgccgtcgagcaggaggaggaggaagaagaaaaagaacaaggcgaggccagctcccctcgaggtctgtgccctgccgtggcgtttaggctactcgatttcccaacactgctggtgtaccctccggacgggccaggcgcaccagcagcggagccttggccaggcgtcatccgatttggaaggggtaaatcctgtctgttccggctgcagccagctacgctgcactgcaggttattgagaaccccactcgctaccttgttactgcaactgcctccgggccgtccgaccccgacaccgcagcttttgggggcttgtgacattagcctcgctactgccgcacaccgcgtggtaggccccgcagcctcaggttgtagccaccgccatcgcggccgctttcccctgcataatagagttggcgaaagaaccggcgacatagccctggcataccgactaacagatctcggctcccgcttgttatcccagctcgagaggcccctgaccttcaccagaactggtggcggtgccgaagtgagcccccagacccagcaagaacggcagcagctgcagcaaccggcctcccagcccagtcctaaggaagcggacaagcctctgggcgagttagagattcctgaggctcaaaaagatttgaaagaaatggtcaaatctaaggcagagtgcgataacgtagggagcgtggagaatggtaagacgaatagtgtcgtaacatgtagtggagccggtaacggcagaaacgtgagctctctcaacgaggaagtgaccgagctcgacatggagactaacatcttctgtccccctcctctctactacaccaaccttactcaggagaaaccaccccctgctcaagccaagatcaccattgaaccacaaatgaatgctccagaggaaatggacgacgcctcacctgaaaagaagagggtcaatcctcccgctcaccgatcttgtttgaagcacccctcctctgcagctcacgagcacccccctatgcttgtgaacccaccccacattcaaaatattggagctactaaccagacatgccaaaccgagcaaaataggattaacaccattcgccagctcccactgctgaatgcactcctcgtggaactgagtctgctatacgatcagccagtgacttccccggcccacatccatccacatctcgcctggctgtatcggaccgaagataaaaaatctcctgagtccagcgctaagtccacgtgtcggtccgaggcgaaaaaggacaaaagaagtgtgggaggatgcgaaaagtctgtgagtctgcagtacaaaaaaaatcagattgagaactacaaggaggacaaatacagcgagaagtcttcaggcgcattgcacaagcgcgttccaaagggccgtttgctgtatggattgacaaacacactgcggcttcgcttgaagctgactaatcccgatatgttagttgtgcacgaaaagagggaactttacaggaagaggcagtctcagatgctcgggacaaaatttcggataccgagtagtaaggtgaaactcctgtctagtgccgagcaatcccagaaacctcaactcccagaagacaaataccttgattcagacgccagcttcactgagaactcagatacatcacgccagatcagcggcgtgttcgacgagccatcaacttcaaaggagacaaagttgaagtacgccacagagaagaagacagtggattgcagtaaaaataggattaacaacgtgtcactagaggaggttgtgtcccctgccaactccattatcccagagcggctcacccccactaacattcttggcggcaacgtagaaatgaaaatccagtctccctgcgtgtttcagcaggatgctgtggtggatcgcattgttgacaaggagattgacattcgacaggtgaagacaacagacaacgacatcctgatggccgatatctcagacaaacggacggggaaaaatagttgttacgaaaatatctccgagctgaaatatagcgatgacctctccagcccttgctattctgaggatttttgcacatctgaggatacatcacggagtttcaaggcacatgacagctcctcccggactgagaaccctaaacactcacaatataccagcaaatcctcagacacaggagtgtcaaaaaaaaagaactcttccgacaggtcaagtatcttatcccctcccttcagcgctgggtccccggtccactcttaccgcaagtttcacatcagcaagacccaggacaaaagtctagaagaagccagtagcataagcgccagtgaccttagctccacacattggaccgagcagaaggaaaatcaaatcgatcagaacagcatgcacaacagtgaaattacaaagagagctcaagacatttctgtaaagaccaggtcatcctggaaatccctggaaaaaagccagtcgcctcaaaccagccaggtgtccagctacttgccctccaacgtctccgagctcaatgtcttagactcttcgacttccgatcattttgaggaaggtaacgatgatgtgggatctctgaacatcagcaagcaatgcaaagatatctgtgaattagtcattaacaaactaccagggtacacaatgtag

SEQ ID NO: 201336 - DNA, 3144 bp, Artificial Sequence
  derived and/or modified sequence
atggcccactgcggccagctgaccaactggctgtgcctggcctgggagaggaaggagagcccagacttcctgagcatcttcctgcgctacatcgacctgacccccaagctgcacaagatctgcagcgacaagaccatcacccagaagacccactgcctgctgcccctcatcagcagcgccctgagcagcatcgtgctgatccagggctggtggcagaagacagcccacaagtatgcctacaagggggccaagcacatcgagcagcagaacccccagagccgccaccggcccaggcctgctggggccctgccccagatcagccgggacagccggcagcgctgcctgctgctgcgcttcctggtgcggccccggggcttctccttctcctttgctgagcctgctgctgccttccctggggccacagccatggccgccagcctgtctgagcggctcttcagcctggagctgctggtggactgggtgcggctggaggcccggctgctgcccagccctgctgctgctgtggagcaggaggaggaggaggaggagaaggagcagggcgaggccagcagcccccggggcctgtgcccagctgtggccttccggctgctggacttccccaccctgctggtgtaccccccagatggccctggggccccagctgctgagccctggccaggagtcatccgcttcggccggggcaagagctgcctcttccggctgcagcctgccaccctgcactgccgcctgctgcggacccccctggccaccctgctgctgcagctgcccccaggccggcccacccccaccccccagctgctgggcgcctgtgacatcagcctggccacagctgcccaccgggtggtgggccctgctgccagcggctgcagccaccgccaccggggccgcttccccctgcacaacagagtgggggagaggactggagacatcgccctggcctaccgcctgacagacctgggcagccggctgctgagccagctggagcggcccctgaccttcaccaggactggaggcggcgctgaggtgagcccccagacccagcaggagcggcagcagctgcagcagcctgccagccagcccagccccaaggaggccgacaagcccctgggggagctggagatccctgaggcccagaaggacctgaaggagatggtgaagagcaaggcagaatgtgacaacgtgggctctgtggagaatggcaagaccaacagcgtggtgacctgcagcggggctggaaatggaagaaatgtgagcagcctgaatgaggaggtgacagagctggacatggagaccaacatcttctgccccccacccctgtactacaccaacctgacccaggagaagcccccaccagcccaggccaagatcaccatcgagccccagatgaatgcccctgaggagatggatgatgccagccctgagaagaagagggtgaaccccccagcccacaggagctgcctgaagcaccccagcagcgctgcccacgagcacccccccatgctggtgaaccccccccacatccagaacattggagccaccaaccagacctgccagacagagcagaaccgcatcaacaccatccggcagctgcccctgctgaatgccctgctggtggagctgagcctgctgtatgaccagcctgtgaccagccctgcccacatccacccccacctggcctggctgtacagaacagaggacaagaagagccctgagagcagcgccaagagcacctgccgctctgaggccaagaaggacaagaggtctgtgggcggctgtgagaagtctgtgtccctgcagtacaagaagaaccagatcgagaactacaaggaggacaagtacagcgagaagagcagcggggccctgcacaagagggtgcccaagggccgcctgctgtatggcctgaccaacaccctgcggctgcggctgaagctgaccaacccagacatgctggtggtgcatgagaagcgggagctgtacaggaagaggcagagccagatgctgggcaccaagttccgcatccccagcagcaaggtgaagctgctgagcagcgctgagcagagccagaagccccagctgcctgaggacaagtacctggacagtgatgccagcttcacagaaaattctgacaccagccggcagatcagcggcgtgtttgatgagcccagcaccagcaaggagaccaagctgaagtatgccacagagaagaagacagtggactgcagcaagaaccgcatcaacaacgtgtccctggaggaggtggtgtccccagccaacagcatcatccctgagcggctgacccccaccaacatcctgggcggcaatgtggagatgaagatccagagcccctgtgtgttccagcaggatgctgtggtggacagaattgtggacaaggagattgacatccggcaggtgaagaccacagacaatgacatcctgatggctgacatcagtgacaagaggacaggcaagaacagctgctatgagaacatcagcgagctgaagtacagtgatgacctgagcagcccctgctacagcgaggacttctgcaccagcgaggacaccagccgctccttcaaggcccatgacagcagcagcaggacagagaaccccaagcacagccagtacaccagcaagagcagtgacacaggagtgtccaagaagaagaacagcagtgacaggagcagcatcctgagcccccccttctctgctggcagccctgtgcacagctacaggaagttccacatcagcaagacccaggacaagagcctggaggaggccagcagcatcagcgccagtgacctgagcagcacccactggacagagcagaaggagaaccagattgaccagaacagcatgcacaacagcgagatcaccaagagggcccaggacatctctgtgaagaccaggagctcctggaagagcctggagaagagccagagcccccagaccagccaggtgtcctcctacctgcccagcaatgtgtctgagctgaatgtgctggacagcagcaccagtgaccactttgaggagggcaatgatgatgtgggcagcctgaacatcagcaagcagtgcaaggacatctgtgagctggtgatcaacaagctgcccggctacaccatgtag

SEQ ID NO: 201337 - DNA, 3144 bp, Artificial Sequence
  derived and/or modified sequence
atggcccactgcggccagctgaccaactggctgtgcctggcctgggaacggaaagagtcgcccgattttctttcaatctttttgcggtatatcgatttaacaccaaagctgcacaaaatctgcagcgacaaaaccattacccagaaaacgcattgcctgctaccccttatcagcagtgctcttagctccatcgtgctaatccaggggtggtggcagaagactgcccataagtacgcttacaagggcgccaagcatatcgagcagcaaaacccacaaagcaggcaccggcctaggcctgccggagcgctcccccagatatctagagattcaaggcagcggtgtttacttttaagattcctggttcgaccacgaggtttctctttttcctttgcagaacccgctgcagccttcccgggtgcgaccgcgatggccgcatcactgtcggagcgtctgttttctttggagctcctggtagactgggtgaggttagaggcccgccttctgccgtccccagctgccgctgtcgagcaggaagaagaagaagaggagaaggagcagggggaggcctcctcaccccgtggcctgtgccctgccgttgcctttcggctgcttgatttcccaaccctgttggtgtacccgccagacggcccaggtgctcccgccgctgaaccttggcctggcgtgatccggttcggccgagggaaatcttgcctttttcgactccaacccgccaccctgcactgccggttgctgagaacgccactggctacattgttattacagttaccacccggcagacccacaccgacaccacagttactcggggcctgcgacatcagcctggccaccgccgcacaccgggtggtgggccccgcagcaagtggttgctcccatcgacacagaggcaggttcccactccacaatagagttggtgagcggaccggcgacatagccctcgcctacaggttgaccgacctgggttccaggcttctgagccagctggagagaccacttaccttcactcgtacaggaggtggtgccgaagtttcccctcagacgcagcaggagaggcagcagctccagcagccagcaagtcagccatcacccaaagaggctgacaaaccgctgggagagctggagatccccgaggcccagaaagatcttaaagagatggtcaaaagcaaagctgaatgcgataatgtgggatctgtggaaaatgggaagaccaactcagtggtaacgtgttccggagctggaaatggcaggaacgtcagttctctcaatgaggaggtgactgaactagatatggagactaatatcttttgccccccgcctttatattacacgaatttaacacaggagaagccaccccctgcacaggcgaaaattacaatcgagccacagatgaatgcccctgaggagatggacgacgctagtcccgaaaagaaacgggtgaaccctcccgcccacaggtcctgcctaaaacacccttccagcgcggctcatgagcaccctccgatgctggtgaatccacctcacatacagaacataggcgcgaccaatcaaacatgccagaccgagcagaacaggataaacacaattcgacagttgcctctgctgaatgctctcctcgtggagctgtctcttctctatgatcagcccgtgacttctcctgcgcatattcatccccacctggcatggctgtatagaaccgaggataagaagtctcccgagagcagtgctaaatcaacttgccgttccgaagcgaaaaaagataagcgaagcgtgggtggctgcgagaagagcgtctcccttcaatacaagaagaaccaaatcgagaattacaaggaggataaatattctgaaaaaagttccggcgctctccacaaacgggtcccaaaggggagactactttacggcttgaccaacacattgcggctaaggctgaaactgactaatcctgacatgctggtcgtgcacgaaaagcgtgagttataccgcaagcgacagtcacagatgctcggcactaaatttcgaatcccatctagtaaagtgaagttgctgtcatcagccgagcagagccaaaaacctcagctccccgaggataagtatctggactccgacgcctccttcaccgagaacagcgatacgtcaaggcagatctcaggagtgtttgacgagcccagcacaagtaaggagaccaagctgaaatacgcaaccgaaaaaaaaactgtggactgcagtaaaaaccggatcaataatgtatctctagaagaggtagtctccccagccaacagtatcatccccgagcgcctgacacccacaaatatcctcggaggtaacgtggaaatgaaaattcaatccccatgtgtgttccagcaggatgctgttgtagatcggatcgtagacaaggagattgacatccgccaggtcaagaccacagacaatgacattcttatggccgacattagcgataagagaacaggaaaaaatagctgctacgagaacataagcgagcttaaatactctgacgacctctccagcccctgctacagcgaggacttctgcacttcagaggatactagcagaagcttcaaggcccacgactcctcaagcaggacggagaatcctaaacactcccagtacacatctaaatcttcggatactggagtctcaaagaagaaaaactctagtgacaggtctagcatcctcagcccaccattttcggccggtagccccgtccactcttaccgtaagtttcacatttctaaaactcaagataagagcctggaagaagcttcatccatatccgcatccgatctgtcgagtactcattggacggagcagaaggagaatcagatcgaccagaatagtatgcacaacagcgaaattacgaagcgtgctcaggacatttccgtgaaaacgcggagtagttggaagtccttggagaagagccagtctccccagacctcacaggtgagcagctatttgccctcaaatgtgtccgagctgaacgtgttggatagtagcacgagcgaccatttcgaagaagggaacgatgatgtgggctcactgaacatttcgaagcagtgcaaagacatctgtgagctggtgatcaacaagttacccggatacacgatgtag

SEQ ID NO: 201338 - DNA, 3144 bp, Artificial Sequence
  derived and/or modified sequence
atggcccattgcggacagctcacgaactggctatgtctagcctgggaaagaaaggaatcacccgatttcctgtctatattcctcagatacattgaccttacccctaagttgcacaagatctgctccgataaaacaattacccagaaaacacattgcttgctgccccttatctcaagcgcccttagctcaattgttctgatccagggatggtggcagaagacagcacataagtatgcctacaaaggcgctaagcatatcgagcaacagaatccacagtccagacaccgacctcgaccagcaggggcactcccgcagataagccgagacagccggcaaagatgtcttcttctcaggttcctggtaaggccgagggggttttcattctcgttcgcggagccagcagccgcttttcctggggctacggcaatggctgccagcctgtctgagagactgttctctttggagcttctagttgattgggtgaggctggaggccaggctcctgccctcccccgctgcagcagtggaacaggaagaagaagaagaagagaaagagcagggggaagcaagtagtcctagaggtctttgtccagccgtcgccttcagattactcgactttcccacactcctcgtttatccaccggacggacctggggctccagcagcggaaccctggcccggagtcatccggttcggtcggggaaagagctgcctgttcagactccaacctgccacactccattgccgactcctcagaacgccgctcgcaacgctgctgctgcagctgcctccaggaaggccaacgccgaccccacagttattgggtgcctgtgacatctctctcgctactgccgctcacagagtggtgggccctgcagcaagcggttgtagccatcgtcaccggggacggtttcctttacacaaccgtgtgggagaacgcactggcgacattgctctggcatacagactgactgatttaggtagccgtctgctgagtcagctcgaaagacccctgaccttcacaagaacaggcggaggagcagaagtgagcccacagacacaacaggaaaggcagcagctccagcagcccgcaagccagccctcaccgaaggaagctgataagccacttggtgagctggaaataccagaggcgcagaaggacctgaaagaaatggtgaagtccaaagctgagtgcgacaacgtgggcagtgtggagaatgggaaaacgaattctgtggtaacgtgtagcggcgctggaaacgggaggaatgtgagctctctgaacgaggaagtaaccgagcttgatatggagactaatattttttgcccccctcccctctattacaccaacctgacccaggagaaacctcctccagcccaggctaagatcacaattgaaccccagatgaacgccccagaggagatggatgatgcctccccagagaagaagagagttaaccctccggcacatcgcagttgtctgaaacatccctcctccgccgcacatgagcaccccccaatgttagtgaatcctcctcacatccagaacatcggcgcaacaaatcagacgtgccagactgagcagaacaggataaataccatccgtcagttgccactcttgaatgccctgctggtcgagctttctctgctttacgaccagcccgtgacatcccctgcccacattcatccacacttagcatggctgtaccgaacagaagataaaaagtctccagaatcctctgccaagtccacgtgtcgctctgaggccaaaaaggacaagcgctccgtgggaggctgcgaaaagtcagtgtccctccagtataagaagaaccagattgaaaactacaaagaggataagtacagcgagaagagcagcggggcattgcataagagggtcccaaaggggagattgttatatggcctgacaaataccctccgcctgcggctcaaactgacaaatccggatatgttggtcgtgcacgaaaaaagggaactgtaccggaagaggcagtctcagatgctgggcacgaagttccgaattccatctagcaaggttaaattgctgtcctccgctgaacagagtcagaagccacagctgcccgaagataagtatcttgactccgacgcttcttttacagagaacagcgacacctcaaggcaaatctccggtgttttcgacgagccctcaacctccaaggagacaaagcttaaatacgctactgagaaaaagactgtggattgctccaaaaatcgcataaacaacgtatcactcgaggaggtcgtgagccctgctaattctattatccccgagaggttgacccccacaaacattcttggcggtaacgtagaaatgaaaatccagagtccctgcgtcttccaacaggacgcggtcgtggaccgaatcgttgataaagagatcgatattagacaggttaaaaccacggacaacgatatcctaatggccgacatctctgataaacgtactgggaagaactcatgctacgagaatatctccgagttaaaatactcggatgaccttagttccccctgttactctgaagatttttgtacttctgaagacacctccaggtcttttaaggcacatgattccagcagcagaactgagaatcctaagcattcgcagtatacaagtaaatccagcgatactggggtgtcaaaaaagaagaatagcagcgataggagcagcattctgagtccccctttctcagccggatccccagttcactcctatcgaaaattccacattagcaagacacaggataaatcactcgaggaggcttcctcaattagcgcaagcgacctctcgtctacccattggaccgaacagaaggagaatcagattgaccagaacagtatgcacaacagcgagattactaaaagggcacaggacatttcagtgaagacccgttcctcatggaaaagcctggaaaaatcacagagtcctcagacttcgcaagtatcatcatacctgccaagtaatgtatcagaacttaatgtgctcgattcatcaacctctgaccactttgaggaaggaaatgacgacgttgggtctctgaatattagtaagcagtgcaaagacatatgcgaactggtgatcaacaagttacccggatatacaatgtag

SEQ ID NO: 201339 - DNA, 5450 bp, Artificial Sequence
  derived and/or modified sequence
gccagtgtattcacactccgtgtgtgtgtggtgtgtctgtctcagtactactgtaattgatgaggcaggggctccctggccatcccagcagtgtcaccatcttttgggtagaacagcagacacagagatggcccactgtggacagttaactaactggctctgtttagcatgggaaaggaaggagagtcctgattttctttcaatattcctcaggtatattgatctgacccccaagttacataagatctgcagtgataaaaccattacccaaaaaactcactgtcttttaccacttatatcctcagcattatcatcaattgtcttaatacaaggttggtggcaaaaaacggctcacaagtatgcatacaaaggggccaaacacattgagcagcaaaacccccaaagcagacaccgcccgagacccgctggagcgcttccgcaaatctcgcgagatagcaggcagcgatgccttttgctccggtttctcgtgagaccccggggcttcagcttctcgtttgcggagcccgcggcggcgtttcctggggcaacagcaatggcggcctcgctgtccgagcggctcttctcgctggagctgctggtggactgggtgcgtttggaagcccggctgctgccgtcccccgctgccgcagtggagcaggaggaggaagaggaggaaaaggagcagggggaggcctcgtcgccgcgcggtctgtgccccgccgtggccttccgcctgctggacttccccacgctgttggtttaccctcctgacggccccggcgctcccgccgccgaaccgtggcccggtgtcatccgcttcggtcgcggcaagtcctgcctcttccgcctgcagcctgctaccctgcactgccggctcctgcggaccccgcttgccaccttgctgctgcagctgccccctgggcgcccgacgcccaccccacagctcctgggggcctgcgacatttcgctggccaccgcagcgcacagggtcgtggggccggccgcctccggatgctcccaccgtcaccggggacgtttccccctgcataatcgagtgggcgagcggactggggacattgcactggcctaccgcctgactgacctgggaagccgcctgctgagccaacttgagcggcccctcaccttcacccgcacaggaggaggagcggaggtcagtccccaaacccagcaggaaagacagcagctgcagcagccagcctcacagccaagcccaaaagaggctgataagccgctgggggagttagaaatcccagaggcacagaaggatttgaaggaaatggttaaaagtaaggccgaatgtgataatgtgggttctgtggagaatggcaaaaccaattctgttgttacatgttcaggtgctggcaatgggagaaatgttagctccctaaatgaggaagtcacagaattggacatggagaccaatatattttgccctcctcctttgtattacactaacttgacccaagaaaaaccgccccctgcacaggctaaaatcaccattgagcctcaaatgaatgcacctgaggaaatggatgatgcttctcctgaaaaaaagcgtgtaaatcccccagcacacaggagttgtctaaagcatccaagttctgcagcacacgaacatcctccaatgcttgtaaatcctccacatattcagaatataggagcaactaatcaaacatgtcaaactgaacaaaatcgaattaatacaataaggcagttgcctttgttaaatgctttgttagttgagttgtccttgttatatgaccaacctgtgacaagtcctgctcatatacatcctcacctagcctggttatataggactgaggataagaagtcacccgaatcttctgccaaatccacatgccggtctgaagccaagaaggataagcgttctgtggggggatgtgaaaagtcagtgagtcttcagtataaaaagaaccaaattgaaaactataaggaagataaatattctgaaaagagcagtggtgccctccataaaagagttccaaaagggaggctactttatggcttaacaaatacactaagactacgtttaaagctgacaaatcctgatatgttggtggtacatgaaaaaagagaactatatagaaaaagacaatcacaaatgttgggtacaaaattcagaattccgtcatccaaagttaaactattaagctctgcagaacaaagtcagaagccacaactgcctgaagataagtatttagattcagatgcatctttcactgaaaatagtgatacctcaagacaaatcagtggagtttttgatgagcccagcacaagtaaagaaactaaactgaaatatgcaactgaaaaaaagacagttgattgtagtaaaaatagaatcaataatgtttcattggaagaagttgtgagtcctgcaaattccattattccagaaaggcttacccctacaaatattctgggaggaaatgtggaaatgaaaatccaaagtccatgtgttttccaacaggatgctgttgttgacagaattgtagataaggaaatagatattagacaggtcaaaaccacagataatgacattcttatggctgatataagtgacaagagaacaggtaaaaatagttgctatgaaaacatctcagaactgaagtattcagatgatttgtctagcccttgctattctgaagatttctgtaccagtgaggacaccagcagaagtttcaaagctcatgatagcagttcaaggacagaaaatccaaaacatagtcaatatacaagcaagtctagtgacacaggagtgtccaaaaagaaaaatagtagtgacaggagttctatccttagcccacctttttcagccgggtcacctgtacactcatacagaaaatttcatatttcaaagactcaggataaaagtttggaggaagcatctagtatctctgctagtgatttatcttcaacacattggactgaacaaaaagaaaaccagatagatcaaaatagtatgcacaattctgaaattacaaagagagctcaagacatctctgttaaaacaagaagtagttggaaatctttagaaaaaagccagtcaccacaaacatcccaggtgagttcttacctgccttcaaatgtgtccgaacttaatgtcctggatagcagtacatcagatcactttgaagaaggcaatgatgatgttggttcactaaatatttccaagcaatgcaaagatatttgtgaattagtaataaataaacttccaggatacacaatgtaaaaatacatgcttttaaaaaactttcaaggacctatgtgtactgttagtgaaaaaaattttaaagctgttttagttcatgaattatgtgaataattttttaaagaaatatgaattaacgttattcctttgatgtttaaatggtattttaccattaaatctgataatattgattattaaatcatataaacagatttctttttaaattgtttaatcataagaataaaagtgtgtctttctaaattgtctctcttaaagtgtctagtctacagtattgatcattctaaagctgacttcatgcacaccactgaaaaagaaggctagttagtaaggacagcctcaaattttaattggaacaaattatttaacaaatatagaagacttactgtgttagatgcagaaaggtgcagaatctatttatgatagagccctgctgttttaaaagcttacagttgtatgtagataagaagtcttccttgacatatacatatcccatatccccaataggtgaagttgcttttatatgctctcatagtgccctgcaccttttgtttataagccacaatttgtgtgattacttgattaaagtttatcttccactaggcttcagttgtgtgatgggatcatatttgttttacacatcagtgcatttttgtatctagcacaattcctggcatgtggctgcagtgcaataaaaacatttgttgaaaaaaacgaagcccaggcatttaaaatacctaatgggagggtttagaattaagcagcaaaaataagcagattccctaaaataaacctgcagaaaatccttattggaaatatatttgactgtaatatttctgttttgcttggtataaatagccttcaggtgttctctgaaatatttggaaagggaaacttaagaaggtatcttttatacagtttctgatataggagttcagtttcttgtcatttcagtttgttcaatggttatttttagtgtatggaactttgtttttatgaaatccagtgataatttataatttattccattggttttatatttagactttattctgtgttcaaatatttacatatattttcttctagctgtgttatactttaatttttagactttttaatatatctaacgtttttgaatgtatgaagtgaggttctaatttcctttctttaaaggtaattaattatataggtattctgaatgatcataatactagaatatagatagatggtaaaaagagagaagaggatgttacattttggggagcaatatgaataaaagagtgatgggaatgagcctgatatatttatgggacaatttaaaatattatcttgaatagaatgatccactcatgctacagagtggtagaaaggacatttgttgagtaaggaaaatgccagattacagagagcctcaaatgctaagtataataatagaattctaagcaataggaataacagattattttaggttataaatgagcactagtaagtagtcatgacattttgaatattttaaattattgaaaataataagcagagaaattatatcagttaaagttttgagatatgaaaggtttctgtggctagtggctatgatcttaatttttctaaaatataaagcatatagtataacatttcacaaaatcaaaatattgtaatgccaggtattgtaactagatgtttaatgatgtgaactgtgtaaattgtttaatagcaatttgtcattactatggaagagacaataaaaatataagcaatatcagaatcatcaaagaaataattccttataaaccaacgttttatttggtagagagtaagtcattgtctgtggtaagaataggtaaaatgattaatttagcaagtctaaggtacaacaagaccaaaaaactaatgcactttaaattacaaagctgagtagctgaatccgcttctctttgagttaatccatgaatacttatttctagaattgtgataattgtttcttctagtctaattctagtgaaaatatctgttttcatgtatttagtccttcctattacattctacaaattctactccatgttttaattctacaatctataagcttattttaaaagaattttgtaatagatactattcatggagccttatttatctccttagttgcttaaaattattgaaacatgaaatagtatttcaagtc

SEQ ID NO: 201340 - protein, 534 aa, Artificial Sequence
  derived and/or modified sequence
MATGLQVPLPWLATGLLLLLSVQPWAESGKVLVVPIDGSHWLSMREVLRELHARGHQAVVLTPEVNMHIKEENFFTLTTYAISWTQDEFDRHVLGHTQLYFETEHFLKKFFRSMAMLNNMSLVYHRSCVELLHNEALIRHLNATSFDVVLTDPVNLCAAVLAKYLSIPTVFFLRNIPCDLDFKGTQCPNPSSYIPRLLTTNSDHMTFMQRVKNMLYPLALSYICHAFSAPYASLASELFQREVSVVDILSHASVWLFRGDFVMDYPRPIMPNMVFIGGINCANRKPLSQEFEAYINASGEHGIVVFSLGSMVSEIPEKKAMAIADALGKIPQTVLWRYTGTRPSNLANNTILVKWLPQNDLLGHPMTRAFITHAGSHGVYESICNGVPMVMMPLFGDQMDNAKRMETKGAGVTLNVLEMTSEDLENALKAVINDKSYKENIMRLSSLHKDRPVEPLDLAVFWVEFVMRHKGAPHLRPAAHDLTWYQYHSLDVIGFLLAVVLTVAFITFKCCAYGYRKCLGKKGRVKKAHKSKTH

SEQ ID NO: 201341 - DNA, 70 bp, Artificial Sequence
  derived and/or modified sequence
ggaataacaacaacaacaaccaaaagacatatagaaaacaaacagcacgatggcagatgtaaagcctacc

SEQ ID NO: 201342 - DNA, 1605 bp, Artificial Sequence
  derived and/or modified sequence
atggccaccggcctgcaggtgcccctgccctggctggccaccggcctgctgctgctgctgagcgtgcagccctgggccgagagcggcaaggtgctggtggtgcccatcgacggcagccactggctgagcatgagagaggtgctgagagagctgcacgccagaggccaccaggccgtggtgctgacccccgaggtgaacatgcacatcaaggaggagaacttcttcaccctgaccacctacgccatcagctggacccaggacgagttcgacagacacgtgctgggccacacccagctgtacttcgagaccgagcacttcctgaagaagttcttcagaagcatggccatgctgaacaacatgagcctggtgtaccacagaagctgcgtggagctgctgcacaacgaggccctgatcagacacctgaacgccaccagcttcgacgtggtgctgaccgaccccgtgaacctgtgcgccgccgtgctggccaagtacctgagcatccccaccgtgttcttcctgagaaacatcccctgcgacctggacttcaagggcacccagtgccccaaccccagcagctacatccccagactgctgaccaccaacagcgaccacatgaccttcatgcagagagtgaagaacatgctgtaccccctggccctgagctacatctgccacgccttcagcgccccctacgccagcctggccagcgagctgttccagagagaggtgagcgtggtggacatcctgagccacgccagcgtgtggctgttcagaggcgacttcgtgatggactaccccagacccatcatgcccaacatggtgttcatcggcggcatcaactgcgccaacagaaagcccctgagccaggagttcgaggcctacatcaacgccagcggcgagcacggcatcgtggtgttcagcctgggcagcatggtgagcgagatccccgagaagaaggccatggccatcgccgacgccctgggcaagatcccccagaccgtgctgtggagatacaccggcaccagacccagcaacctggccaacaacaccatcctggtgaagtggctgccccagaacgacctgctgggccaccccatgaccagagccttcatcacccacgccggcagccacggcgtgtacgagagcatctgcaacggcgtgcccatggtgatgatgcccctgttcggcgaccagatggacaacgccaagagaatggagaccaagggcgccggcgtgaccctgaacgtgctggagatgaccagcgaggacctggagaacgccctgaaggccgtgatcaacgacaagagctacaaggagaacatcatgagactgagcagcctgcacaaggacagacccgtggagcccctggacctggccgtgttctgggtggagttcgtgatgagacacaagggcgccccccacctgagacccgccgcccacgacctgacctggtaccagtaccacagcctggacgtgatcggcttcctgctggccgtggtgctgaccgtggccttcatcaccttcaagtgctgcgcctacggctacagaaagtgcctgggcaagaagggcagagtgaagaaggcccacaagagcaagacccactag

SEQ ID NO: 201343 - DNA, 1605 bp, Artificial Sequence
  derived and/or modified sequence
atggccaccgggctgcaggtgccactgccatggctggcaactggtttactactgttgctttccgtgcagccttgggccgagtcgggaaaggtgctggtggtcccaatcgacggaagccactggctgtctatgagagaggtgcttagagagctccacgctcgaggccatcaggccgtggtgctgacccctgaagtgaatatgcatatcaaggaggaaaacttcttcacacttaccacctacgcaatctcctggacccaggatgagtttgatcggcacgtgctcggtcacacacagttgtatttcgaaaccgagcacttcctaaaaaaattcttccggtccatggcaatgctcaacaacatgagcctggtgtatcacaggtcgtgcgtcgaactgctccataacgaggctctcattagacatctgaacgctacatcctttgacgtggtcctcaccgatccagttaatctgtgtgccgcagtgctggctaaatacctgtctatcccaacggtttttttcttacgcaatatcccttgcgatttggacttcaagggtactcagtgccctaatccttccagttatataccccgtttgctcacgaccaatagcgaccacatgacgttcatgcagagagttaaaaacatgctgtacccacttgctcttagctatatatgccacgcctttagcgccccctatgcatcactcgccagcgaacttttccagcgtgaagtaagtgttgtggatattctgtcccacgcgtcagtctggttgtttcgaggggattttgtgatggactacccacggccaattatgcccaacatggtgtttattggcggtattaattgcgccaacaggaagcctctgtcacaagagttcgaggcttacattaatgcaagcggcgagcatggcatcgtcgtgttctcactgggcagtatggtcagcgaaatcccagaaaagaaggcgatggccatagcggatgctttaggcaaaataccccagacagtgctttggagatacaccggaactaggccttccaacctggccaacaataccatcctcgttaagtggctcccccagaacgatcttctgggccatccaatgacccgcgcatttattacacacgccgggagccacggagtgtatgagagcatctgtaacggggttccaatggtgatgatgcccctcttcggggatcagatggacaatgccaaaaggatggagacaaagggagccggcgttaccctaaatgtgctggagatgacttcagaggatcttgagaacgcacttaaggccgtgatcaatgataaatcatataaggaaaacatcatgcgcctgtcgtccttgcacaaagacagacccgtggaacctctggacctcgctgtattctgggtagaattcgtgatgcgtcacaagggcgcccctcacttaaggcctgccgcccatgatcttacctggtaccagtaccactctctcgacgtaatcggattcctgctggcggtcgtgctaaccgtggccttcatcaccttcaagtgttgcgcatatgggtaccggaagtgcctcggaaaaaagggtcgcgtcaagaaggctcacaaatctaagactcattag

SEQ ID NO: 201344 - DNA, 1605 bp, Artificial Sequence
  derived and/or modified sequence
atggccaccggcctgcaggtgcccctgccctggctggccaccggcctgctgctgctgctgtctgtgcagccctgggccgagagcggcaaggtgctggtggtgcccattgatggcagccactggctgtccatgagggaggtgctgcgggagctgcacgcccggggccaccaggccgtggtgctgaccccagaggtgaacatgcacatcaaggaggagaacttcttcaccctgaccacctacgccatctcctggacccaggatgaatttgacagacatgtgctgggccacacccagctgtactttgaaacagagcacttcctgaagaagttcttccgctccatggccatgctgaacaacatgagcctggtgtaccacaggagctgtgtggagctgctgcacaatgaggccctgatccgccacctgaatgccaccagctttgatgtggtgctgacagatcctgtgaacctgtgtgccgctgtgctggccaagtacctgagcatccccaccgtcttcttcctgaggaacatcccctgtgacctggacttcaagggcacccagtgccccaaccccagcagctacatcccccggctgctgaccaccaacagcgaccacatgaccttcatgcagagggtgaagaacatgctgtaccccctggccctgagctacatctgccacgccttcagcgccccctatgccagcctggccagcgagctgttccagcgggaggtgtctgtggtggacatcctgagccacgcctctgtgtggctgttccggggggactttgtgatggactacccccggcccatcatgcccaacatggtgttcatcggcggcatcaactgtgccaacaggaagcccctgagccaggagtttgaggcctacatcaatgccagcggggagcacggcatcgtggtgttcagcctgggctccatggtgtctgagatccctgagaagaaggccatggccatcgcagatgccctgggcaagatcccccagacagtgctgtggagatacacaggcacccggcccagcaacctggccaacaacaccatcctggtgaagtggctgccccagaatgacctgctgggccaccccatgacccgggccttcatcacccacgccggcagccatggagtgtatgagagcatctgcaatggagtgcccatggtgatgatgcccctgtttggagaccagatggacaatgccaagaggatggagaccaagggggccggcgtgaccctgaatgtgctggagatgaccagcgaggacctggagaatgccctgaaggccgtcatcaatgacaagagctacaaggagaacatcatgaggctgagcagcctgcacaaggacaggcctgtggagcccctggacctggccgtgttctgggtggagtttgtgatgaggcacaagggggccccccacctgcggcctgctgcccatgacctgacctggtaccagtaccacagcctggatgtgattggcttcctgctggccgtggtgctgactgtggccttcatcaccttcaagtgctgtgcctacggctacaggaagtgcctgggcaagaagggccgggtgaagaaggcccacaagagcaagacccactag

SEQ ID NO: 201345 - DNA, 1605 bp, Artificial Sequence
  derived and/or modified sequence
atggccaccggcctgcaggtgcccctgccctggctggccaccggccttctcctgcttctgtccgtacagccctgggctgaaagcggcaaagtgttggtggtgccaatcgatgggtcccactggctttcaatgagagaagtccttcgtgaactccacgcaaggggccaccaggcggtggtgctcacaccagaagtaaatatgcacataaaagaggagaatttttttactttgactacctatgccatttcatggacccaagacgagtttgatagacatgtcctcggtcacactcagctctactttgaaaccgagcacttccttaaaaagtttttccggagtatggccatgctcaacaacatgtcgcttgtgtaccacaggtcatgcgtggaacttcttcacaacgaagccctcattaggcacctcaacgccacatcctttgatgtggtcctgacagaccccgttaatctgtgcgccgccgtactggccaaatatctttccatccccacagtcttcttcctgagaaatattccctgcgacctagattttaagggcactcagtgccctaacccatcttcctacattccaagactgctcacaactaacagtgaccacatgacttttatgcagcgcgtgaagaacatgctgtatcctttagccctcagctacatttgtcacgctttcagtgccccctacgcctctttagcctcggaactgttccagcgcgaagtgtctgtggtggacatcctatctcatgcatctgtgtggctctttagaggggactttgtgatggactatccaaggccaattatgccgaatatggtgttcatagggggaattaattgcgctaaccgcaagccgctctcacaagaattcgaggcctatattaacgctagcggtgagcatggaatcgttgtattcagcctcggctctatggtcagcgaaatccccgagaagaaagctatggctattgccgacgccctgggaaaaatacctcagaccgtactgtggcggtatacaggaacacgcccgagcaacttagctaacaacactatcctcgtgaagtggctcccacaaaacgacctgctgggacatccgatgacgcgagcctttattacccacgcagggtcacatggggtatacgaatccatatgcaacggggtccccatggtgatgatgccgttatttggcgatcaaatggataatgctaagcgcatggagaccaagggcgccggagtcacgctgaacgttttggagatgacatccgaggacctggaaaatgcattgaaggcggtgattaatgataagtcttataaggagaatatcatgcgcctctcttccctccacaaggaccgtccagtcgagcctctagatctggcagttttctgggtcgagttcgtgatgaggcataagggtgccccccatctacggcccgctgctcatgatttaacctggtatcagtaccatagtttggatgtcatcggatttctgctagctgtcgtgctgacggtagcatttataactttcaagtgctgtgcctatggctacaggaagtgcctggggaaaaagggaagagtgaagaaggcccataagtctaagacacactag

SEQ ID NO: 201346 - DNA, 1605 bp, Artificial Sequence
  derived and/or modified sequence
atggctaccggccttcaggtaccgctcccttggcttgcgactggtttactcctgctcttgagcgtgcagccttgggcggaatctggcaaagttttggtcgttcctattgatggaagccattggctctccatgcgtgaggtgcttcgagaactgcatgccaggggccatcaggccgtggtcttgacccccgaggtgaacatgcatataaaagaagagaacttcttcactctaactacttacgccatctcctggacccaggatgaatttgatcgccatgtcttgggccacacccaactatactttgaaactgagcacttcctgaaaaagttctttagaagtatggctatgctgaataacatgagccttgtttaccacaggagttgtgtggagcttctgcacaatgaggcacttatccggcacctgaatgccaccagtttcgacgtggtgctgaccgacccggtgaatctgtgtgccgcagtgcttgcaaagtatctgtcaatcccgaccgtcttcttcctgcgcaacattccctgcgacttagattttaaggggacacagtgtcctaacccttctagctatatacccagacttttaactacaaacagcgaccatatgacgttcatgcagcgtgtgaaaaacatgctttaccctttggcgttatcttatatctgtcatgcattctcagcaccgtatgcgtccctggcttccgaactgtttcaacgggaggtgagtgtcgttgacattctgagccatgccagcgtgtggctgtttagaggggattttgttatggattaccccaggcccatcatgcccaacatggtcttcattggtggtatcaactgtgctaataggaaacccctgagccaggagttcgaggcctatatcaacgcttcaggggaacacgggatcgtggtattttccctggggagtatggttagcgagattccagaaaaaaaagctatggctatcgctgacgcactgggcaaaattcctcagaccgtgctgtggagatacacaggaaccaggccttctaacttagcaaacaatacgattctcgtcaagtggctgcctcagaatgacctgctgggccacccaatgacccgcgcattcatcactcatgcagggtcccatggagtgtatgagtctatctgtaatggtgtccccatggttatgatgccactatttggtgatcagatggataacgccaagcgaatggaaaccaagggggctggggtgaccctcaacgtactggagatgacctccgaagatctagagaacgcgctaaaagcggtgattaatgacaagagttataaagaaaacattatgcgcctgtcgtcgctgcataaggatagacctgtggagccccttgatcttgctgttttttgggtggagttcgtaatgagacacaaaggggctccccatttgagacccgcagcccatgacctcacatggtatcagtaccactcgctggatgtgataggattcctgctggccgtcgtgctcaccgtggcctttatcacatttaaatgctgtgcgtacggctatcgaaagtgtctgggcaagaagggccgagtgaagaaggctcacaaatccaagacccattag

SEQ ID NO: 201347 - DNA, 2364 bp, Artificial Sequence
  derived and/or modified sequence
gtccgtgtcttctgctgagatggccacaggactccaggttcccctgccgtggctggccacaggactgctgcttctcctcagtgtccagccctgggctgagagtggaaaggtgttggtggtgcccattgatggcagccactggctcagcatgcgggaggtcttgcgggagctccatgccagaggccaccaggcagtggtcctcaccccagaggtgaatatgcacatcaaagaagagaactttttcaccctgacaacctatgccatttcgtggacccaggatgaatttgatcgccatgtgctgggccacactcaactgtactttgaaacagaacattttctgaagaaatttttcagaagtatggcaatgttgaacaatatgtctttggtctatcataggtcttgtgtggagctactacataatgaggccctgatcaggcacctgaatgctacttcctttgatgtggttttaacagaccccgttaacctctgcgcggcagtgctggctaagtacctgtcgattcctactgtgttttttttgaggaacattccatgtgatttagactttaagggcacacagtgtccaaacccttcctcctatattcctagattactaacaaccaattcagaccacatgacattcatgcaaagggtcaagaacatgctctaccctctggccctgtcctacatttgccatgctttttctgctccttatgcaagccttgcctctgagctttttcagagagaggtgtcagtggtggatattctcagtcatgcatctgtgtggctgttccgaggggactttgtgatggactaccccaggccaatcatgcccaacatggtcttcattgggggcatcaactgtgccaacaggaagccactatctcaggaatttgaagcctacattaatgcttctggagaacatggaattgtggttttctctttgggatcaatggtctcagaaattccagagaagaaagctatggcaattgctgatgctttgggcaaaatccctcagacagtcctgtggcggtacactggaacccgaccatcgaatcttgcgaacaacacgatacttgttaagtggctaccccaaaacgatctgcttggtcacccgatgacccgtgcctttatcacccatgctggttcccatggtgtttatgaaagcatatgcaatggcgttcccatggtgatgatgcccttgtttggtgatcagatggacaatgcaaagcgcatggagactaagggagctggagtgaccctgaatgttctggaaatgacttctgaagatttagaaaatgctctaaaagcagtcatcaatgacaaaagttacaaggagaacatcatgcgcctctccagccttcacaaggaccgcccggtggagccgctggacctggccgtgttctgggtggagtttgtgatgaggcacaagggcgcgccacacctgcgccccgcagcccacgacctcacctggtaccagtaccattccttggacgtgattggtttcctcttggccgtcgtgctgacagtggccttcatcacctttaaatgttgtgcttatggctaccggaaatgcttggggaaaaaagggcgagttaagaaagcccacaaatccaagacccattgagaagtgggtgggaaataaggtaaaattttgaaccattccctagtcatttccaaacttgaaaacagaatcagtgttaaattcattttattcttattaaggaaatactttgcataaattaatcagccccagagtgctttaaaaaattctcttaaataaaaataatagactcgctagtcagtaaagatatttgaatatgtatcgtgccccctctggtgtctttgatcaggatgacatgtgccatttttcagaggacgtgcagacaggctggcattctagattacttttcttactctgaaacatggcctgtttgggagtgcgggattcaaaggtggtcccacggctgcccctactgcaaatggcagttttaatcttatcttttggcttctgcagatggttgcaattgatccttaaccaataatggtcagtcctcatctctgtcgtgcttcataggtgccaccttgtgtgtttaaagaagggaagctttgtacctttagagtgtaggtgaaatgaatgaatggcttggagtgcactgagaacagcatatgatttcttgctttggggaaaaagaatgatgctatgaaattggtgggtggtgtatttgagaagataatcattgcttatgtcaaatggagctgaatttgataaaaacccaaaatacagctatgaagtgctgggcaagtttactttttttctgatgtttcctacaactaaaaataaattaataaatttatataaattct

SEQ ID NO: 201348 - protein, 301 aa, Artificial Sequence
  derived and/or modified sequence
MLALRVARGSWGALRGAAWAPGTRPSKRRACWALLPPVPCCLGCLAERWRLRPAALGLRLPGIGQRNHCSGAGKAAPRPAAGAGAAAEAPGGQWGPASTPSLYENPWTIPNMLSMTRIGLAPVLGYLIIEEDFNIALGVFALAGLTDLLDGFIARNWANQRSALGSALDPLADKILISILYVSLTYADLIPVPLTYMIISRDVMLIAAVFYVRYRTLPTPRTLAKYFNPCYATARLKPTFISKVNTAVQLILVAASLAAPVFNYADSIYLQILWCFTAFTTAASAYSYYHYGRKTVQVIKD

SEQ ID NO: 201349 - protein, 205 aa, Artificial Sequence
  derived and/or modified sequence
MLALRVARGSWGALRGAAWAPGTRPSKRRACWALLPPVPCCLGCLAERWRLRPAALGLRLPGIGQRNHCSGAGKAAPRPAAGAGAAAEAPGGQWGPASTPSLYENPWTIPNMLSMTRIGLAPVLGYLIIEEDFNIALGVFALAGLTDLLDGFIARNWANQRSALGSALDPLADKILISILYVSLTYADLIPANTCQVFQSLLCHC

SEQ ID NO: 201350 - DNA, 906 bp, Artificial Sequence
  derived and/or modified sequence
atgttagctctcagagtggctcgcggttcttggggagccctcaggggcgctgcttgggctccaggcacacggccgagtaagagaagggcttgctgggctctgctgccaccggttccctgctgtcttggatgcctagcggagaggtggcgtctacgcccggcggcgctggggcttagacttcccggcatcggccagaggaaccattgctccggcgctggcaaagctgcccctaggccagctgctggtgccggagccgcagctgaggccccaggaggacagtggggtcccgcaagcacaccttccttgtatgagaacccttggactattccgaacatgctgtccatgacccggattggactcgctcctgtgctaggctatctaatcatagaggaggattttaacatcgctctcggcgtcttcgcactagcaggattaactgacctgctggatggctttatagctcgtaactgggccaatcagcgctcagccctcggatcggctcttgacccactcgcagataagatattgataagtatcctgtacgtgagcctcacctatgcagacctgattcccgtacccctgacgtacatgatcatctcccgtgatgttatgctgatagcggccgtgttctatgttcgttaccggaccttacctacacccagaacgcttgccaagtacttcaacccgtgttacgcaaccgcacgcctcaagccaaccttcattagcaaggtcaacactgcagtccagcttattttggtggccgctagcctggcagcccccgtgttcaattatgctgattcgatctatctccagatcttgtggtgcttcacagctttcaccactgccgcttcagcttactcttattaccactatggaaggaagactgtacaggtcatcaaggactag

SEQ ID NO: 201351 - DNA, 906 bp, Artificial Sequence
  derived and/or modified sequence
atgctggccctgcgggtggcccggggctcctggggcgccctgcggggagctgcctgggcccctggcacccggcccagcaagaggcgggcctgctgggccctgctgccccctgtgccctgctgcctgggctgcctggccgagcgctggaggctgcggcctgctgccctgggcctgcggctgcccggcatcggccagaggaaccactgcagcggggccggcaaggccgcccccaggcctgctgctggagctggagctgctgctgaggcccctgggggccagtggggccctgccagcacccccagcctgtatgagaacccctggaccatccccaacatgctgtccatgacccgcatcggcctggcccctgtgctgggctacctgatcatcgaggaggacttcaacatcgccctgggcgtgtttgccctggccggcctgacagacctgctggatggcttcatcgccaggaactgggccaaccagaggtctgccctgggcagcgccctggaccccctggccgacaagatcctgatcagcatcctgtatgtgtccctgacctatgctgacctgatccctgtgcccctgacctacatgatcatcagcagagatgtgatgctgattgctgctgtgttctacgtgcgctaccgcaccctgcccacccccaggaccctggccaagtacttcaacccctgctacgccacagcccggctgaagcccaccttcatcagcaaggtgaacacagctgtgcagctgatcctggtggccgccagcctggccgcccctgtgttcaactatgctgacagcatctacctgcagatcctgtggtgcttcaccgccttcaccacagctgccagcgcctacagctactaccactacggcaggaagacagtgcaggtgatcaaggactag

SEQ ID NO: 201352 - DNA, 906 bp, Artificial Sequence
  derived and/or modified sequence
atgctggccctgcgggtggcccggggcagctggggcgccctgcggggcgcggcatgggctcccggcacaaggccgtccaaaagaagagcctgttgggctctgctgcctcccgtgccatgttgtctgggctgtctcgccgagagatggagactgaggcctgctgcactcggcctgcgcctaccgggaattggccaaaggaaccactgcagcggtgctggtaaggctgcacctcggccagcagctggtgctggcgctgcagccgaagcaccaggcgggcagtggggtcctgcttccacacctagcctgtatgaaaatccatggaccatacctaatatgttatctatgacgagaattggcctagccccagtactgggttacctcataattgaggaggacttcaacatcgccctcggcgtgttcgcattggctggtctcacggaccttttggacggttttatagcgagaaattgggcaaaccagcgcagtgctctgggatcagcattggaccctctcgccgacaagatcctcattagcattctttacgtgtcattgacctacgctgacctgatcccggtgcccttaacttacatgattatcagccgggatgtcatgcttattgcagcagtgttctatgttagatatagaacattgcccacccccaggaccctagctaagtattttaacccatgctacgccacagccagactgaaaccaaccttcataagtaaagtgaacacggctgtacagttgattctggtggcagcgagcttggcagcaccagttttcaattatgcagactctatttatttgcagattctatggtgctttacagcgtttacaactgccgcaagtgcttattcttattaccattacggacgcaagacagtgcaggttattaaagactag

SEQ ID NO: 201353 - DNA, 906 bp, Artificial Sequence
  derived and/or modified sequence
atgctggctctacgcgtggcccgtggtagttggggggctctgcgaggcgcagcctgggcaccaggcacccgtcccagcaagagacgggcttgctgggccttgctccctccggttccctgctgcctcggctgtcttgccgagcgctggaggttaagacctgcagcattggggctgcggctgccaggcatcgggcagcggaaccattgctcaggagccggaaaggcagctcctaggcctgccgcaggagctggcgcagctgctgaggccccaggcggtcagtggggacctgcctctaccccttccctatacgagaacccctggaccatcccaaacatgttatcaatgactagaattggtctcgccccagtactcgggtatctcataatcgaggaggacttcaacatagccctgggggtctttgccctcgctggactgactgatttgcttgacggctttatagctcggaattgggcaaatcagaggtcagctctcggcagcgccctggacccgctagcagacaagatcctgatctcaattctctacgttagcttgacatacgccgacctcatacccgtaccattaacctacatgattatttctagagacgtgatgcttattgctgccgtgttttatgtccggtatcggacccttcctacccctcggacactggctaaatactttaatccttgctacgcaaccgcacgtctaaagcctacctttatttccaaagtgaacaccgccgtccagcttatcctggttgccgctagcctcgccgctccggtgttcaactatgcagattcgatctacctgcagatactatggtgctttacggctttcacgacggccgcatccgcctatagttactatcactacggacggaagaccgttcaggtgatcaaggactag

SEQ ID NO: 201354 - DNA, 3958 bp, Artificial Sequence
  derived and/or modified sequence
tgtataagtggagtgtgctggggtgtgtaaagtagtatggaggcagcggtagcccagtgtctgagtggttgccgggtctccatggagaagcggctcgccagtgtcccaggctgctgagctctcgccgcccgagaccccgcggcgcggccgcagggccatgctagccttgcgcgtggcgcgcggctcgtggggggccctgcgcggcgccgcttgggctccgggaacgcggccgagtaagcgacgcgcctgctgggccctgctgccgcccgtgccctgctgcttgggctgcctggccgaacgctggaggctgcgtccggccgctcttggcttgcggctgcccgggatcggccagcggaaccactgttcgggcgcggggaaggcggctcccaggccagcggccggagcgggcgccgctgccgaagccccgggcggccagtggggcccggcgagcacccccagcctgtatgaaaacccatggacaatcccgaatatgttgtcaatgacgagaattggcttggccccagttctgggctatttgattattgaagaagattttaatattgcactaggagtttttgctttagctggactaacagatttgttggatggatttattgctcgaaactgggccaatcaaagatcagctttgggaagtgctcttgatccacttgctgataaaatacttatcagtatcttatatgttagcttgacctatgcagatcttattccagttccacttacttacatgatcatttcgagagatgtaatgttgattgctgctgttttttatgtcagataccgaactcttccaacaccacgaacacttgccaagtatttcaatccttgctatgccactgctaggttaaaaccaacattcatcagcaaggtgaatacagcagtccagttaatcttggtggcagcttctttggcagctccagttttcaactatgctgacagcatttatcttcagatactatggtgttttacagctttcaccacagctgcatcagcttatagttactatcattatggccggaagactgttcaggtgataaaagactgatgaaagtcatccctcactgttagtaaggaagcagtatacatcaatgggaacagggcccatggaaatgtacaggagtttccctattttggtgttcagcttgaaaaaggacttgtcagaatcaactgtgtcatcaaaatttaagtaatgtgcattgaaaataaggttgatcatgggaatatgcagaatttccaatgtatttttaaatacaaataaaattgtaatttagaatttttaatcttaggtttcttgattaatttataagagatcaattattgtcagtcttttttgtatgttttttaaaaacatagtccagagcatgggcagaattgacacctctcttttaagtgaaatttggattgctcacaaagcactaggaaatgtcatggggttcaaatatatatcctacacaactgggcaatacatttttgtttgatttttaggtctgtgtatacattaacagttcatgtaattaatacctgatcatttgggataatgaaagtgaagttagttgtagatgaagtaaagttataaaagagattaaaaatgcggtaactttttaagataataatcatacagaaggtatgaagttcattttcggtagtcttccaacctctcaggtgcctaataatttatgtttgaggataacaggtaacaaagatagtcgagataggagaacgtgtctattagtctttgcatctaaaaggcagtgagttacgttcctgccttccactgtgtttctgacatagcaatgtttgtttgatattggaacctggattcatattttatgtaaataatatcaagctgtatatttttcaaaggttttttaaactttggagactctttcttttgttaagcagttaaaggaataaaagagctggaaaaaaaattgtaccttcaactcaggttgttccatataacatacgtattctctgctgttacgtaagttttccgattcacagagtccattcatgtacatcacttacacttaaattgtaaaaataattagtctgaccatctgactttaaaagactgttgctacacgtacatcatgtttaggagaatgtgggatatggggaaggggagaagaagacagtccagtggtgactagttgctgctgcttaacctatggcctattgctgcccattgtccctggttttaatccaagcctattatggaatactgcagtgagattatccattctcagcctgttgagctgcattaaattagaatgggaggctgtaagtaaaactcatgcctcttggccaggcattctgcaccagcgtgtccctctgtggcttgctggtcctggttgttctcagactggcagctgagctgcgcttggcttgaagcatactgaagcctgcagccagggacaccgccattgaatcagatggagggggatgaaaaagcagagaagggggcatgtggctggctattcttgctctctggagaacagcttcattgttaggagtagttaggctgaaagtggacttcccactgctgagccacccaagaggcacactgagcattagtgacgggtgagccacataagaataatgtttaaaaaagagaggacttgaagtagctatgcgaaaatttagaactttgcactttgttaacgcttatttatggtttagtgttgatgccatttggagtgacctatgggttggacccatatctttttattattaaggtctcaatctggctctggttaataaacgtttcccgcttcatcccttaggaaaatggtccaagtctcctcaggcttttggatactgaattgttataaaacacatcaattctgccagtttataaaacactggaattgtattagacatgtctgagtatgtacttgtttatagactcaaaacatgatgaaaattcatttcattgtcttcactgaatagacttaaccttgacagtaagcttaaagcattagtgtcatttaattacatgtctgaggaatttatgctaactagattttgggcttttgcagcgaattttagtcggggcctcattcctgagcccaagtgaccctttcacctcagcttcccaagtagctgggattacaggtgcacaccaactgtgctttgcagttttgtttgtgtgtgtgtgtgtgtgtgtgtgtgtgtgtgtgtgtgtgtgtattttgttttttttacaagcccacaacatcatagctttgcagtttttaaccaggagctggtggagatctttgaaatcatttaggccaattcttttagttacatttatgatgaaactagggatctaccttaaagttttgggaagctctttcaaaacttcagacacctagaaatatatatagtgcagttcagttttagtttctgcagcatggtttggaaacaaaagatacataggatttaaactcgatttgttttcttcttacagtagaagtaaatgctcttgtggcttgaatcgcatctcccaagaaagatacgttcacgttcaaacccccagtactgtacatgtgaccttatttggaaatagggtctttttagatgcagtcaagatagaattagatcatactggattacagtgggccccaataactaggtttttttgttaaaaaaaaaaaaaaaggaaatgtgaacagagagagaatgccgtgagatgatggagggatagattggaatgatgtctgcgagctaaggaatactgaggattgctgccaaccatccgaagctgggagaggagatggaacaactccctcggagcctccaagaggaaccaaccccactgatgctttgatttgggatttccggcctgaactgtaggaaaataaatttctgttcttttaagccatttttaccagtttgtggtaacttgttacagcagctgcaggaaattaataaatgccaatgttgaaaattaaaa

SEQ ID NO: 201355 - DNA, 906 bp, Artificial Sequence
  derived and/or modified sequence
atgctggccctgagagtggccagaggcagctggggcgccctgagaggcgccgcctgggcccccggcaccagacccagcaagagaagagcctgctgggccctgctgccccccgtgccctgctgcctgggctgcctggccgagagatggagactgagacccgccgccctgggcctgagactgcccggcatcggccagagaaaccactgcagcggcgccggcaaggccgcccccagacccgccgccggcgccggcgccgccgccgaggcccccggcggccagtggggccccgccagcacccccagcctgtacgagaacccctggaccatccccaacatgctgagcatgaccagaatcggcctggcccccgtgctgggctacctgatcatcgaggaggacttcaacatcgccctgggcgtgttcgccctggccggcctgaccgacctgctggacggcttcatcgccagaaactgggccaaccagagaagcgccctgggcagcgccctggaccccctggccgacaagatcctgatcagcatcctgtacgtgagcctgacctacgccgacctgatccccgtgcccctgacctacatgatcatcagcagagacgtgatgctgatcgccgccgtgttctacgtgagatacagaaccctgcccacccccagaaccctggccaagtacttcaacccctgctacgccaccgccagactgaagcccaccttcatcagcaaggtgaacaccgccgtgcagctgatcctggtggccgccagcctggccgcccccgtgttcaactacgccgacagcatctacctgcagatcctgtggtgcttcaccgccttcaccaccgccgccagcgcctacagctactaccactacggcagaaagaccgtgcaggtgatcaaggactag

SEQ ID NO: 201356 - protein, 809 aa, Artificial Sequence
  derived and/or modified sequence
MFKSLTKVNKVKPIGENNENEQSSRRNEEGSHPSNQSQQTTAQEENKGEEKSLKTKSTPVTSEEPHTNIQDKLSKKNSSGDLTTNPDPQNAAEPTGTVPEQKEMDPGKEGPNSPQNKPPAAPVINEYADAQLHNLVKRMRQRTALYKKKLVEGDLSSPEASPQTAKPTAVPPVKESDDKPTEHYYRLLWFKVKKMPLTEYLKRIKLPNSIDSYTDRLYLLWLLLVTLAYNWNCCFIPLRLVFPYQTADNIHYWLIADIICDIIYLYDMLFIQPRLQFVRGGDIIVDSNELRKHYRTSTKFQLDVASIIPFDICYLFFGFNPMFRANRMLKYTSFFEFNHHLESIMDKAYIYRVIRTTGYLLFILHINACVYYWASNYEGIGTTRWVYDGEGNEYLRCYYWAVRTLITIGGLPEPQTLFEIVFQLLNFFSGVFVFSSLIGQMRDVIGAATANQNYFRACMDDTIAYMNNYSIPKLVQKRVRTWYEYTWDSQRMLDESDLLKTLPTTVQLALAIDVNFSIISKVDLFKGCDTQMIYDMLLRLKSVLYLPGDFVCKKGEIGKEMYIIKHGEVQVLGGPDGTKVLVTLKAGSVFGEISLLAAGGGNRRTANVVAHGFANLLTLDKKTLQEILVHYPDSERILMKKARVLLKQKAKTAEATPPRKDLALLFPPKEETPKLFKTLLGGTGKASLARLLKLKREQAAQKKENSEGGEEEGKENEDKQKENEDKQKENEDKGKENEDKDKGREPEEKPLDRPECTASPIAVEEEPHSVRRTVLPRGTSRQSLIISMAPSAEGGEEVLTIEVKEKAKQ

SEQ ID NO: 201357 - DNA, 2430 bp, Artificial Sequence
  derived and/or modified sequence
atgttcaaaagtctgactaaagtcaataaggttaagcccatcggcgagaataatgagaacgagcagagctccaggagaaatgaggagggcagccatccctcaaaccaatcccaacaaactacagcccaagaagagaacaagggcgaagagaagagcctcaagactaagtccaccccagtaaccagtgaagaacctcataccaatatccaggataagctgtccaaaaagaacagcagcggggacttaacgaccaatccagaccctcagaacgctgcggaacccaccgggactgtcccagaacagaaggaaatggatcccggcaaggagggccccaacagtcctcagaacaaacccccagccgctcccgtcatcaacgaatacgccgacgcccagctgcacaacttagtaaagcgcatgcgacagcgaaccgccctctataagaagaaattagtggagggagatctgagcagtcccgaagcttcaccccagacagcaaagccaacagccgtgccacctgtcaaggagtccgacgacaagccgacagaacactattataggctgctgtggttcaaagttaagaaaatgcctcttacggagtacctgaagagaataaagctccccaactccatcgacagctataccgacagactgtacctcttgtggctactgctggtaacactcgcctacaattggaactgctgtttcattcctctccgtcttgtgtttccttatcaaaccgccgataacattcattactggctgatcgccgatattatctgcgacataatttatttatacgacatgctcttcattcaacccagattacagttcgtgaggggcggtgatattatcgtagactcaaatgaattaagaaaacattatcggacatcaaccaagttccagctcgacgttgcgtcgatcattccattcgatatctgctatctcttctttgggtttaacccaatgttcagagccaataggatgctgaaatacacgtccttcttcgagtttaaccaccacttggaatccatcatggataaggcctacatttaccgggtgatcaggacgacaggatatctcctctttatccttcatatcaatgcctgcgtatactattgggcctctaactacgaaggcatcggtactacgaggtgggtctacgacggcgagggcaacgagtatcttcgctgctactactgggcggttcgtactctgattaccatcggcgggctgcctgagccacagaccctgtttgagattgtgttccagttgctgaattttttctccggtgtcttcgtgttcagtagcctcatcgggcagatgagggacgtcattggcgccgcgaccgcaaaccagaactacttcagagcctgcatggatgatactattgcttacatgaataactactccattccgaaactagttcagaagagagtgcgaacctggtatgagtatacatgggactcacagagaatgctggatgaaagtgaccttctcaagaccctgcccactacggtccaactagctcttgcaatcgatgtgaatttcagcataatcagtaaggtggatttatttaagggctgcgacactcagatgatttatgacatgctcttgagactgaagtcagtgctgtatctgccaggggactttgtttgtaagaagggcgagatcgggaaggagatgtacatcatcaaacatggggaggtacaggtgcttggcggaccggacgggacaaaggttctggttacactaaaggcaggatctgtgttcggcgaaatatcccttctcgcggccggtggaggaaataggcgcacagccaacgtggttgcacacggttttgccaacttactcaccctcgataaaaagacgttgcaggaaatcctggttcactacccagactccgagcggattctgatgaagaaagctagggttttgctgaagcagaaggcaaagacagcagaagccacgcctccaaggaaggacctagccctgctttttcctccaaaagaggaaactcccaaactcttcaaaacactactcggagggaccggtaaagcttcactggccagactgttgaagctgaaaagggagcaggctgcacaaaagaaagagaatagtgaagggggagaggaggaaggtaaagagaacgaagacaagcaaaaagaaaatgaggacaaacagaaggaaaatgaagacaagggcaaggagaatgaggacaaggataagggacgcgagcctgaagagaagcccttggatcgacccgaatgcaccgcttcaccaatcgccgtagaggaggagccacatagcgtgcgccgcactgtcctgcctcgcggcacaagtcgtcagtctttaatcatttccatggcaccatcagccgagggaggagaggaagtgctgacaatagaggtgaaggagaaagcgaagcagtag

SEQ ID NO: 201358 - DNA, 2430 bp, Artificial Sequence
  derived and/or modified sequence
atgttcaagagcctgaccaaggtgaacaaggtgaagcccatcggggagaacaatgaaaatgagcagagcagcagaagaaatgaggagggcagccaccccagcaaccagagccagcagaccacagcccaggaggagaacaagggggaggagaagagcctgaagaccaagagcacccctgtgaccagcgaggagccccacaccaacatccaggacaagctgagcaagaagaacagcagcggggacctgaccaccaacccagacccccagaatgctgctgagcccactggaacagtgcctgagcagaaggagatggaccccgggaaggagggccccaacagcccccagaacaagcccccagctgcccctgtgatcaatgaatatgcagatgcccagctgcacaacctggtgaagaggatgaggcagaggacagccctgtacaagaagaagctggtggagggggacctgagcagccctgaggccagcccccagacagccaagcccacagctgtgccccctgtgaaggagagtgatgacaagcccacagagcactactaccgcctgctgtggttcaaggtgaagaagatgcccctgacagagtacctgaagaggatcaagctgcccaacagcattgacagctacacagaccggctgtacctgctgtggctgctgctggtgaccctggcctacaactggaactgctgcttcatccccctgcggctggtgttcccctaccagacagctgacaacatccactactggctgattgctgacatcatctgtgacatcatctacctgtatgacatgctgttcatccagccccggctgcagtttgtgcggggcggggacatcatcgtggacagcaatgagctgaggaagcactaccgcaccagcaccaagttccagctggatgtggccagcatcatcccctttgacatctgctacctgttcttcggcttcaaccccatgttccgggccaacaggatgctgaagtacaccagcttctttgagttcaaccaccacctggagagcatcatggacaaggcctacatctacagagtcatccgcaccaccggctacctgctcttcatcctgcacatcaatgcctgtgtgtactactgggccagcaactatgagggcatcggcaccacccgctgggtgtatgatggagagggcaatgagtacctgcgctgctactactgggccgtgaggaccctcatcaccatcggcggcctgcctgagccccagaccctgtttgagatcgtgttccagctgctgaacttcttctctggagtgtttgtgttcagcagcctcatcggccagatgagagatgtgattggagctgccacagccaaccagaactacttccgggcctgcatggatgacaccatcgcctacatgaacaactacagcatccccaagctggtgcagaagagggtgaggacctggtatgagtacacctgggacagccagaggatgctggatgaaagtgacctgctgaagaccctgcccaccaccgtgcagctggccctggccattgatgtgaacttcagcatcatcagcaaggtggacctcttcaagggctgtgacacccagatgatctatgacatgctgctgcggctgaagtctgtgctgtacctgcccggggactttgtgtgcaagaagggggagatcggcaaggagatgtacatcatcaagcacggggaggtgcaggtgctgggcggcccagatggcaccaaggtgctggtgaccctgaaggccggctctgtgtttggagagatcagcctgctggccgccggcggcggcaacagaagaacagccaacgtggtggcccacggctttgccaacctgctgaccctggacaagaagaccctgcaggagatcctggtgcactacccagacagcgagcgcatcctgatgaagaaggcccgggtgctgctgaagcagaaggccaagacagctgaggccaccccacccaggaaggacctggccctgctcttcccccccaaggaggagacccccaagctgttcaagaccctgctgggcggcaccgggaaggccagcctggcccggctgctgaagctgaagcgggagcaggccgcccagaagaaggagaacagcgagggcggggaggaggagggcaaggaaaatgaagacaagcagaaggaaaatgaagacaagcagaaggaaaatgaagataaaggcaaggaaaatgaagacaaggacaagggccgggagcctgaggagaagcccctggacagaccagaatgtacagccagccccatcgctgtggaggaggagccccacagcgtgagaagaacagtgctgccccggggcaccagccggcagagcctcatcatctccatggcccccagcgctgagggcggggaggaggtgctgaccatcgaggtgaaggagaaggccaagcagtag

SEQ ID NO: 201359 - DNA, 2430 bp, Artificial Sequence
  derived and/or modified sequence
atgttcaagagcctgaccaaggtgaacaaggtgaagcccatcggcgagaacaacgaaaatgagcagtcatccagaaggaatgaagagggctcccatccttctaaccaatcccaacagactaccgcgcaggaggagaataaaggagaggaaaaaagtctgaaaacgaaaagcactccggtcactagcgaggagccgcacactaacatccaggataagctcagtaagaaaaactcaagcggagatctcaccactaatcccgatccacagaacgccgcagagcctaccgggactgtgccagaacagaaggagatggaccctggaaaggaaggcccgaacagcccacaaaacaaaccccccgccgcccccgttatcaatgagtatgccgacgcccagctccacaatctagtaaaacggatgaggcagagaaccgccctatacaaaaagaaactggtggaaggcgatctgtccagtcctgaggcttcgccgcagactgctaagccgacggccgttccccccgttaaagagtcggatgacaaacctactgaacactattacaggctcttgtggtttaaagtaaagaagatgccactcaccgagtaccttaagaggataaagctgcctaattctatcgacagctacaccgataggctgtatctgctgtggcttctcctggtgactctggcctacaactggaactgttgctttattccattgcgtcttgtgtttccttaccagacagctgataatatacactactggttgatcgctgatatcatctgtgatattatttatttatacgacatgctgtttattcagccacgcctgcagttcgttcggggaggggatatcatagtggacagtaacgagctaagaaagcattatcgcaccagcactaagtttcaactggacgtggcgagtattattccctttgatatctgttatctcttctttgggttcaaccctatgttcagagctaatcgcatgctgaagtacacttctttttttgaatttaatcatcatctggagtccataatggacaaggcctacatctaccgtgtcataaggaccaccgggtatcttctgtttatcctacacattaatgcatgcgtctactactgggcctcgaattatgaagggatcgggacaactagatgggtgtatgatggagaaggcaacgaatacttacggtgttactattgggcagtcagaaccctcatcactatcggcggcctaccggaacctcaaaccctgtttgaaatcgttttccaactcctcaatttcttcagtggggtcttcgtgttttccagcttaatcggccagatgcgagatgtgattggggcggccactgcgaatcagaattattttagggcgtgtatggatgacacgattgcctatatgaacaactatagtataccgaagctggttcagaagagggtccgcacatggtatgagtatacctgggactcacaacgtatgttggatgagagcgacctactgaaaacactgcccaccaccgtccagctggcattggcaatcgatgtgaatttttctatcatcagtaaagtggatctgtttaaaggatgcgatactcagatgatatatgacatgttgctgcggctgaaaagcgtcctttatctgccaggggattttgtgtgtaagaagggagaaatcgggaaggaaatgtatatcatcaaacatggcgaggttcaagtacttggcggtcccgacggcactaaagtgttggtcacactgaaagcaggtagcgtcttcggcgaaatctcgttgctggctgcggggggcggaaatcgacggactgccaatgtagttgctcacggatttgccaacctcctaaccctagacaagaaaacgctacaagaaatactcgtgcattatcccgatagcgagaggatcctgatgaagaaagcacgggttcttttaaagcagaaggccaaaaccgccgaggcaacccccccgcgtaaggacctagcactcctgtttccacccaaggaggaaacacctaagctctttaaaacgctgctcgggggcaccggcaaggccagtctggcaagactcttgaagttgaagagagaacaagcggcccaaaagaaagagaactccgagggcggagaagaagagggaaaagagaatgaggataagcagaaagaaaacgaagataagcagaaagagaatgaggacaagggcaaggaaaatgaggacaaggataaaggtcgggaaccagaagagaagccactagacagaccagagtgtactgctagcccgatcgcagtggaggaagagccacacagcgtgcggcggacagtcctgccccggggtaccagtaggcagtcactgatcatctccatggctccttccgccgaggggggggaagaagtgctgaccatagaggtgaaggagaaagcaaagcagtag

SEQ ID NO: 201360 - DNA, 2430 bp, Artificial Sequence
  derived and/or modified sequence
atgttcaagtctcttaccaaagtgaacaaagtgaagccaattggggagaacaacgagaacgagcaatctagcagacggaatgaggaaggaagccacccctcaaaccagagccagcagacaacagcccaggaggaaaacaaaggtgaggaaaagagtctgaaaactaaatcaactccagtgacctcagaggaaccgcatactaatattcaggacaagttgtccaagaaaaattccagcggcgacctgaccactaatcctgacccacagaacgcagccgagcctacaggtaccgtgcccgaacagaaagaaatggaccctggcaaggaaggacccaatagtccgcagaataagcctcctgctgcccctgtcatcaatgagtatgctgatgcccagctgcataatttggttaagcgcatgcggcagcggaccgccctctacaagaaaaaacttgtggagggggatttatcgagcccagaagctagcccacagacagctaagcccaccgccgtgccacctgtgaaggaatcagatgacaagcctacagaacattactatagacttctgtggtttaaagtgaaaaagatgcctctgacagagtatctgaagcgtatcaaactgccaaattccattgattcctacactgatcggctgtaccttctttggctgctgctggtgactctagcatacaattggaactgctgttttatcccattacggctcgtttttccctatcagaccgcggacaacatacattactggctgatcgccgatataatctgcgacataatctatttgtatgacatgttgttcattcagcctcggctccagtttgtacggggtggggacattatcgtggattccaatgaactgagaaaacattaccgcacctctaccaaattccagctggatgtcgcatctataatccccttcgacatctgctacctgttcttcggcttcaatccaatgtttcgcgcaaatcgtatgctcaagtacacatctttctttgaattcaatcatcatctcgagtcgatcatggacaaggcctatatctacagggtaataaggaccactggttatctgctctttatcctgcatattaacgcctgcgtgtactactgggcctcaaactacgaaggaattggaacgacacgatgggtgtacgacggcgaggggaacgagtacctacgatgctattactgggcagtgagaacgctgatcaccatagggggactgccagagccccagaccttgttcgagattgtattccagcttctcaactttttctcaggagtatttgtcttctcctcattgattggccagatgcgggatgttattggggcagcgaccgctaatcagaattatttcagagcatgtatggatgacacaattgcctacatgaataactattccatccctaaattagtacagaaacgggtgagaacttggtatgagtatacctgggactcccaacggatgttggatgagagcgatctgctcaagacgttaccaaccactgtgcagttagcactggcgatcgacgtcaatttctctattataagcaaagtggatctcttcaaaggatgtgatacccagatgatttatgatatgttattaagacttaagagcgtcctgtatcttcctggcgatttcgtttgcaagaagggtgagatcggtaaggagatgtacattatcaagcatggtgaagttcaggtcctaggcggacctgatggaactaaagtactagtgacactgaaggctgggagcgtttttggcgagatttcacttttggccgctggaggtggtaatcgtaggaccgccaatgtggtcgcacatggtttcgcaaatcttctgacattggacaaaaagaccttgcaggaaatcttagttcactaccctgactccgagaggattcttatgaaaaaggcccgtgttctcctcaagcagaaggccaagacagctgaggctacacctcccaggaaggatttggccttgctgtttccacctaaggaagaaacccccaagctttttaaaactcttctcggcggtaccggcaaggccagtctggcgagactgctgaagcttaaaagagaacaggctgctcagaaaaaggaaaactccgaaggcggtgaagaagaaggcaaagaaaatgaagacaaacagaaggagaatgaggataagcagaaagaaaacgaggacaaaggcaaagaaaatgaagacaaagacaagggtcgcgagccagaagagaagccattggacagaccagagtgcactgcatctccgatcgccgttgaagaagaacctcacagcgtacggcgtaccgtccttcccagagggacctccagacagtccctgatcatttctatggcaccttccgccgagggtggggaggaagtcctaactattgaagtgaaggagaaggcaaagcagtag

SEQ ID NO: 201361 - DNA, 4347 bp, Artificial Sequence
  derived and/or modified sequence
aaggcacagtcataaatacagagggttttcagaaccacctcagagaagatgtttaaatcgctgacaaaagtcaacaaggtgaagcctataggagagaacaatgagaatgaacaaagttctcgtcggaatgaagaaggctctcacccaagtaatcagtctcagcaaaccacagcacaggaagaaaacaaaggtgaagagaaatctctcaaaaccaagtcaactccagtcacgtctgaagagccacacaccaacatacaagacaaactctccaagaaaaattcctctggagatctgaccacaaaccctgaccctcaaaatgcagcagaaccaactggaacagtgccagagcagaaggaaatggaccccgggaaagaaggtccaaacagcccacaaaacaaaccgcctgcagctcctgttataaatgagtatgccgatgcccagctacacaacctggtgaaaagaatgcgtcaaagaacagccctctacaagaaaaagttggtagagggagatctctcctcacccgaagccagcccacaaactgcaaagcccacggctgtaccaccagtaaaagaaagcgatgataagccaacagaacattactacaggctgttgtggttcaaagtcaaaaagatgcctttaacagagtacttaaagcgaattaaacttccaaacagcatagattcatacacagatcgactctatctcctgtggctcttgcttgtcactcttgcctataactggaactgctgttttataccactgcgcctcgtcttcccatatcaaaccgcagacaacatacactactggcttattgcggacatcatatgtgatatcatctacctttatgatatgctatttatccagcccagactccagtttgtaagaggaggagacataatagtggattcaaatgagctaaggaaacactacaggacttctacaaaatttcagttggatgtcgcatcaataataccatttgatatttgctacctcttctttgggtttaatccaatgtttagagcaaataggatgttaaagtacacttcattttttgaatttaatcatcacctagagtctataatggacaaagcatatatctacagagttattcgaacaactggatacttgctgtttattctgcacattaatgcctgtgtttattactgggcttcaaactatgaaggaattggcactactagatgggtgtatgatggggaaggaaacgagtatctgagatgttattattgggcagttcgaactttaattaccattggtggccttccagaaccacaaactttatttgaaattgtttttcaactcttgaattttttttctggagtttttgtgttctccagtttaattggtcagatgagagatgtgattggagcagctacagccaatcagaactacttccgcgcctgcatggatgacaccattgcctacatgaacaattactccattcctaaacttgtgcaaaagcgagttcggacttggtatgaatatacatgggactctcaaagaatgctagatgagtctgatttgcttaagaccctaccaactacggtccagttagccctcgccattgatgtgaacttcagcatcatcagcaaagtcgacttgttcaagggttgtgatacacagatgatttatgacatgttgctaagattgaaatccgttctctatttgcctggtgactttgtctgcaaaaagggagaaattggcaaggaaatgtatatcatcaagcatggagaagtccaagttcttggaggccctgatggtactaaagttctggttactctgaaagctgggtcggtgtttggagaaatcagccttctagcagcaggaggaggaaaccgtcgaactgccaatgtggtggcccacgggtttgccaatcttttaactctagacaaaaagaccctccaagaaattctagtgcattatccagattctgaaaggatcctcatgaagaaagccagagtgcttttaaagcagaaggctaagaccgcagaagcaacccctccaagaaaagatcttgccctcctcttcccaccgaaagaagagacacccaaactgtttaaaactctcctaggaggcacaggaaaagcaagtcttgcaagactactcaaattgaagcgagagcaagcagctcagaagaaagaaaattctgaaggaggagaggaagaaggaaaagaaaatgaagataaacaaaaagaaaatgaagataaacaaaaagaaaatgaagataaaggaaaagaaaatgaagataaagataaaggaagagagccagaagagaagccactggacagacctgaatgtacagcaagtcctattgcagtggaggaagaaccccactcagttagaaggacagttttacccagagggacttctcgtcaatcactcattatcagcatggctccttctgctgagggcggagaagaggttcttactattgaagtcaaagaaaaggctaagcaataaatgtttgattatctttagatgtgatatagctagttcccaaagtgattgtacctaggattgtaacttaaattaacgaggggaaacgacatgctgggacccttgagaaacgaaaggcaaatccctagcttagtttctaggacttatctgagagtgtgatttcatgcagtggtaataagaagattattaaaagccatccctattctccgttttcattaactttatgcaattgctatatcttctaattgtatgtagtaagtttccttttcctttggttctttcctgatgatgtctcttccttccagttttattagcttgctcttggctgtgatgtgattcactaaccttttctcttaatttttattgtgtttaatttcttctttggcactctaaagcctggctaattgttctaggtttatgaatttcacctcttacatgtaaagggtataagattttaatgtaataggtcaaaaatcagattattttcattcaaatgaggatgatgagtcactgtaatatcaaaaaatccccagcagctgggactgaagggaagcagagatcatgaagctttctgaatgagaagtctgatttttggaacagtcccctgaagaccaatgttggtcggcagaattagcaaactggcaaaatcacattgcaggaacatattggaaaaattgtaccctttactaaagaaataaacttcaatattttctcttctaaccaacttaaaagacaccaatctacctaactcatctggctcaagggacttggactggaggatacaggctaaagtgacacttatcagaatcttcctcaagcacttgctggaaaagatatcagattggaacttcttgtttaaaattaagctttagtaaaacaaagtgatgaggttaggaaggcagactctacacatgtcagattgacatatccccacaatttccggaacctacatgtatagctgtttacaaaatctccaagttaattaagggcactttaggaagttgtcctcatgaattagctagcattagcataattaccgacgttgcatgctgtgaggaggctacaaaggccaggctggtgtcggaagtaataatacatatagaattccattctaataaatgccattagtgtataacatcaagttctgtgtaatgaggctatttccaagtctccaaagatggtcactgtaacagcactttgctgagagggttttaacaaatcatattagccaaaaagcctacaacatagatgcatttagcaaaccatgtacaaatcaatcactataataaactgcatcatttgatagagtcaccgtttttgcatgtagtgttagagtatcacaaaatataacaagttttactaaaggatggttggttttttcaggatttaagggaatatggacaaattgttaaatagtatttatttgataaatgggagtttgtatgcagaaagagtgaattgcgtataaaaagggtgatttaaaaacccagaaacaaaaggtagaatagggctgaagcatctgataataggaaaagaaaaggacaaaagtcctcaacttgtgagcaatatgctttccctttacaccctgtaatttattcaaatgatattaaaatacaagaccattgcaatttatgcttttcgcctggcagttattttcccccccaagctatcctgtttcagataatatcaatttatttccaatccatcagactaaaatctaagaaaattcaagaactcttttattgttgatttggtgccaccaaattctttttctttttaaatctttctaattatcctttctttttcaatcccattgctaacacccagaacatattttctgttcaatgcaaataaacattcactttttaccta

SEQ ID NO: 201362 - DNA, 2430 bp, Artificial Sequence
  derived and/or modified sequence
atgttcaagagcctgaccaaggtgaacaaggtgaagcccatcggcgagaacaacgagaacgagcagagcagcagaagaaacgaggagggcagccaccccagcaaccagagccagcagaccaccgcccaggaggagaacaagggcgaggagaagagcctgaagaccaagagcacccccgtgaccagcgaggagccccacaccaacatccaggacaagctgagcaagaagaacagcagcggcgacctgaccaccaaccccgacccccagaacgccgccgagcccaccggcaccgtgcccgagcagaaggagatggaccccggcaaggagggccccaacagcccccagaacaagccccccgccgcccccgtgatcaacgagtacgccgacgcccagctgcacaacctggtgaagagaatgagacagagaaccgccctgtacaagaagaagctggtggagggcgacctgagcagccccgaggccagcccccagaccgccaagcccaccgccgtgccccccgtgaaggagagcgacgacaagcccaccgagcactactacagactgctgtggttcaaggtgaagaagatgcccctgaccgagtacctgaagagaatcaagctgcccaacagcatcgacagctacaccgacagactgtacctgctgtggctgctgctggtgaccctggcctacaactggaactgctgcttcatccccctgagactggtgttcccctaccagaccgccgacaacatccactactggctgatcgccgacatcatctgcgacatcatctacctgtacgacatgctgttcatccagcccagactgcagttcgtgagaggcggcgacatcatcgtggacagcaacgagctgagaaagcactacagaaccagcaccaagttccagctggacgtggccagcatcatccccttcgacatctgctacctgttcttcggcttcaaccccatgttcagagccaacagaatgctgaagtacaccagcttcttcgagttcaaccaccacctggagagcatcatggacaaggcctacatctacagagtgatcagaaccaccggctacctgctgttcatcctgcacatcaacgcctgcgtgtactactgggccagcaactacgagggcatcggcaccaccagatgggtgtacgacggcgagggcaacgagtacctgagatgctactactgggccgtgagaaccctgatcaccatcggcggcctgcccgagccccagaccctgttcgagatcgtgttccagctgctgaacttcttcagcggcgtgttcgtgttcagcagcctgatcggccagatgagagacgtgatcggcgccgccaccgccaaccagaactacttcagagcctgcatggacgacaccatcgcctacatgaacaactacagcatccccaagctggtgcagaagagagtgagaacctggtacgagtacacctgggacagccagagaatgctggacgagagcgacctgctgaagaccctgcccaccaccgtgcagctggccctggccatcgacgtgaacttcagcatcatcagcaaggtggacctgttcaagggctgcgacacccagatgatctacgacatgctgctgagactgaagagcgtgctgtacctgcccggcgacttcgtgtgcaagaagggcgagatcggcaaggagatgtacatcatcaagcacggcgaggtgcaggtgctgggcggccccgacggcaccaaggtgctggtgaccctgaaggccggcagcgtgttcggcgagatcagcctgctggccgccggcggcggcaacagaagaaccgccaacgtggtggcccacggcttcgccaacctgctgaccctggacaagaagaccctgcaggagatcctggtgcactaccccgacagcgagagaatcctgatgaagaaggccagagtgctgctgaagcagaaggccaagaccgccgaggccaccccccccagaaaggacctggccctgctgttcccccccaaggaggagacccccaagctgttcaagaccctgctgggcggcaccggcaaggccagcctggccagactgctgaagctgaagagagagcaggccgcccagaagaaggagaacagcgagggcggcgaggaggagggcaaggagaacgaggacaagcagaaggagaacgaggacaagcagaaggagaacgaggacaagggcaaggagaacgaggacaaggacaagggcagagagcccgaggagaagcccctggacagacccgagtgcaccgccagccccatcgccgtggaggaggagccccacagcgtgagaagaaccgtgctgcccagaggcaccagcagacagagcctgatcatcagcatggcccccagcgccgagggcggcgaggaggtgctgaccatcgaggtgaaggagaaggccaagcagtag

SEQ ID NO: 201363 - protein, 188 aa, Artificial Sequence
  derived and/or modified sequence
MFHQIWAALLYFYGIILNSIYQCPEHSQLTTLGVDGKEFPEVHLGQWYFIAGAAPTKEELATFDPVDNIVFNMAAGSAPMQLHLRATIRMKDGLCVPRKWIYHLTEGSTDLRTEGRPDMKTELFSSSCPGGIMLNETGQGYQRFLLYNRSPHPPEKCVEEFKSLTSCLDSKAFLLTPRNQEACELSNN

SEQ ID NO: 201364 - protein, 129 aa, Artificial Sequence
  derived and/or modified sequence
MAAGSAPMQLHLRATIRMKDGLCVPRKWIYHLTEGSTDLRTEGRPDMKTELFSSSCPGGIMLNETGQGYQRFLLYNRSPHPPEKCVEEFKSLTSCLDSKAFLLTPRNQGKGLKSHKTGLGLTKSSGVTG

SEQ ID NO: 201365 - protein, 116 aa, Artificial Sequence
  derived and/or modified sequence
MAAGSAPMQLHLRATIRMKDGLCVPRKWIYHLTEGSTDLRTEGRPDMKTELFSSSCPGGIMLNETGQGYQRFLLYNRSPHPPEKCVEEFKSLTSCLDSKAFLLTPRNQEACELSNN

SEQ ID NO: 201366 - DNA, 567 bp, Artificial Sequence
  derived and/or modified sequence
atgtttcaccagatctgggccgcacttctgtatttctacgggattattctgaactcaatatatcagtgtccagaacactcccaactcacgactcttggcgtggatggcaaggagttcccggaagtgcacctgggccagtggtattttatcgctggggctgctcccactaaagaggagttggccaccttcgatcccgtggacaatattgttttcaacatggccgctgggagcgcaccaatgcaattacatctgcgcgcaacaattagaatgaaggacggcctttgcgtgcctcgcaagtggatctatcatctgactgagggtagcacagatctgcgcaccgagggccgtccagacatgaaaaccgagctgttctcatcgagctgtccgggagggatcatgcttaatgaaacgggccaagggtaccagcggttcctgctctacaatagatcgcctcaccctccagagaagtgcgtggaagagttcaaatctctgacaagttgtctcgatagcaaggctttccttctgaccccgaggaatcaggaagcctgcgaactctctaataactag

SEQ ID NO: 201367 - DNA, 567 bp, Artificial Sequence
  derived and/or modified sequence
atgtttcatcagatctgggccgcacttctgtacttctacggaataattctaaattccatttaccagtgtcccgaacacagtcagctgactaccctgggcgtcgatggtaaggaattccctgaggtgcaccttggacagtggtatttcatcgccggtgccgcaccaactaaggaggaacttgcaacttttgacccagtggataacattgtcttcaacatggcagcaggctctgctcccatgcaactccatctgcgggcaacaataaggatgaaggacggactgtgcgtgcccaggaaatggatctatcacctgacggagggctctaccgatctcagaaccgaggggcgacccgacatgaaaaccgagctcttctcatcttcctgcccaggcggaatcatgttgaacgaaacaggtcaaggatatcaaagattcctgttatataatcggtccccccatccgccagagaagtgcgttgaggaattcaaatctcttacgtcctgcctcgacagtaaggccttcttacttacccccagaaatcaggaggcctgcgagctgagcaataattag

SEQ ID NO: 201368 - DNA, 567 bp, Artificial Sequence
  derived and/or modified sequence
atgttccaccaaatctgggcagccctgctgtatttttacggaattatcctgaattcgatttatcagtgccctgagcacagccagctcactacgcttggtgtcgacggaaaggaattcccggaggtccatctaggccagtggtactttatagccggagccgcaccaaccaaggaggagctggccactttcgacccagtcgacaatatcgttttcaacatggcggcagggtccgccccaatgcaactccatctccgagctactatcaggatgaaggacgggctgtgcgtgccgcgtaagtggatctaccatctgactgagggcagtacggatcttcggactgagggccgtccggatatgaaaaccgagttgttcagtagctcttgccccggtggaataatgctgaacgagactggccagggttatcaacgctttctcctgtacaacaggtcaccacatcctccagaaaagtgtgtcgaagaattcaagtctctgacgagctgtcttgacagcaaggccttcctcctgaccccccgaaatcaagaagcctgcgagctgagcaacaactag

SEQ ID NO: 201369 - DNA, 567 bp, Artificial Sequence
  derived and/or modified sequence
atgtttcaccagatttgggccgctctgctctacttctacggtatcatcctgaacagtatctatcagtgtccagagcactcacagctgactactttgggtgttgacggtaaagagtttccagaggtacacttgggacaatggtattttatagctggggcagccccaactaaagaagagctggccacattcgatcccgtcgataacatcgtgttcaacatggcagcaggcagtgctcctatgcagcttcacttgcgggctactattagaatgaaggacggcctgtgtgtacccaggaaatggatctatcaccttactgaaggctctacggacctccgcacggaaggtcgacccgacatgaagaccgagttgttcagctcaagctgccccggtggcataatgctgaacgagacagggcagggctatcagagatttctgttgtacaatcgatccccccatccacctgagaagtgcgtggaggaatttaagtccctgacgtcctgcctggactccaaggcgtttctgctgactcccaggaaccaggaagcttgtgaactcagcaacaattag

SEQ ID NO: 201370 - DNA, 567 bp, Artificial Sequence
  derived and/or modified sequence
atgtttcatcaaatctgggctgccctgctgtacttttacggcattattctaaactcgatctatcagtgccccgagcatagccagttgacgaccttgggcgtagacggcaaggaatttccagaagttcacctgggacagtggtacttcatcgccggagctgcgcctactaaggaagagctcgcaacattcgatcctgtcgacaatatagtgtttaacatggctgccggatccgcaccaatgcagcttcatcttagagccaccattaggatgaaagatggtctgtgtgttcctcgaaaatggatttatcatctcacggagggcagtactgatttgcgtacagaaggtcgtccagatatgaagactgaactgttttctagttcttgccctggaggcattatgcttaatgagacgggacagggatatcaacgatttcttctttataatcgctcaccccaccctccagaaaaatgcgtggaggaattcaagagcctcacaagttgtctggatagcaaggcgttcttgctgacacctcgcaatcaggaggcttgcgagttaagtaataattag

SEQ ID NO: 201371 - DNA, 567 bp, Artificial Sequence
  derived and/or modified sequence
atgttccatcagatttgggccgctctgttgtatttctacggtattatcttaaactccatctaccagtgtcctgagcactcccagctgaccacattgggtgtcgatggcaaggaattccccgaagtgcacctcgggcagtggtattttatcgccggtgctgccccaaccaaggaagagctggctacctttgaccccgtggacaatatcgtcttcaatatggctgctggctctgcccctatgcagctacacttgagagctacgattcgtatgaaggacggactgtgtgtcccccgaaagtggatctaccacctgaccgagggttcaaccgacctgaggactgaaggtcgcccagacatgaagacagagctgttctcgtcaagttgccccggtggcatcatgctcaatgaaaccggtcagggataccaacgcttcttgctctacaacaggtcgcctcacccgccagagaagtgcgttgaagagtttaagagcctgacctcatgccttgacagtaaggccttcctgctgacccccagaaatcaagaagcttgtgagctgtctaataattag

SEQ ID NO: 201372 - DNA, 567 bp, Artificial Sequence
  derived and/or modified sequence
atgttccaccaaatatgggcagccttgctgtatttttatggaatcatcttaaactcaatttatcagtgcccggaacatagccagttaacgaccctgggcgtggatgggaaagagttccctgaggttcacttggggcagtggtactttattgctggagcagctcccacgaaagaggagctggccacctttgatccagtagacaatattgtattcaatatggccgcaggatccgcacccatgcagctgcacctgcgcgctaccatccggatgaaagacggcctgtgtgtgcccagaaagtggatttaccatctgaccgaaggctcaaccgacctccgcaccgaagggagaccggatatgaaaaccgaactctttagctcatcctgcccaggtggcatcatgctgaacgaaaccggccaggggtaccagcggttcctgctctacaaccgtagcccgcaccctcccgaaaaatgcgtcgaggaatttaaaagtctgacatcgtgtttggattctaaagcctttctacttaccccacgtaatcaagaagcatgcgaattgtcaaataattag

SEQ ID NO: 201373 - DNA, 710 bp, Artificial Sequence
  derived and/or modified sequence
ccccaaacctgccaccgacggccacttccgtttccccgatagtatttggggatctcgaagcgatacttccggctccccccaggtccccaagctttacttttgtggggcacgacgagaaagtccgcagccccaaacattcccagaggtccacttgggccagtggtactttatcgcaggggcagctcccaccaaggaggagttggcaacttttgaccctgtggacaacattgtcttcaatatggctgctggctctgccccgatgcagctccaccttcgtgctaccatccgcatgaaagatgggctctgtgtgccccggaaatggatctaccacctgactgaagggagcacagatctcagaactgaaggccgccctgacatgaagactgagctcttttccagctcatgcccaggtggaatcatgctgaatgagacaggccagggttaccagcgctttctcctctacaatcgctcaccacatcctcccgaaaagtgtgtggaggaattcaagtccctgacttcctgcctggactccaaagccttcttattgactcctaggaatcaagaggcctgtgagctgtccaataactgacctgtaacttcatctaagtccccagatgggtacaatgggagctgagttgttggagggagaagctggagacttccagctccagctcccactcaagataataaagataatttttcaatcctca

SEQ ID NO: 201374 - DNA, 567 bp, Artificial Sequence
  derived and/or modified sequence
atgttccaccaaatctgggccgcattactttatttctatggcatcatcctcaattccatataccagtgtcccgagcattcacagctgactaccctaggagtggacggtaaggagtttcccgaagttcatctaggacagtggtactttatcgctggcgcagctccaaccaaagaggaattggcaacttttgaccctgtggataacattgtatttaatatggcagccgggagcgcacccatgcagttacatttaagggctacgatccggatgaaggacggcttatgcgtccccagaaagtggatctatcaccttactgagggcagtaccgacctccgaactgagggaagacctgacatgaaaactgagctcttcagctcgagctgccctggcggaattatgcttaacgaaacaggccagggatatcagcgcttcctgctgtacaataggtccccccacccccctgagaagtgcgtagaggaatttaaaagcttgacttcatgcctcgactctaaagcattcctgctaacccccagaaaccaggaagcctgtgagcttagcaacaactag

SEQ ID NO: 201375 - DNA, 911 bp, Artificial Sequence
  derived and/or modified sequence
ccccaaacctgccaccgacggccacttccgtttccccgatagtatttggggatctcgaagcgatacttccggctccccccaggtccccaagctttacttttgtggggcacgacgagaaagtccgcagccccaaacattcccagaggtccacttgggccagtggtactttatcgcaggggcagctcccaccaaggaggagttggcaacttttgaccctgtggacaacattgtcttcaatatggctgctggctctgccccgatgcagctccaccttcgtgctaccatccgcatgaaagatgggctctgtgtgccccggaaatggatctaccacctgactgaagggagcacagatctcagaactgaaggccgccctgacatgaagactgagctcttttccagctcatgcccaggtggaatcatgctgaatgagacaggccagggttaccagcgctttctcctctacaatcgctcaccacatcctcccgaaaagtgtgtggaggaattcaagtccctgacttcctgcctggactccaaagccttcttattgactcctaggaatcaaggtaaggggttaaaatctcataaaacaggattaggactcaccaagtcttctggtgttacagggtgaaagaggctcgtgtgatgtcaccagagggatgtggctaagagctgtgatgtcacctgagggaggcaggatgggttctgggctactcaaaagagaggtttctgagtttgcactggataaagggggcagagggtcatacgtggagggaaaagagccttagagactcccctttgacacagggaatgaaagaacacgttctcccccaccccattactatcaactttgcttttctccctggacttcccttctgtccttctttttccctccccccatcacagaggcctgt

SEQ ID NO: 201376 - DNA, 567 bp, Artificial Sequence
  derived and/or modified sequence
atgtttcaccaaatatgggccgctctgctttatttttacgggatcatactgaattccatttatcagtgtcctgagcactcacagctgaccactctgggagtcgatggtaaagagttcccagaagtgcatctcggccagtggtactttatcgctggtgctgctccaactaaagaagagctggccaccttcgacccagtggacaatatcgtctttaacatggccgcaggcagcgcaccaatgcaactccacttgagagctacaattcggatgaaagatggattatgcgtgccccggaaatggatttaccacctgaccgagggctctaccgatctgagaaccgagggcagaccagatatgaaaacagaattgttctcatccagctgtccgggcgggatcatgttgaacgaaaccggccagggctaccaacgctttctactttacaaccgatccccccaccctcccgagaagtgcgtggaagagttcaaatccctgacgagttgccttgatagcaaagcttttctgttgacacctcgcaaccaagaggcctgcgaactttccaataattag

SEQ ID NO: 201377 - DNA, 567 bp, Artificial Sequence
  derived and/or modified sequence
atgttccatcaaatttgggctgccttgctctatttctacggtataattctgaattctatctaccagtgtccagagcattcccagctgacaaccttaggcgtggatggtaaggaattccccgaagtgcacttagggcaatggtactttatagcaggcgcagcacctacaaaagaagagctggctacttttgatcctgtggataatattgttttcaacatggcagcaggtagtgctccaatgcagctgcatctgagagctacaattcgaatgaaagacgggctgtgtgtgcctcgcaaatggatctaccacctcactgaaggaagtacagacttgcgaaccgaaggcaggcccgacatgaaaaccgagttgtttagtagttcttgtccgggaggaatcatgctgaacgagaccggccagggataccagcgctttttgctttataacagatccccacatcctcctgagaaatgcgtagaggagttcaaaagcctgacatcttgtctagactcaaaggcttttttattgacacctaggaatcaggaggcttgcgaactgtccaataactag

SEQ ID NO: 201378 - DNA, 567 bp, Artificial Sequence
  derived and/or modified sequence
atgtttcaccaaatctgggctgcgctgctgtacttctacggtattatacttaacagcatctaccaatgtccagaacattcccaattgaccaccctgggagtagatgggaaggaattccctgaggttcatcttggtcagtggtattttatcgcaggggctgcccctacgaaggaggagttggccacttttgacccagtggacaacatcgtatttaacatggccgccggcagtgcaccaatgcaactccaccttcgagctaccattcgaatgaaagacggactgtgcgttccacggaaatggatttaccatctgacagaagggtctacagatctgcggacggaaggcagacccgacatgaagacagagctgttctcatcctcttgccccggaggcatcatgctcaacgagacaggacagggctaccagcgctttctgctgtacaatcggtctccgcatccccctgaaaagtgcgtcgaggagttcaaaagcctcacgagctgtcttgactctaaggcatttttactcaccccacgcaaccaagaggcttgcgaattatccaacaactag

SEQ ID NO: 201379 - DNA, 567 bp, Artificial Sequence
  derived and/or modified sequence
atgtttcatcaaatatgggctgccctactttatttctacggcataatccttaattccatataccagtgccccgagcactcacagctgaccacccttggcgtcgatggtaaggaatttcctgaagtccaccttggccagtggtactttatcgctggagcagcccctacgaaagaggaactcgcaacattcgaccccgtggataatattgtgtttaacatggccgctgggtccgcacctatgcagctgcacctgcgcgcgaccattagaatgaaggatggcctgtgtgtgccacgtaaatggatctaccacctgactgaaggttccacagacctgagaacagaaggacgccctgacatgaagactgaactgttttcctcttcttgtcccggaggaattatgttgaacgagaccggccagggctaccagcggtttttgctctacaatagatcccctcaccccccggagaaatgcgtagaagagttcaaatcgctcaccagttgtctggattctaaagctttcctgctaaccccaaggaaccaagaagcctgtgagctgtctaacaactag

SEQ ID NO: 201380 - DNA, 567 bp, Artificial Sequence
  derived and/or modified sequence
atgttccatcagatctgggccgctctgctctatttctacgggatcattctgaactcaatctatcagtgccccgagcacagccagctgactacgttaggagtggacggaaaagagtttccagaggtacatctcggtcaatggtatttcatcgcaggcgccgccccaaccaaggaggaactcgccacgtttgatccagtcgataatattgttttcaatatggccgccggttcagcacccatgcagctgcatctcagagcaacaatccggatgaaggatggcctgtgcgtacccagaaagtggatttaccatcttacagaaggatctactgacctcagaacagaaggcaggccagacatgaaaacggaactgttcagttcaagttgtccaggcggtattatgcttaacgaaaccggccagggctatcagagatttctgctgtacaaccgctccccccaccccccagaaaaatgcgtcgaagagtttaaatctcttaccagctgcttagactcaaaggcttttctactgacccctagaaaccaggaggcctgcgaattgtcaaacaattag

SEQ ID NO: 201381 - DNA, 567 bp, Artificial Sequence
  derived and/or modified sequence
atgtttcaccaaatttgggccgctctcctgtatttctacggtattatcttaaactctatctaccaatgtcctgagcattcccagcttactaccctaggggtggacggcaaagaattccccgaggtccatctcggtcagtggtacttcattgcaggcgcagcccctacaaaagaggaattagcgacattcgaccccgttgacaacatagtctttaacatggctgcagggtcggctcccatgcagctgcacttgagagctaccattagaatgaaagacggactttgtgtcccacggaagtggatataccacctcacggaaggctcaaccgatcttagaaccgaaggcagacccgatatgaagacagaacttttctctagttcctgtcccgggggtataatgctgaatgagacaggccaggggtaccagaggttcctgttatacaatagatccccccatccccccgaaaagtgtgttgaggagttcaagagcctgacatcatgcttagacagtaaggctttcctcctgacccccaggaaccaagaagcttgcgagctctcaaataattag

SEQ ID NO: 201382 - DNA, 567 bp, Artificial Sequence
  derived and/or modified sequence
atgtttcaccagatttgggcagccctactgtacttttacggaattatcctgaactccatttatcagtgtcccgaacattcccaactaacaacgctgggcgtggacggcaaagagtttcccgaggttcacttaggccaatggtacttcattgccggagctgccccaaccaaagaggagttagcgacattcgatccggtggacaacattgtgttcaatatggctgcaggctccgcacctatgcagttgcatctaagggcaaccatcagaatgaaagatggactttgcgtacctcgtaagtggatatatcacctgaccgaaggatcaacagacttgcgaaccgagggccgcccagacatgaaaaccgaactgttctcctcctcctgtcccggaggcataatgctcaatgagactggccaaggttatcagcgcttcctcttgtataacaggtcaccccacccccccgaaaagtgcgtggaggaatttaaatctctgaccagctgcctggactccaaggccttcctgttaacccccagaaaccaggaagcatgtgagctcagcaataactag

SEQ ID NO: 201383 - DNA, 567 bp, Artificial Sequence
  derived and/or modified sequence
atgttccaccaaatctgggctgcgctcctctatttctacggcatcattcttaattctatctatcagtgccctgaacatagtcagctgaccaccctcggcgtcgacggcaaggagtttcctgaggtgcatctcggacagtggtacttcatagccggcgctgccccaactaaagaggaactggctactttcgacccagtagataacatagtatttaatatggccgctggatcagcaccaatgcagttgcacctacgagccacgatccgaatgaaagacggactgtgcgtcccacgcaagtggatttaccacctgaccgagggctctaccgatctgagaaccgagggcagaccagatatgaaaacagaattgttctcatccagctgtccgggcgggatcatgttgaacgaaaccggccagggctaccaacgctttctactttacaaccgatccccccaccctcccgagaagtgcgtggaagagttcaaatccctgacgagttgccttgatagcaaagcttttctgttgacacctcgcaaccaagaggcctgcgaactttccaataattag

SEQ ID NO: 201384 - DNA, 567 bp, Artificial Sequence
  derived and/or modified sequence
atgttccatcagatatgggccgcactgttatatttctatggaatcatactcaactcaatctaccagtgtcccgaacacagtcaacttacaaccctcggcgtcgatggtaaagagttccctgaagtgcatctaggtcagtggtacttcatcgctggagccgcgccaacaaaggaagaacttgccacgttcgaccctgtggacaacattgtctttaacatggctgctggcagcgctccaatgcagcttcacctgagagcaacgatccggatgaaagatggcctctgcgtcccccggaagtggatttaccatctcacagagggctcaaccgacttgcggaccgagggacgacctgatatgaagaccgaacttttttctagctcctgccctgggggcataatgctgaatgaaacaggccagggataccagcgcttcctgctatataatagatcccctcatcctcctgagaagtgtgtcgaagaattcaagtcactgacctcttgcttagattcaaaggccttcttactgactccgcgcaatcaggaagcttgcgaactctccaacaactag

SEQ ID NO: 201385 - DNA, 567 bp, Artificial Sequence
  derived and/or modified sequence
atgttccaccagatctgggcagcgctgttatacttctatggaattatccttaactcaatctaccagtgccctgaacattcccagctcaccacattgggcgtggacggaaaagaattcccggaagttcacttaggacagtggtacttcatcgccggagctgcacctactaaagaggagctcgcgacctttgaccccgtcgacaatatcgtcttcaacatggcagccggcagcgctccgatgcaattacacctgcgcgccacaatcagaatgaaagatggtctttgcgttccgcgaaaatggatctatcacttgaccgagggatcaactgacctgaggaccgagggaagacccgatatgaaaactgaactgttcagctcaagttgccccggaggaataatgcttaacgagactggccagggctaccaacggtttctcctgtataacagatcgccacacccacctgaaaagtgcgtggaggagtttaagtccctgacgtcttgccttgactccaaagcatttctgctgacaccccgaaaccaggaggcttgcgagctgagtaataattag

SEQ ID NO: 201386 - DNA, 567 bp, Artificial Sequence
  derived and/or modified sequence
atgttccatcaaatttgggccgccctgctttatttttacggtataatcctgaacagcatataccagtgtcccgagcatagtcagctcaccacactgggagtggacgggaaggagttccccgaagtccatttaggtcagtggtacttcatcgctggcgcagcaccaacgaaggaagaactagctacattcgacccagttgataatatagtgttcaacatggcagctggctccgcccctatgcagcttcacctccgtgcaaccatccgaatgaaagatggtctatgtgttccaagaaagtggatttaccacctaacagaaggatcaactgacctaaggactgagggcagaccagatatgaaaaccgaactgttctccagctcttgccctggcggcattatgctgaacgagaccggccaaggataccagcgattcctcctgtacaatcggtccccacatcccccagagaagtgtgtcgaagagttcaagtcactcacgtcttgtcttgatagtaaagcgttcctattgacacctcggaatcaagaggcttgtgaactatccaacaactag

SEQ ID NO: 201387 - DNA, 567 bp, Artificial Sequence
  derived and/or modified sequence
atgtttcatcaaatctgggcagctctgctctacttctacggtattattctgaactccatttatcaatgcccagaacacagccaactaacaacgctcggcgttgacggcaaggagtttcctgaggtacatctcggccagtggtatttcatcgctggagccgccccgacaaaagaggaactggctacatttgaccctgttgacaatatcgtcttcaacatggcggccggaagtgccccaatgcagttacacctcagagcaactattcgcatgaaagatggcctctgtgtgccccgcaaatggatttaccatcttacagaaggatctactgacctcagaacagaaggcaggccagacatgaaaacggaactgttcagttcaagttgtccaggcggtattatgcttaacgaaaccggccagggctatcagagatttctgctgtacaaccgctccccccaccccccagaaaaatgcgtcgaagagtttaaatctcttaccagctgcttagactcaaaggcttttctactgacccctagaaaccaggaggcctgcgaattgtcaaacaattag

SEQ ID NO: 201388 - DNA, 567 bp, Artificial Sequence
  derived and/or modified sequence
atgtttcatcagatctgggcagctctcctctatttttacggaattattctaaactcgatctatcagtgcccagagcattcccagttgacaactctcggcgtggacggaaaagaattccctgaagtgcacctcggccaatggtatttcattgcaggggcagcacctacaaaagaggagctcgccacttttgatcctgtcgataacattgtattcaacatggccgccggatcggctcccatgcaattgcacttaagggctactattcgaatgaaagacgggttgtgtgttcccaggaagtggatttatcatctcactgaaggttccactgatttacgaactgaaggaaggcccgacatgaagaccgagctgttctcaagttcctgccctggagggataatgttgaatgagactggccagggatatcagcgtttcctgctgtataatagaagcccgcatccaccggaaaaatgcgttgaggaattcaaatcattgacgtcttgcctggacagcaaagcctttttgcttactccccgtaaccaagaggcctgtgagttaagtaacaactag

SEQ ID NO: 201389 - DNA, 567 bp, Artificial Sequence
  derived and/or modified sequence
atgttccaccagatctgggccgccctgctgtacttctacggcatcatcctgaacagcatctaccagtgccccgagcacagccagctgaccaccctgggcgtggacggcaaggagttccccgaggtgcacctgggccagtggtacttcatcgccggcgccgcccccaccaaggaggagctggccaccttcgaccccgtggacaacatcgtgttcaacatggccgccggcagcgcccccatgcagctgcacctgagagccaccatcagaatgaaggacggcctgtgcgtgcccagaaagtggatctaccacctgaccgagggcagcaccgacctgagaaccgagggcagacccgacatgaagaccgagctgttcagcagcagctgccccggcggcatcatgctgaacgagaccggccagggctaccagagattcctgctgtacaacagaagcccccacccccccgagaagtgcgtggaggagttcaagagcctgaccagctgcctggacagcaaggccttcctgctgacccccagaaaccaggaggcctgcgagctgagcaacaactag

SEQ ID NO: 201390 - DNA, 567 bp, Artificial Sequence
  derived and/or modified sequence
atgttccatcaaatatgggcagcattgttatacttctacggtatcatcctgaacagcatttaccagtgtcccgagcactctcaactgaccactttgggcgttgatggaaaggagtttcctgaggtccatctgggtcagtggtactttatcgcaggcgcggcccccactaaagaagaactggcaacattcgatcctgttgacaacatcgtcttcaacatggcagccggcagcgcccctatgcagttgcacctccgggccacaattcgaatgaaggacggactctgtgtgccacggaagtggatctaccacctgaccgaaggtagcaccgatttaaggacagagggtaggccagatatgaaaacagaactgttttcatccagctgtccgggcgggataatgctgaacgaaaccgggcagggctatcagaggttcttgctgtataacagaagtccccaccccccagagaaatgcgttgaagagtttaaatcccttacatcctgcctggattctaaagcctttctgctcacacctagaaatcaggaagcctgcgaactaagcaataactag

SEQ ID NO: 201391 - DNA, 567 bp, Artificial Sequence
  derived and/or modified sequence
atgtttcaccagatttgggccgcactgctgtacttttatggcatcattctaaattctatttaccagtgtcctgaacactctcagctgaccactctcggcgtggatgggaaggagttcccagaagtacatctcggccaatggtacttcatcgccggggcagccccaacaaaagaagaactcgctaccttcgatcccgttgataatatcgtattcaatatggccgcaggatctgctcccatgcagctccatctgagagcaactatcagaatgaaagacggcctgtgtgtccccagaaagtggatctaccaccttactgagggaagtaccgatttgcgtaccgaggggcggcctgacatgaagaccgaactcttttcttcctcctgccctggcggtataatgttgaacgagactggccagggatatcaacgttttctcttgtacaacaggagtccacacccccctgagaaatgtgtggaggagttcaagtctctgaccagctgcctggactctaaagccttcctgctgaccccccggaaccaggaggcctgtgaattgagcaacaactag

SEQ ID NO: 201392 - DNA, 567 bp, Artificial Sequence
  derived and/or modified sequence
atgtttcatcagatttgggctgcactgctctacttctatggcataatacttaactcaatctaccaatgtcctgagcactcccaactgacaactctcggcgtggatgggaaggaattcccagaagtgcacctgggccagtggtacttcatcgccggcgccgctcctacaaaagaggagctcgccacctttgatcccgtggataacatagtttttaatatggccgctgggtcagcccccatgcagctgcatctgagggctaccatacgcatgaaagatggtctgtgtgtgcccagaaaatggatctaccacctcaccgagggcagtacggacttacgcaccgagggtcgaccagacatgaagactgaacttttctcgtcctcctgtcctggtgggatcatgcttaatgaaactggccaaggttaccaacgatttcttttgtacaatagaagcccacaccccccggagaaatgtgtggaagaattcaaatctctgacctcttgccttgatagcaaggctttcttgcttacaccccggaatcaggaagcctgcgagctttctaacaattag

SEQ ID NO: 201393 - DNA, 567 bp, Artificial Sequence
  derived and/or modified sequence
atgtttcaccagatttgggccgccctgctgtacttttacgggattatcctgaacagtatctaccagtgtcccgaacactctcagttaaccaccctgggtgtggatggtaaggaatttccagaagtccacctcggccagtggtatttcatcgccggtgctgcccctacaaaagaagagctggccacattcgaccccgtcgacaatatagtgtttaatatggcagctggaagcgcccccatgcagctccacctccgggccacgattaggatgaaggacggattatgtgtaccccgcaaatggatctaccatctgacagagggctctacagatctacggacagaaggtcgccccgacatgaagacagaactgttctctagcagctgcccaggcggtatcatgctcaatgagaccggacaggggtaccagagatttctgctttacaatagatctcctcatccacccgagaaatgcgtcgaggagttcaaaagtctgacctcgtgtctcgactccaaggcattcctcctgacacctaggaatcaggaagcgtgtgagttgagtaacaattag

SEQ ID NO: 201394 - DNA, 567 bp, Artificial Sequence
  derived and/or modified sequence
atgttccaccagatctgggctgccttactgtacttttacgggatcattctgaattctatctatcagtgccctgaacatagtcagctcacaaccctgggagttgatgggaaggaatttccggaagtgcatctcggacagtggtacttcattgctggcgctgcgcccaccaaggaagagctggcgacattcgaccctgtagacaacattgtgtttaacatggccgcaggatccgctccaatgcagctgcacctgagagcaaccatacgtatgaaggacggcctgtgcgtccctagaaagtggatttatcatctgactgaaggttccactgacctgcggactgagggccgtccagatatgaagaccgaactattttcctcatcatgtcctggcgggattatgctgaacgagacagggcagggatatcagcgttttcttctgtacaaccggtcgccacatccaccagagaaatgcgtcgaagagtttaaatctctgaccagttgtttggactctaaggcctttctgttgaccccacgaaatcaggaagcctgtgagttaagcaataactag

SEQ ID NO: 201395 - DNA, 567 bp, Artificial Sequence
  derived and/or modified sequence
atgttccatcaaatttgggccgccttactgtacttctatggaattattctcaattctatctaccagtgccccgaacattcgcagctgacaaccctgggggtagatggaaaggaatttcccgaagtgcacctgggtcaatggtatttcatcgccggggcagctccaaccaaggaggaactggccactttcgatcccgtagacaatatagtctttaatatggcggcaggctcggcaccaatgcagctccacctgcgcgctaccattcggatgaaagacggtttgtgcgtgccacgcaagtggatctatcacttaactgagggatcgaccgatcttcggactgaaggacgtccagacatgaaaacagaactcttcagttcttcatgtccggggggaattatgctgaatgaaacgggtcagggctatcagaggttcctcctatataaccgctcaccgcatccgccggaaaagtgtgtcgaggagttcaagtcactgacttcctgcctggactccaaagccttcctgctcaccccgcgcaatcaagaagcctgcgaactctctaacaactag

SEQ ID NO: 201396 - DNA, 567 bp, Artificial Sequence
  derived and/or modified sequence
atgtttcatcaaatttgggccgccttattatacttctatggtatcattctgaatagcatctaccaatgtccagagcattctcagctgacgacacttggagttgacgggaaagagtttccagaagtccacttaggccagtggtacttcatagcaggggccgcccccaccaaggaggaactggccactttcgatcctgtggacaatattgtttttaatatggcagcaggttctgccccaatgcaactgcacctgcgggctacaatacgcatgaaagatggtctgtgtgtccctcgcaagtggatctaccaccttactgaaggctccactgacctgaggaccgagggtcgcccagatatgaagactgaactattcagcagctcctgccccgggggtattatgctgaacgagaccggacaaggatatcagcgattcctcctgtacaaccggtctccacaccctcccgagaaatgcgtcgaagaattcaagtctctgacctcttgcctggatagcaaggctttcctgctcacacccaggaatcaggaagcttgcgagttgtccaacaattag

SEQ ID NO: 201397 - DNA, 567 bp, Artificial Sequence
  derived and/or modified sequence
atgttccaccagatctgggccgccctgctgtacttctacggcatcatcctgaacagcatctaccagtgcccagagcacagccagctgaccaccctgggcgtggatggcaaggagttccctgaggtgcacctgggccagtggtacttcatcgccggggccgcccccaccaaggaggagctggccacctttgatcctgtggacaacatcgtgttcaacatggctgctggcagcgcccccatgcagctgcacctgcgggccaccatccgcatgaaggatggcctgtgtgtgcccaggaagtggatctaccacctgacagagggcagcacagacctgaggacagagggccgcccagacatgaagacagagctgttcagcagcagctgccctgggggcatcatgctgaatgaaacaggccagggctaccagcgcttcctgctgtacaacagaagcccccaccccccagagaagtgtgtggaggagttcaagagcctgaccagctgcctggacagcaaggccttcctgctgacccccaggaaccaggaggcctgtgagctgagcaacaactag

SEQ ID NO: 201398 - DNA, 1184 bp, Artificial Sequence
  derived and/or modified sequence
cacagctagttttccctctaacgacttcttcaagatcaggggctatgtcttattcgtttttttatgtccccggggattagctagttcttgggaaacaactgggacttgggattcaaaacagtttgctaagtgaatgaatgagaggcccagtcaagctacttcccttcagtgctgcacagtgcaacaaataaccagctcagatacaggttcaaagaccacaggcttctccctggacagctcagctctcctcataactcctgagaaaccctggacatgccagggtgtactatggagtggttgcatccggaagagggggaggaagtcccaaacactaagtaatccaggtttgggttggaaaacaaggttgaagttactcattagcaggtgaaagggtcaagggtcgaacgcaagggagctgaaagcagagtggactgagcagccagtaggggagagagcagttaaggcacacagagcaccagctccctcctgcctgaagatgttccaccaaatttgggcagctctgctctacttctatggtattatccttaactccatctaccagtgccctgagcacagtcaactgacaactctgggcgtggatgggaaggagttcccagaggtccacttgggccagtggtactttatcgcaggggcagctcccaccaaggaggagttggcaacttttgaccctgtggacaacattgtcttcaatatggctgctggctctgccccgatgcagctccaccttcgtgctaccatccgcatgaaagatgggctctgtgtgccccggaaatggatctaccacctgactgaagggagcacagatctcagaactgaaggccgccctgacatgaagactgagctcttttccagctcatgcccaggtggaatcatgctgaatgagacaggccagggttaccagcgctttctcctctacaatcgctcaccacatcctcccgaaaagtgtgtggaggaattcaagtccctgacttcctgcctggactccaaagccttcttattgactcctaggaatcaagaggcctgtgagctgtccaataactgacctgtaacttcatctaagtccccagatgggtacaatgggagctgagttgttggagggagaagctggagacttccagctccagctcccactcaagataataaagataatttttcaatcctca

SEQ ID NO: 201399 - DNA, 922 bp, Artificial Sequence
  derived and/or modified sequence
ccccaaacctgccaccgacggccacttccgtttccccgatagtatttggggatctcgaagcgatacttccggctccccccaggtccccaagctttacttttgtggggcacgacgagaaagtccgcagccccaaacattcccagaggtccacttgggccagtggtactttatcgcaggggcagctcccaccaaggaggagttggcaacttttgaccctgtggacaacattgtcttcaatatggctgctggctctgccccgatgcagctccaccttcgtgctaccatccgcatgaaagatgggctctgtgtgccccggaaatggatctaccacctgactgaagggagcacagatctcagaactgaaggccgccctgacatgaagactgagctcttttccagctcatgcccaggtggaatcatgctgaatgagacaggccagggttaccagcgctttctcctctacaatcgctcaccacatcctcccgaaaagtgtgtggaggaattcaagtccctgacttcctgcctggactccaaagccttcttattgactcctaggaatcaaggtaaggggttaaaatctcataaaacaggattaggactcaccaagtcttctggtgttacagggtgaaagaggctcgtgtgatgtcaccagagggatgtggctaagagctgtgatgtcacctgagggaggcaggatgggttctgggctactcaaaagagaggtttctgagtttgcactggataaagggggcagagggtcatacgtggagggaaaagagccttagagactcccctttgacacagggaatgaaagaacacgttctcccccaccccattactatcaactttgcttttctccctggacttcccttctgtccttctttttccctccccccatcacagaggcctgtgagctgtccaa

SEQ ID NO: 201400 - DNA, 709 bp, Artificial Sequence
  derived and/or modified sequence
cccaaacctgccaccgacggccacttccgtttccccgatagtatttggggatctcgaagcgatacttccggctccccccaggtccccaagctttacttttgtggggcacgacgagaaagtccgcagccccaaacattcccagaggtccacttgggccagtggtactttatcgcaggggcagctcccaccaaggaggagttggcaacttttgaccctgtggacaacattgtcttcaatatggctgctggctctgccccgatgcagctccaccttcgtgctaccatccgcatgaaagatgggctctgtgtgccccggaaatggatctaccacctgactgaagggagcacagatctcagaactgaaggccgccctgacatgaagactgagctcttttccagctcatgcccaggtggaatcatgctgaatgagacaggccagggttaccagcgctttctcctctacaatcgctcaccacatcctcccgaaaagtgtgtggaggaattcaagtccctgacttcctgcctggactccaaagccttcttattgactcctaggaatcaagaggcctgtgagctgtccaataactgacctgtaacttcatctaagtccccagatgggtacaatgggagctgagttgttggagggagaagctggagacttccagctccagctcccactcaagataataaagataatttttcaatcctca

SEQ ID NO: 201401 - DNA, 567 bp, Artificial Sequence
  derived and/or modified sequence
atgttccaccagatctgggccgccctgctgtacttctacggcatcatactgaactcgatttatcaatgtcctgaacatagtcaactgacgacactgggggtggacgggaaggaattccctgaggtccatctgggtcaatggtacttcatcgctggggccgctcccactaaagaggagctcgcaacctttgacccggtagataatatcgtgtttaacatggcggctggcagcgctccaatgcagttacacctcagagctaccatccggatgaaggatggactgtgtgtaccacgaaaatggatataccatctgacagagggctcgacagatctacggaccgagggccgccccgacatgaaaaccgaactgttctcgtcctcctgccctgggggcataatgcttaatgaaacaggtcagggctatcagcgctttctcctgtacaacagaagcccacacccccctgaaaagtgtgtggaagagttcaagtctctgacctcctgcctggacagcaaggcatttctcctgaccccgaggaatcaggaggcctgcgagctaagcaacaattag

SEQ ID NO: 201402 - DNA, 567 bp, Artificial Sequence
  derived and/or modified sequence
atgttccaccagatctgggccgccctgctgtacttctacggcatcatcctcaactccatataccagtgccctgagcactcccagctgacaactctcggcgttgacgggaaggagttccccgaggtgcatttagggcagtggtatttcattgctggggccgccccaaccaaggaagagctcgcgacctttgacccagtagataacattgttttcaacatggctgccggatctgctccaatgcaactgcacctgcgggctacaataagaatgaaggacggtctgtgtgtgccgcgcaagtggatctaccacctcaccgagggcagcacggatctgcgaactgagggaagacccgatatgaagactgagctgttcagctcttcctgtccaggaggaatcatgctgaatgagaccggccagggatatcagaggtttctgctctacaatcgcagtccacaccccccagagaaatgtgtggaggagttcaagtcacttacttcgtgcctcgactctaaggccttcctgctcaccccacgcaatcaggaggcttgcgaactgagtaacaactag

SEQ ID NO: 201403 - DNA, 761 bp, Artificial Sequence
  derived and/or modified sequence
agagtggactgagcagccagtaggggagagagcagttaaggcacacagagcaccagctccctcctgcctgaagatgttccaccaaatttgggcagctctgctctacttctatggtattatccttaactccatctaccagtgccctgagcacagtcaactgacaactctgggcgtggatgggaaggagttcccagaggtccacttgggccagtggtactttatcgcaggggcagctcccaccaaggaggagttggcaacttttgaccctgtggacaacattgtcttcaatatggctgctggctctgccccgatgcagctccaccttcgtgctaccatccgcatgaaagatgggctctgtgtgccccggaaatggatctaccacctgactgaagggagcacagatctcagaactgaaggccgccctgacatgaagactgagctcttttccagctcatgcccaggtggaatcatgctgaatgagacaggccagggttaccagcgctttctcctctacaatcgctcaccacatcctcccgaaaagtgtgtggaggaattcaagtccctgacttcctgcctggactccaaagccttcttattgactcctaggaatcaagaggcctgtgagctgtccaataactgacctgtaacttcatctaagtccccagatgggtacaatgggagctgagttgttggagggagaagctggagacttccagctccagctcccactcaagataataaagataatttttcaatcctca

SEQ ID NO: 201404 - DNA, 567 bp, Artificial Sequence
  derived and/or modified sequence
atgttccaccagatctgggccgccctgctgtacttctacggcatcattctgaattcaatctatcagtgccctgagcactctcaactcacaacgcttggcgttgatggcaaagagtttcctgaggtccatctcggacagtggtacttcattgctggggccgctcccactaaggaggaattggcaacattcgatccagtcgacaacatcgttttcaacatggcagcagggagcgcaccaatgcaattgcacctgagagccactatccgcatgaaggatggtctctgcgttccaaggaagtggatctatcatttgacagaaggttccaccgatttgcggacggagggcagaccagatatgaagacagagctgtttagctcgtcatgccccggcggcatcatgttgaatgagacaggccaggggtaccagaggtttctcctgtacaacaggagccctcacccacctgagaaatgtgtggaggagtttaagtctcttacatcgtgtcttgatagcaaagctttcttacttaccccaagaaaccaggaggcctgcgagctgagcaacaactag

SEQ ID NO: 201405 - DNA, 567 bp, Artificial Sequence
  derived and/or modified sequence
atgttccaccagatctgggccgccctgctgtacttctacggcatcattttgaactccatttaccagtgtccagagcacagccagctaacaaccctgggcgtagatgggaaggagtttcccgaggtccacttgggccagtggtattttattgctggggccgcgccaaccaaggaggagctcgccacctttgatcctgtggacaacatcgtgtttaacatggcagcaggctccgcccccatgcagctccatttacgggccaccattaggatgaaagacggcctgtgtgtgccccggaaatggatctatcacttaaccgaagggtcaaccgatctacggacggagggccgcccggatatgaagaccgaactgttctcatcctcctgtcccggcggcataatgttgaacgaaacagggcaaggatatcagcgatttctgttgtacaaccgttctccacacccacctgaaaaatgtgtggaggaatttaagagcctgacctcatgcttagactctaaagcgttcctgctgacccctagaaaccaggaggcttgcgagctgagtaacaattag

SEQ ID NO: 201406 - DNA, 567 bp, Artificial Sequence
  derived and/or modified sequence
atgttccaccagatctgggccgccctgctgtacttctacggcatcatcctcaattcaatataccagtgtcccgagcactctcagcttacgactctcggcgtggatggcaaggagttccctgaggtacacctgggccagtggtatttcatcgctggcgccgcccccacaaaggaggagcttgcgacctttgatccagtcgataatattgttttcaatatggccgcagggtcagccccaatgcagctccacctgagagccaccatccgtatgaaggatgggctttgtgtcccgcgcaaatggatttaccatctcacggaaggttctaccgatttacgtaccgagggcagacctgatatgaagacagagctgtttagctccagttgcccgggcgggattatgctcaacgagaccggacagggctaccaacgctttctgctctataataggagcccccatccccctgagaaatgtgtcgaagagttcaagtcacttacttcttgtctggacagcaaggcatttctactaactccacgtaaccaggaagcctgtgagctctctaacaattag

SEQ ID NO: 201407 - DNA, 567 bp, Artificial Sequence
  derived and/or modified sequence
atgttccaccagatctgggccgccctgctgtacttctacggcatcatcctaaactcgatctatcagtgtccagagcattctcagctgacaactttgggagtggacggaaaggagtttccggaagtccatctgggacagtggtatttcatcgctggtgccgctcccactaaagaggagcttgccactttcgaccctgtcgacaacattgtgtttaacatggctgctgggtctgcacctatgcagcttcatctcagagctactatcaggatgaaagatgggctgtgcgtcccacggaaatggatttaccacctaacagagggatctaccgacctgcggaccgagggacgaccggacatgaagacagaactcttctcctcgtcatgtccaggtgggattatgcttaatgaaacaggccagggttaccaacgcttcctactgtacaatagatctcctcacccccccgagaaatgtgttgaagagtttaagtcactcacttcctgcttggattccaaagccttcctcctgactccccggaatcaggaagcctgcgagctaagcaacaactag

SEQ ID NO: 201408 - DNA, 567 bp, Artificial Sequence
  derived and/or modified sequence
atgttccaccagatctgggccgccctgctgtacttctacggcatcatcctaaattctatttaccagtgtcccgagcattcccagctgactaccttgggggttgacggcaaggagttccctgaagtccacctgggacaatggtacttcatcgctggagccgctcctactaaggaggaactagctacctttgatcctgtggataatattgttttcaatatggctgccggctctgcacctatgcaactccacctcagagctacgatcaggatgaaggatggcctctgtgtgccaaggaaatggatctaccacctgacagagggctccaccgacttgcggactgagggtaggcctgacatgaaaaccgagctgttttcatcttcttgtcccggaggcataatgttgaacgaaaccgggcagggctatcaacgatttctgctttacaacagatcaccccacccaccggagaaatgtgttgaagaatttaagtcgttgacttcctgcctggactccaaggcatttctcctcactccaaggaaccaggaggcatgcgagctcagcaataactag

SEQ ID NO: 201409 - RNA, 567 nt, Artificial Sequence
  derived and/or modified sequence
auguuccaccaaaucugggccgcauuacuuuauuucuauggcaucauccucaauuccauauaccagugucccgagcauucacagcugacuacccuaggaguggacgguaaggaguuucccgaaguucaucuaggacagugguacuuuaucgcuggcgcagcuccaaccaaagaggaauuggcaacuuuugacccuguggauaacauuguauuuaauauggcagccgggagcgcacccaugcaguuacauuuaagggcuacgauccggaugaaggacggcuuaugcguccccagaaaguggaucuaucaccuuacugagggcaguaccgaccuccgaacugagggaagaccugacaugaaaacugagcucuucagcucgagcugcccuggcggaauuaugcuuaacgaaacaggccagggauaucagcgcuuccugcuguacaauagguccccccaccccccugagaagugcguagaggaauuuaaaagcuugacuucaugccucgacucuaaagcauuccugcuaacccccagaaaccaggaagccugugagcuuagcaacaacuag

SEQ ID NO: 201410 - RNA, 567 nt, Artificial Sequence
  derived and/or modified sequence
auguuucaccaaauaugggccgcucugcuuuauuuuuacgggaucauacugaauuccauuuaucaguguccugagcacucacagcugaccacucugggagucgaugguaaagaguucccagaagugcaucucggccagugguacuuuaucgcuggugcugcuccaacuaaagaagagcuggccaccuucgacccaguggacaauaucgucuuuaacauggccgcaggcagcgcaccaaugcaacuccacuugagagcuacaauucggaugaaagauggauuaugcgugccccggaaauggauuuaccaccugaccgagggcucuaccgaucugagaaccgagggcagaccagauaugaaaacagaauuguucucauccagcuguccgggcgggaucauguugaacgaaaccggccagggcuaccaacgcuuucuacuuuacaaccgauccccccacccucccgagaagugcguggaagaguucaaaucccugacgaguugccuugauagcaaagcuuuucuguugacaccucgcaaccaagaggccugcgaacuuuccaauaauuag

SEQ ID NO: 201411 - RNA, 567 nt, Artificial Sequence
  derived and/or modified sequence
auguuccaucaaauuugggcugccuugcucuauuucuacgguauaauucugaauucuaucuaccaguguccagagcauucccagcugacaaccuuaggcguggaugguaaggaauuccccgaagugcacuuagggcaaugguacuuuauagcaggcgcagcaccuacaaaagaagagcuggcuacuuuugauccuguggauaauauuguuuucaacauggcagcagguagugcuccaaugcagcugcaucugagagcuacaauucgaaugaaagacgggcugugugugccucgcaaauggaucuaccaccucacugaaggaaguacagacuugcgaaccgaaggcaggcccgacaugaaaaccgaguuguuuaguaguucuuguccgggaggaaucaugcugaacgagaccggccagggauaccagcgcuuuuugcuuuauaacagauccccacauccuccugagaaaugcguagaggaguucaaaagccugacaucuugucuagacucaaaggcuuuuuuauugacaccuaggaaucaggaggcuugcgaacuguccaauaacuag

SEQ ID NO: 201412 - RNA, 567 nt, Artificial Sequence
  derived and/or modified sequence
auguuucaccaaaucugggcugcgcugcuguacuucuacgguauuauacuuaacagcaucuaccaauguccagaacauucccaauugaccacccugggaguagaugggaaggaauucccugagguucaucuuggucagugguauuuuaucgcaggggcugccccuacgaaggaggaguuggccacuuuugacccaguggacaacaucguauuuaacauggccgccggcagugcaccaaugcaacuccaccuucgagcuaccauucgaaugaaagacggacugugcguuccacggaaauggauuuaccaucugacagaagggucuacagaucugcggacggaaggcagacccgacaugaagacagagcuguucucauccucuugccccggaggcaucaugcucaacgagacaggacagggcuaccagcgcuuucugcuguacaaucggucuccgcaucccccugaaaagugcgucgaggaguucaaaagccucacgagcugucuugacucuaaggcauuuuuacucaccccacgcaaccaagaggcuugcgaauuauccaacaacuag

SEQ ID NO: 201413 - RNA, 567 nt, Artificial Sequence
  derived and/or modified sequence
auguuucaucaaauaugggcugcccuacuuuauuucuacggcauaauccuuaauuccauauaccagugccccgagcacucacagcugaccacccuuggcgucgaugguaaggaauuuccugaaguccaccuuggccagugguacuuuaucgcuggagcagccccuacgaaagaggaacucgcaacauucgaccccguggauaauauuguguuuaacauggccgcuggguccgcaccuaugcagcugcaccugcgcgcgaccauuagaaugaaggauggccugugugugccacguaaauggaucuaccaccugacugaagguuccacagaccugagaacagaaggacgcccugacaugaagacugaacuguuuuccucuucuugucccggaggaauuauguugaacgagaccggccagggcuaccagcgguuuuugcucuacaauagauccccucaccccccggagaaaugcguagaagaguucaaaucgcucaccaguugucuggauucuaaagcuuuccugcuaaccccaaggaaccaagaagccugugagcugucuaacaacuag

SEQ ID NO: 201414 - RNA, 567 nt, Artificial Sequence
  derived and/or modified sequence
auguuccaucagaucugggccgcucugcucuauuucuacgggaucauucugaacucaaucuaucagugccccgagcacagccagcugacuacguuaggaguggacggaaaagaguuuccagagguacaucucggucaaugguauuucaucgcaggcgccgccccaaccaaggaggaacucgccacguuugauccagucgauaauauuguuuucaauauggccgccgguucagcacccaugcagcugcaucucagagcaacaauccggaugaaggauggccugugcguacccagaaaguggauuuaccaucuuacagaaggaucuacugaccucagaacagaaggcaggccagacaugaaaacggaacuguucaguucaaguuguccaggcgguauuaugcuuaacgaaaccggccagggcuaucagagauuucugcuguacaaccgcuccccccaccccccagaaaaaugcgucgaagaguuuaaaucucuuaccagcugcuuagacucaaaggcuuuucuacugaccccuagaaaccaggaggccugcgaauugucaaacaauuag

SEQ ID NO: 201415 - RNA, 567 nt, Artificial Sequence
  derived and/or modified sequence
auguuucaccaaauuugggccgcucuccuguauuucuacgguauuaucuuaaacucuaucuaccaauguccugagcauucccagcuuacuacccuagggguggacggcaaagaauuccccgagguccaucucggucagugguacuucauugcaggcgcagccccuacaaaagaggaauuagcgacauucgaccccguugacaacauagucuuuaacauggcugcagggucggcucccaugcagcugcacuugagagcuaccauuagaaugaaagacggacuuugugucccacggaaguggauauaccaccucacggaaggcucaaccgaucuuagaaccgaaggcagacccgauaugaagacagaacuuuucucuaguuccugucccggggguauaaugcugaaugagacaggccagggguaccagagguuccuguuauacaauagauccccccauccccccgaaaaguguguugaggaguucaagagccugacaucaugcuuagacaguaaggcuuuccuccugacccccaggaaccaagaagcuugcgagcucucaaauaauuag

SEQ ID NO: 201416 - RNA, 567 nt, Artificial Sequence
  derived and/or modified sequence
auguuucaccagauuugggcagcccuacuguacuuuuacggaauuauccugaacuccauuuaucagugucccgaacauucccaacuaacaacgcugggcguggacggcaaagaguuucccgagguucacuuaggccaaugguacuucauugccggagcugccccaaccaaagaggaguuagcgacauucgauccgguggacaacauuguguucaauauggcugcaggcuccgcaccuaugcaguugcaucuaagggcaaccaucagaaugaaagauggacuuugcguaccucguaaguggauauaucaccugaccgaaggaucaacagacuugcgaaccgagggccgcccagacaugaaaaccgaacuguucuccuccuccugucccggaggcauaaugcucaaugagacuggccaagguuaucagcgcuuccucuuguauaacaggucaccccacccccccgaaaagugcguggaggaauuuaaaucucugaccagcugccuggacuccaaggccuuccuguuaacccccagaaaccaggaagcaugugagcucagcaauaacuag

SEQ ID NO: 201417 - RNA, 567 nt, Artificial Sequence
  derived and/or modified sequence
auguuccaccaaaucugggcugcgcuccucuauuucuacggcaucauucuuaauucuaucuaucagugcccugaacauagucagcugaccacccucggcgucgacggcaaggaguuuccugaggugcaucucggacagugguacuucauagccggcgcugccccaacuaaagaggaacuggcuacuuucgacccaguagauaacauaguauuuaauauggccgcuggaucagcaccaaugcaguugcaccuacgagccacgauccgaaugaaagacggacugugcgucccacgcaaguggauuuaccaccugaccgagggcucuaccgaucugagaaccgagggcagaccagauaugaaaacagaauuguucucauccagcuguccgggcgggaucauguugaacgaaaccggccagggcuaccaacgcuuucuacuuuacaaccgauccccccacccucccgagaagugcguggaagaguucaaaucccugacgaguugccuugauagcaaagcuuuucuguugacaccucgcaaccaagaggccugcgaacuuuccaauaauuag

SEQ ID NO: 201418 - RNA, 567 nt, Artificial Sequence
  derived and/or modified sequence
auguuccaucagauaugggccgcacuguuauauuucuauggaaucauacucaacucaaucuaccagugucccgaacacagucaacuuacaacccucggcgucgaugguaaagaguucccugaagugcaucuaggucagugguacuucaucgcuggagccgcgccaacaaaggaagaacuugccacguucgacccuguggacaacauugucuuuaacauggcugcuggcagcgcuccaaugcagcuucaccugagagcaacgauccggaugaaagauggccucugcgucccccggaaguggauuuaccaucucacagagggcucaaccgacuugcggaccgagggacgaccugauaugaagaccgaacuuuuuucuagcuccugcccugggggcauaaugcugaaugaaacaggccagggauaccagcgcuuccugcuauauaauagauccccucauccuccugagaagugugucgaagaauucaagucacugaccucuugcuuagauucaaaggccuucuuacugacuccgcgcaaucaggaagcuugcgaacucuccaacaacuag

SEQ ID NO: 201419 - RNA, 567 nt, Artificial Sequence
  derived and/or modified sequence
auguuccaccagaucugggcagcgcuguuauacuucuauggaauuauccuuaacucaaucuaccagugcccugaacauucccagcucaccacauugggcguggacggaaaagaauucccggaaguucacuuaggacagugguacuucaucgccggagcugcaccuacuaaagaggagcucgcgaccuuugaccccgucgacaauaucgucuucaacauggcagccggcagcgcuccgaugcaauuacaccugcgcgccacaaucagaaugaaagauggucuuugcguuccgcgaaaauggaucuaucacuugaccgagggaucaacugaccugaggaccgagggaagacccgauaugaaaacugaacuguucagcucaaguugccccggaggaauaaugcuuaacgagacuggccagggcuaccaacgguuucuccuguauaacagaucgccacacccaccugaaaagugcguggaggaguuuaagucccugacgucuugccuugacuccaaagcauuucugcugacaccccgaaaccaggaggcuugcgagcugaguaauaauuag

SEQ ID NO: 201420 - RNA, 567 nt, Artificial Sequence
  derived and/or modified sequence
auguuccaucaaauuugggccgcccugcuuuauuuuuacgguauaauccugaacagcauauaccagugucccgagcauagucagcucaccacacugggaguggacgggaaggaguuccccgaaguccauuuaggucagugguacuucaucgcuggcgcagcaccaacgaaggaagaacuagcuacauucgacccaguugauaauauaguguucaacauggcagcuggcuccgccccuaugcagcuucaccuccgugcaaccauccgaaugaaagauggucuauguguuccaagaaaguggauuuaccaccuaacagaaggaucaacugaccuaaggacugagggcagaccagauaugaaaaccgaacuguucuccagcucuugcccuggcggcauuaugcugaacgagaccggccaaggauaccagcgauuccuccuguacaaucgguccccacaucccccagagaagugugucgaagaguucaagucacucacgucuugucuugauaguaaagcguuccuauugacaccucggaaucaagaggcuugugaacuauccaacaacuag

SEQ ID NO: 201421 - RNA, 567 nt, Artificial Sequence
  derived and/or modified sequence
auguuucaucaaaucugggcagcucugcucuacuucuacgguauuauucugaacuccauuuaucaaugcccagaacacagccaacuaacaacgcucggcguugacggcaaggaguuuccugagguacaucucggccagugguauuucaucgcuggagccgccccgacaaaagaggaacuggcuacauuugacccuguugacaauaucgucuucaacauggcggccggaagugccccaaugcaguuacaccucagagcaacuauucgcaugaaagauggccucugugugccccgcaaauggauuuaccaucuuacagaaggaucuacugaccucagaacagaaggcaggccagacaugaaaacggaacuguucaguucaaguuguccaggcgguauuaugcuuaacgaaaccggccagggcuaucagagauuucugcuguacaaccgcuccccccaccccccagaaaaaugcgucgaagaguuuaaaucucuuaccagcugcuuagacucaaaggcuuuucuacugaccccuagaaaccaggaggccugcgaauugucaaacaauuag

SEQ ID NO: 201422 - RNA, 567 nt, Artificial Sequence
  derived and/or modified sequence
auguuucaucagaucugggcagcucuccucuauuuuuacggaauuauucuaaacucgaucuaucagugcccagagcauucccaguugacaacucucggcguggacggaaaagaauucccugaagugcaccucggccaaugguauuucauugcaggggcagcaccuacaaaagaggagcucgccacuuuugauccugucgauaacauuguauucaacauggccgccggaucggcucccaugcaauugcacuuaagggcuacuauucgaaugaaagacggguuguguguucccaggaaguggauuuaucaucucacugaagguuccacugauuuacgaacugaaggaaggcccgacaugaagaccgagcuguucucaaguuccugcccuggagggauaauguugaaugagacuggccagggauaucagcguuuccugcuguauaauagaagcccgcauccaccggaaaaaugcguugaggaauucaaaucauugacgucuugccuggacagcaaagccuuuuugcuuacuccccguaaccaagaggccugugaguuaaguaacaacuag

SEQ ID NO: 201423 - protein, 270 aa, Artificial Sequence
  derived and/or modified sequence
MSSYFVNSFCGRYPNGPDYQLHNYGDHSSVSEQFRDSASMHSGRYGYGYNGMDLSVGRSGSGHFGSGERARSYAASASAAPAEPRYSQPATSTHSPQPDPLPCSAVAPSPGSDSHHGGKNSLSNSSGASADAGSTHISSREGVGTASGAEEDAPASSEQASAQSEPSPAPPAQPQIYPWMRKLHISHDNIGGPEGKRARTAYTRYQTLELEKEFHFNRYLTRRRRIEIAHALCLSERQIKIWFQNRRMKWKKDNKLKSMSMAAAGGAFRP

SEQ ID NO: 201424 - DNA, 1332 bp, Artificial Sequence
  derived and/or modified sequence
gggtgctatagacgcacaaacgaccgcgagccacaaatcaagcacacatatcaaaaaacaaatgagctcttattttgtaaactcattttgcggtcgctatccaaatggcccggactaccagttgcataattatggagatcatagttccgtgagcgagcaattcagggactcggcgagcatgcactccggcaggtacggctacggctacaatggcatggatctcagcgtcggccgctcgggctccggccactttggctccggagagcgcgcccgcagctacgctgccagcgccagcgcggcgcccgccgagcccaggtacagccagccggccacgtccacgcactctcctcagcccgatccgctgccctgctccgccgtggccccctcgcccggcagcgacagccaccacggcgggaaaaactccctaagcaactccagcggcgcctcggccgacgccggcagcacccacatcagcagcagagagggggttggcacggcgtccggagccgaggaggacgcccctgccagcagcgagcaggcgagtgcgcagagcgagccgagcccggcgccgcccgcccaaccccagatctacccctggatgcgcaagctgcacataagtcatgacaacataggcggcccggaaggcaaaagggcccggacggcctacacgcgctaccagaccctggagctggagaaggagttccacttcaaccgttacctgacccgcagaaggaggattgaaatagcacatgctctttgcctctccgagagacaaattaaaatctggttccaaaaccggagaatgaagtggaaaaaagataataagctgaaaagcatgagcatggccgcggcaggaggggccttccgtccctgagtatctgagcgtttaaagtactgagcagtattagcggatcccgcgtagtgtcagtactaaggtgactttctgaaactcccttgtgttccttctgtgaagaagccctgttctcgttgccctaattcatcttttaatcatgagcctgtttattgccattatagcgcctgtataagtagatctgctttctgttcatctctttgtcctgaatggctttgtcttgaaaaaaaatagatgttttaacttatttatatgaagcaagctgtgttacttgaagtaactataacaaaaaaagaaaagagaaaaaaaaacacacaaaaagtcccccttcaatctcgtttagtgccaatgttgtgtgttgcactcaagttgtttaactgtgcatgtgcgtggaagtgttcctgtctcaatagctccaagctgttaaagatatttttattcaaactacctatattccttgt

SEQ ID NO: 201425 - DNA, 813 bp, Artificial Sequence
  derived and/or modified sequence
atgtcttcctatttcgtaaacagcttttgtggtcgctatcctaatggccctgactatcaactgcacaactacggggaccacagttctgtcagcgaacagtttcgtgattcggctagtatgcacagcggaaggtacggatatggatataatggaatggatctatcagttggtcggtcgggcagtggtcacttcggatcgggggagagggctcgatcctatgctgccagcgctagcgccgccccggccgagccccgatattcgcagccagcaacctccacccactccccacagccagaccctctaccttgttccgctgtcgcacccagtcccggaagcgattcacaccacgggggcaagaattccctgtctaactcatccggggccagtgcagacgccggcagtactcacatttcatcccgggaaggggtaggcacagcctccggagccgaggaggacgctcccgcctcttctgagcaagcatcagcgcagagcgagccatctcctgcccccccagctcaaccccagatttacccatggatgcgtaagctgcacattagccacgataatattggaggacccgagggaaagagggctcgcactgcttacacaaggtaccagaccttagaactggagaaggagtttcacttcaatagatacctgactaggcggagaagaatagagattgctcatgccttatgtctgtcagaaagacagatcaaaatctggtttcaaaaccggagaatgaagtggaaaaaggataataagttaaagagcatgagcatggcagccgctgggggggcttttcgtccctag

SEQ ID NO: 201426 - DNA, 1657 bp, Artificial Sequence
  derived and/or modified sequence
gggtgctatagacgcacaaacgaccgcgagccacaaatcaagcacacatatcaaaaaacaaatgagctcttattttgtaaactcattttgcggtcgctatccaaatggcccggactaccagttgcataattatggagatcatagttccgtgagcgagcaattcagggactcggcgagcatgcactccggcaggtacggctacggctacaatggcatggatctcagcgtcggccgctcgggctccggccactttggctccggagagcgcgcccgcagctacgctgccagcgccagcgcggcgcccgccgagcccaggtacagccagccggccacgtccacgcactctcctcagcccgatccgctgccctgctccgccgtggccccctcgcccggcagcgacagccaccacggcgggaaaaactccctaagcaactccagcggcgcctcggccgacgccggcagcacccacatcagcagcagagagggggttggcacggcgtccggagccgaggaggacgcccctgccagcagcgagcaggcgagtgcgcagagcgagccgagcccggcgccgcccgcccaaccccagatctacccctggatgcgcaagctgcacataagtcatgacaacataggcggcccggaaggcaaaagggcccggacggcctacacgcgctaccagaccctggagctggagaaggagttccacttcaaccgttacctgacccgcagaaggaggattgaaatagcacatgctctttgcctctccgagagacaaattaaaatctggttccaaaaccggagaatgaagtggaaaaaagataataagctgaaaagcatgagcatggccgcggcaggaggggccttccgtccctgagtatctgagcgtttaaagtactgagcagtattagcggatcccgcgtagtgtcagtactaaggtgactttctgaaactcccttgtgttccttctgtgaagaagccctgttctcgttgccctaattcatcttttaatcatgagcctgtttattgccattatagcgcctgtataagtagatctgctttctgttcatctctttgtcctgaatggctttgtcttgaaaaaaaatagatgttttaacttatttatatgaagcaagctgtgttacttgaagtaactataacaaaaaaagaaaagagaaaaaaaaacacacaaaaagtcccccttcaatctcgtttagtgccaatgttgtgtgttgcactcaagttgtttaactgtgcatgtgcgtggaagtgttcctgtctcaatagctccaagctgttaaagatatttttattcaaactacctatattccttgtgtaattaatgctgttgtagaggtgacttgatgagacacaacttgttcgacgtgtagtgactagtgactctgtgatgaaaactgtgactccaagcggtgtgtccctgcgtgcctttataggaccctttgcacgaactctggaagtggctcttataagcgcagcttcagtgatgtatgtttttgtgaacaaagttacaaatattgtccaagtctggctgttttaagcaaactgtgatcagcttttttttttttttttttttttttgtatttgtttttaaggaaaaaatactgactggaacaaaaaataaactttctattgtaagttc

SEQ ID NO: 201427 - DNA, 813 bp, Artificial Sequence
  derived and/or modified sequence
atgagcagctactttgtgaacagcttctgtggccgctacccaaatggaccagactaccagctgcacaactacggggaccacagctctgtgtctgagcagttccgggacagcgcctccatgcacagcggccgctatggctacggctacaacggcatggacctgtctgtgggccgcagcggcagcggccacttcggcagcggggagcgggcccggagctatgctgccagcgccagcgctgccccagctgagccccgctacagccagcctgccaccagcacccacagcccccagcctgaccccctgccctgcagcgctgtggcccccagccctggcagtgacagccaccacggcggcaagaacagcctgagcaacagcagcggggccagcgcagatgctggcagcacccacatcagcagccgggagggcgtgggcacagccagcggggctgaagaagatgccccagccagcagcgagcaggccagcgcccagagcgagcccagccctgcccccccagcccagccccagatctacccctggatgaggaagctgcacatcagccatgacaacatcggcggccctgagggcaagagggccaggacagcctacacccgctaccagaccctggagctggagaaggagttccacttcaaccgctacctgaccaggagaagacgcatcgagatcgcccacgccctgtgcctgtctgagcggcagatcaagatctggttccagaacagaaggatgaagtggaagaaggacaacaagctgaagtccatgtccatggctgctgctgggggcgccttccggccctag

SEQ ID NO: 201428 - DNA, 813 bp, Artificial Sequence
  derived and/or modified sequence
atgagcagctacttcgtgaacagcttctgcggccggtaccccaacgggcccgactaccagctgcataattacggagatcactcatccgtgtctgagcagttccgggactcagccagtatgcatagcggccgttacggatatggttacaacgggatggacctgtcggtgggtcggtcaggctcgggacacttcgggtcaggagagcgcgccagatcctacgctgcatctgccagcgctgccccagcagaaccccgttattcacagcccgcaactagtacccattctccacagcctgatccactgccctgtagcgccgtcgctcctagtcccgggtctgattcccaccacggcgggaaaaactccctgtcaaattcctccggcgcatccgcggatgccggcagcactcacatttcttcccgagaaggcgtcggaacagcatccggcgcagaggaggacgcgcctgccagttctgaacaggcctccgcccagtctgagccgtctcctgcgccaccagcccaacctcagatatacccttggatgcgcaaactgcatattagccacgataatatcggagggcctgagggcaagcgggctcggacagcttatactcggtaccagactttagaattggaaaaagaatttcacttcaatagatatctgacgcggcgcagacgtatcgaaatagctcacgctttgtgcctgtcagagcggcaaattaagatctggttccagaaccgccgcatgaaatggaagaaagacaacaagttaaagagtatgagcatggccgccgccgggggggcctttaggccctag

SEQ ID NO: 201429 - DNA, 813 bp, Artificial Sequence
  derived and/or modified sequence
atgtccagttactttgtgaattcattttgcggccgttatccaaacgggccagattatcagctccacaactacggagaccattcctccgtgtccgaacagttcagagatagtgccagtatgcatagtgggaggtatgggtatggatataatggcatggacctcagcgtaggcagaagtggctccggacatttcgggtcgggtgaacgggctcggtcatatgcagcctcggcgtcagccgcaccagccgaacctcgctattctcagcccgctacctctacacacagtcctcaacctgaccccttgccctgttccgctgttgcgccaagtccagggagcgatagccatcatggcggtaagaactctctgtcaaacagttcaggtgcatcagcagatgccggaagtacccatatatcttcccgagaaggcgttggcacggcttccggtgctgaggaggatgcacccgcatcctccgaacaagctagtgcccaatctgagcctagccccgcaccccctgcacagccacagatttacccctggatgcgcaagttacatattagccatgataacatcggcggtccggaaggcaagagagctcgcacagcttacacccggtatcagacactggagctggagaaggagtttcatttcaatcgctacctcacaaggagaagacgcattgaaatagctcatgccttatgtctcagtgagcgacagatcaaaatttggtttcaaaacaggaggatgaagtggaagaaagacaacaagttgaaatccatgtccatggcagccgctgggggagcgtttcgtccttag

SEQ ID NO: 201430 - DNA, 813 bp, Artificial Sequence
  derived and/or modified sequence
atgagcagctacttcgtgaacagcttctgcggcagataccccaacggccccgactaccagctgcacaactacggcgaccacagcagcgtgagcgagcagttcagagacagcgccagcatgcacagcggcagatacggctacggctacaacggcatggacctgagcgtgggcagaagcggcagcggccacttcggcagcggcgagagagccagaagctacgccgccagcgccagcgccgcccccgccgagcccagatacagccagcccgccaccagcacccacagcccccagcccgaccccctgccctgcagcgccgtggcccccagccccggcagcgacagccaccacggcggcaagaacagcctgagcaacagcagcggcgccagcgccgacgccggcagcacccacatcagcagcagagagggcgtgggcaccgccagcggcgccgaggaggacgcccccgccagcagcgagcaggccagcgcccagagcgagcccagccccgccccccccgcccagccccagatctacccctggatgagaaagctgcacatcagccacgacaacatcggcggccccgagggcaagagagccagaaccgcctacaccagataccagaccctggagctggagaaggagttccacttcaacagatacctgaccagaagaagaagaatcgagatcgcccacgccctgtgcctgagcgagagacagatcaagatctggttccagaacagaagaatgaagtggaagaaggacaacaagctgaagagcatgagcatggccgccgccggcggcgccttcagaccctag

SEQ ID NO: 201431 - protein, 4244 aa, Artificial Sequence
  derived and/or modified sequence
MMPAQYALTSSLVLLVLLSTARAGPFSSRSNVTLPAPRPPPQPGGHTVGAGVGSPSSQLYEHTVEGGEKQVVFTHRINLPPSTGCGCPPGTEPPVLASEVQALRVRLEILEELVKGLKEQCTGGCCPASAQAGTGQTDVRTLCSLHGVFDLSRCTCSCEPGWGGPTCSDPTDAEIPPSSPPSASGSCPDDCNDQGRCVRGRCVCFPGYTGPSCGWPSCPGDCQGRGRCVQGVCVCRAGFSGPDCSQRSCPRGCSQRGRCEGGRCVCDPGYTGDDCGMRSCPRGCSQRGRCENGRCVCNPGYTGEDCGVRSCPRGCSQRGRCKDGRCVCDPGYTGEDCGTRSCPWDCGEGGRCVDGRCVCWPGYTGEDCSTRTCPRDCRGRGRCEDGECICDTGYSGDDCGVRSCPGDCNQRGRCEDGRCVCWPGYTGTDCGSRACPRDCRGRGRCENGVCVCNAGYSGEDCGVRSCPGDCRGRGRCESGRCMCWPGYTGRDCGTRACPGDCRGRGRCVDGRCVCNPGFTGEDCGSRRCPGDCRGHGLCEDGVCVCDAGYSGEDCSTRSCPGGCRGRGQCLDGRCVCEDGYSGEDCGVRQCPNDCSQHGVCQDGVCICWEGYVSEDCSIRTCPSNCHGRGRCEEGRCLCDPGYTGPTCATRMCPADCRGRGRCVQGVCLCHVGYGGEDCGQEEPPASACPGGCGPRELCRAGQCVCVEGFRGPDCAIQTCPGDCRGRGECHDGSCVCKDGYAGEDCGEEVPTIEGMRMHLLEETTVRTEWTPAPGPVDAYEIQFIPTTEGASPPFTARVPSSASAYDQRGLAPGQEYQVTVRALRGTSWGLPASKTITTMIDGPQDLRVVAVTPTTLELGWLRPQAEVDRFVVSYVSAGNQRVRLEVPPEADGTLLTDLMPGVEYVVTVTAERGRAVSYPASVRANTGSSPLGLLGTTDEPPPSGPSTTQGAQAPLLQQRPQELGELRVLGRDETGRLRVVWTAQPDTFAYFQLRMRVPEGPGAHEEVLPGDVRQALVPPPPPGTPYELSLHGVPPGGKPSDPIIYQGIMDKDEEKPGKSSGPPRLGELTVTDRTSDSLLLRWTVPEGEFDSFVIQYKDRDGQPQVVPVEGPQRSAVITSLDPGRKYKFVLYGFVGKKRHGPLVAEAKILPQSDPSPGTPPHLGNLWVTDPTPDSLHLSWTVPEGQFDTFMVQYRDRDGRPQVVPVEGPERSFVVSSLDPDHKYRFTLFGIANKKRYGPLTADGTTAPERKEEPPRPEFLEQPLLGELTVTGVTPDSLRLSWTVAQGPFDSFMVQYKDAQGQPQAVPVAGDENEVTVPGLDPDRKYKMNLYGLRGRQRVGPESVVAKTAPQEDVDETPSPTELGTEAPESPEEPLLGELTVTGSSPDSLSLFWTVPQGSFDSFTVQYKDRDGRPRAVRVGGKESEVTVGGLEPGHKYKMHLYGLHEGQRVGPVSAVGVTAPQQEETPPATESPLEPRLGELTVTDVTPNSVGLSWTVPEGQFDSFIVQYKDKDGQPQVVPVAADQREVTVYNLEPERKYKMNMYGLHDGQRMGPLSVVIVTAPLPPAPATEASKPPLEPRLGELTVTDITPDSVGLSWTVPEGEFDSFVVQYKDRDGQPQVVPVAADQREVTIPDLEPSRKYKFLLFGIQDGKRRSPVSVEAKTVARGDASPGAPPRLGELWVTDPTPDSLRLSWTVPEGQFDSFVVQFKDKDGPQVVPVEGHERSVTVTPLDAGRKYRFLLYGLLGKKRHGPLTADGTTEARSAMDDTGTKRPPKPRLGEELQVTTVTQNSVGLSWTVPEGQFDSFVVQYKDRDGQPQVVPVEGSLREVSVPGLDPAHRYKLLLYGLHHGKRVGPISAVAITAGREETETETTAPTPPAPEPHLGELTVEEATSHTLHLSWMVTEGEFDSFEIQYTDRDGQLQMVRIGGDRNDITLSGLESDHRYLVTLYGFSDGKHVGPVHVEALTVPEEEKPSEPPTATPEPPIKPRLGELTVTDATPDSLSLSWTVPEGQFDHFLVQYRNGDGQPKAVRVPGHEEGVTISGLEPDHKYKMNLYGFHGGQRMGPVSVVGVTAAEEETPSPTEPSMEAPEPAEEPLLGELTVTGSSPDSLSLSWTVPQGRFDSFTVQYKDRDGRPQVVRVGGEESEVTVGGLEPGRKYKMHLYGLHEGRRVGPVSAVGVTAPEEESPDAPLAKLRLGQMTVRDITSDSLSLSWTVPEGQFDHFLVQFKNGDGQPKAVRVPGHEDGVTISGLEPDHKYKMNLYGFHGGQRVGPVSAVGLTAPGKDEEMAPASTEPPTPEPPIKPRLEELTVTDATPDSLSLSWTVPEGQFDHFLVQYKNGDGQPKATRVPGHEDRVTISGLEPDNKYKMNLYGFHGGQRVGPVSAIGVTAAEEETPSPTEPSMEAPEPPEEPLLGELTVTGSSPDSLSLSWTVPQGRFDSFTVQYKDRDGRPQVVRVGGEESEVTVGGLEPGRKYKMHLYGLHEGRRVGPVSTVGVTAPQEDVDETPSPTEPGTEAPGPPEEPLLGELTVTGSSPDSLSLSWTVPQGRFDSFTVQYKDRDGRPQAVRVGGQESKVTVRGLEPGRKYKMHLYGLHEGRRLGPVSAVGVTEDEAETTQAVPTMTPEPPIKPRLGELTMTDATPDSLSLSWTVPEGQFDHFLVQYRNGDGQPKAVRVPGHEDGVTISGLEPDHKYKMNLYGFHGGQRVGPISVIGVTAAEEETPSPTELSTEAPEPPEEPLLGELTVTGSSPDSLSLSWTIPQGHFDSFTVQYKDRDGRPQVMRVRGEESEVTVGGLEPGRKYKMHLYGLHEGRRVGPVSTVGVTAPEDEAETTQAVPTTTPEPPNKPRLGELTVTDATPDSLSLSWMVPEGQFDHFLVQYRNGDGQPKVVRVPGHEDGVTISGLEPDHKYKMNLYGFHGGQRVGPISVIGVTAAEEETPAPTEPSTEAPEPPEEPLLGELTVTGSSPDSLSLSWTIPQGRFDSFTVQYKDRDGRPQVVRVRGEESEVTVGGLEPGCKYKMHLYGLHEGQRVGPVSAVGVTAPKDEAETTQAVPTMTPEPPIKPRLGELTVTDATPDSLSLSWMVPEGQFDHFLVQYRNGDGQPKAVRVPGHEDGVTISGLEPDHKYKMNLYGFHGGQRVGPVSAIGVTEEETPSPTEPSTEAPEAPEEPLLGELTVTGSSPDSLSLSWTVPQGRFDSFTVQYKDRDGQPQVVRVRGEESEVTVGGLEPGRKYKMHLYGLHEGQRVGPVSTVGITAPLPTPLPVEPRLGELAVAAVTSDSVGLSWTVAQGPFDSFLVQYRDAQGQPQAVPVSGDLRAVAVSGLDPARKYKFLLFGLQNGKRHGPVPVEARTAPDTKPSPRLGELTVTDATPDSVGLSWTVPEGEFDSFVVQYKDKDGRLQVVPVAANQREVTVQGLEPSRKYRFLLYGLSGRKRLGPISADSTTAPLEKELPPHLGELTVAEETSSSLRLSWTVAQGPFDSFVVQYRDTDGQPRAVPVAADQRTVTVEDLEPGKKYKFLLYGLLGGKRLGPVSALGMTAPEEDTPAPELAPEAPEPPEEPRLGVLTVTDTTPDSMRLSWSVAQGPFDSFVVQYEDTNGQPQALLVDGDQSKILISGLEPSTPYRFLLYGLHEGKRLGPLSAEGTTGLAPAGQTSEESRPRLSQLSVTDVTTSSLRLNWEAPPGAFDSFLLRFGVPSPSTLEPHPRPLLQRELMVPGTRHSAVLRDLRSGTLYSLTLYGLRGPHKADSIQGTARTLSPVLESPRDLQFSEIRETSAKVNWMPPPSRADSFKVSYQLADGGEPQSVQVDGQARTQKLQGLIPGARYEVTVVSVRGFEESEPLTGFLTTVPDGPTQLRALNLTEGFAVLHWKPPQNPVDTYDVQVTAPGAPPLQAETPGSAVDYPLHDLVLHTNYTATVRGLRGPNLTSPASITFTTGLEAPRDLEAKEVTPRTALLTWTEPPVRPAGYLLSFHTPGGQNQEILLPGGITSHQLLGLFPSTSYNARLQAMWGQSLLPPVSTSFTTGGLRIPFPRDCGEEMQNGAGASRTSTIFLNGNRERPLNVFCDMETDGGGWLVFQRRMDGQTDFWRDWEDYAHGFGNISGEFWLGNEALHSLTQAGDYSMRVDLRAGDEAVFAQYDSFHVDSAAEYYRLHLEGYHGTAGDSMSYHSGSVFSARDRDPNSLLISCAVSYRGAWWYRNCHYANLNGLYGSTVDHQGVSWYHWKGFEFSVPFTEMKLRPRNFRSPAGGG

SEQ ID NO: 201432 - protein, 4242 aa, Artificial Sequence
  derived and/or modified sequence
MMPAQYALTSSLVLLVLLSTARAGPFSSRSNVTLPAPRPPPQPGGHTVGAGVGSPSSQLYEHTVEGGEKQVVFTHRINLPPSTGCGCPPGTEPPVLASEVQALRVRLEILEELVKGLKEQCTGGCCPASAQAGTGQTDVRTLCSLHGVFDLSRCTCSCEPGWGGPTCSDPTDAEIPPSSPPSASGSCPDDCNDQGRCVRGRCVCFPGYTGPSCGWPSCPGDCQGRGRCVQGVCVCRAGFSGPDCSQRSCPRGCSQRGRCEGGRCVCDPGYTGDDCGMRSCPRGCSQRGRCENGRCVCNPGYTGEDCGVRSCPRGCSQRGRCKDGRCVCDPGYTGEDCGTRSCPWDCGEGGRCVDGRCVCWPGYTGEDCSTRTCPRDCRGRGRCEDGECICDTGYSGDDCGVRSCPGDCNQRGRCEDGRCVCWPGYTGTDCGSRACPRDCRGRGRCENGVCVCNAGYSGEDCGVRSCPGDCRGRGRCESGRCMCWPGYTGRDCGTRACPGDCRGRGRCVDGRCVCNPGFTGEDCGSRRCPGDCRGHGLCEDGVCVCDAGYSGEDCSTRSCPGGCRGRGQCLDGRCVCEDGYSGEDCGVRQCPNDCSQHGVCQDGVCICWEGYVSEDCSIRTCPSNCHGRGRCEEGRCLCDPGYTGPTCATRMCPADCRGRGRCVQGVCLCHVGYGGEDCGQEEPPASACPGGCGPRELCRAGQCVCVEGFRGPDCAIQTCPGDCRGRGECHDGSCVCKDGYAGEDCGEEVPTIEGMRMHLLEETTVRTEWTPAPGPVDAYEIQFIPTTEGASPPFTARVPSSASAYDQRGLAPGQEYQVTVRALRGTSWGLPASKTITTMIDGPQDLRVVAVTPTTLELGWLRPQAEVDRFVVSYVSAGNQRVRLEVPPEADGTLLTDLMPGVEYVVTVTAERGRAVSYPASVRANTGSSPLGLLGTTDEPPPSGPSTTQGAQAPLLQQRPQELGELRVLGRDETGRLRVVWTAQPDTFAYFQLRMRVPEGPGAHEEVLPGDVRQALVPPPPPGTPYELSLHGVPPGGKPSDPIIYQGIMDKDEEKPGKSSGPPRLGELTVTDRTSDSLLLRWTVPEGEFDSFVIQYKDRDGQPQVVPVEGPQRSAVITSLDPGRKYKFVLYGFVGKKRHGPLVAEAKILPQSDPSPGTPPHLGNLWVTDPTPDSLHLSWTVPEGQFDTFMVQYRDRDGRPQVVPVEGPERSFVVSSLDPDHKYRFTLFGIANKKRYGPLTADGTTAPERKEEPPRPEFLEQPLLGELTVTGVTPDSLRLSWTVAQGPFDSFMVQYKDAQGQPQAVPVAGDENEVTVPGLDPDRKYKMNLYGLRGRQRVGPESVVAKTAPQEDVDETPSPTELGTEAPESPEEPLLGELTVTGSSPDSLSLFWTVPQGSFDSFTVQYKDRDGRPRAVRVGGKESEVTVGGLEPGHKYKMHLYGLHEGQRVGPVSAVGVTAPQQEETPPATESPLEPRLGELTVTDVTPNSVGLSWTVPEGQFDSFIVQYKDKDGQPQVVPVAADQREVTVYNLEPERKYKMNMYGLHDGQRMGPLSVVIVTAPLPPAPATEASKPPLEPRLGELTVTDITPDSVGLSWTVPEGEFDSFVVQYKDRDGQPQVVPVAADQREVTIPDLEPSRKYKFLLFGIQDGKRRSPVSVEAKTVARGDASPGAPPRLGELWVTDPTPDSLRLSWTVPEGQFDSFVVQFKDKDGPQVVPVEGHERSVTVTPLDAGRKYRFLLYGLLGKKRHGPLTADGTTEARSAMDDTGTKRPPKPRLGEELQVTTVTQNSVGLSWTVPEGQFDSFVVQYKDRDGQPQVVPVEGSLREVSVPGLDPAHRYKLLLYGLHHGKRVGPISAVAITAGREETETETTAPTPPAPEPHLGELTVEEATSHTLHLSWMVTEGEFDSFEIQYTDRDGQLQMVRIGGDRNDITLSGLESDHRYLVTLYGFSDGKHVGPVHVEALTVPEEEKPSEPPTATPEPPIKPRLGELTVTDATPDSLSLSWTVPEGQFDHFLVQYRNGDGQPKAVRVPGHEEGVTISGLEPDHKYKMNLYGFHGGQRMGPVSVVGVTAAEEETPSPTEPSMEAPEPAEEPLLGELTVTGSSPDSLSLSWTVPQGRFDSFTVQYKDRDGRPQVVRVGGEESEVTVGGLEPGRKYKMHLYGLHEGRRVGPVSAVGVTAPEEESPDAPLAKLRLGQMTVRDITSDSLSLSWTVPEGQFDHFLVQFKNGDGQPKAVRVPGHEDGVTISGLEPDHKYKMNLYGFHGGQRVGPVSAVGLTAPGKDEEMAPASTEPPTPEPPIKPRLEELTVTDATPDSLSLSWTVPEGQFDHFLVQYKNGDGQPKATRVPGHEDRVTISGLEPDNKYKMNLYGFHGGQRVGPVSAIGVTAAEEETPSPTEPSMEAPEPPEEPLLGELTVTGSSPDSLSLSWTVPQGRFDSFTVQYKDRDGRPQVVRVGGEESEVTVGGLEPGRKYKMHLYGLHEGRRVGPVSTVGVTAPQEDVDETPSPTEPGTEAPGPPEEPLLGELTVTGSSPDSLSLSWTVPQGRFDSFTVQYKDRDGRPQAVRVGGQESKVTVRGLEPGRKYKMHLYGLHEGRRLGPVSAVGVTEDEAETTQAVPTMTPEPPIKPRLGELTMTDATPDSLSLSWTVPEGQFDHFLVQYRNGDGQPKAVRVPGHEDGVTISGLEPDHKYKMNLYGFHGGQRVGPISVIGVTAAEEETPSPTELSTEAPEPPEEPLLGELTVTGSSPDSLSLSWTIPQGHFDSFTVQYKDRDGRPQVMRVRGEESEVTVGGLEPGRKYKMHLYGLHEGRRVGPVSTVGVTEDEAETTQAVPTTTPEPPNKPRLGELTVTDATPDSLSLSWMVPEGQFDHFLVQYRNGDGQPKVVRVPGHEDGVTISGLEPDHKYKMNLYGFHGGQRVGPISVIGVTAAEEETPAPTEPSTEAPEPPEEPLLGELTVTGSSPDSLSLSWTIPQGRFDSFTVQYKDRDGRPQVVRVRGEESEVTVGGLEPGCKYKMHLYGLHEGQRVGPVSAVGVTAPKDEAETTQAVPTMTPEPPIKPRLGELTVTDATPDSLSLSWMVPEGQFDHFLVQYRNGDGQPKAVRVPGHEDGVTISGLEPDHKYKMNLYGFHGGQRVGPVSAIGVTEEETPSPTEPSTEAPEAPEEPLLGELTVTGSSPDSLSLSWTVPQGRFDSFTVQYKDRDGQPQVVRVRGEESEVTVGGLEPGRKYKMHLYGLHEGQRVGPVSTVGITAPLPTPLPVEPRLGELAVAAVTSDSVGLSWTVAQGPFDSFLVQYRDAQGQPQAVPVSGDLRAVAVSGLDPARKYKFLLFGLQNGKRHGPVPVEARTAPDTKPSPRLGELTVTDATPDSVGLSWTVPEGEFDSFVVQYKDKDGRLQVVPVAANQREVTVQGLEPSRKYRFLLYGLSGRKRLGPISADSTTAPLEKELPPHLGELTVAEETSSSLRLSWTVAQGPFDSFVVQYRDTDGQPRAVPVAADQRTVTVEDLEPGKKYKFLLYGLLGGKRLGPVSALGMTAPEEDTPAPELAPEAPEPPEEPRLGVLTVTDTTPDSMRLSWSVAQGPFDSFVVQYEDTNGQPQALLVDGDQSKILISGLEPSTPYRFLLYGLHEGKRLGPLSAEGTTGLAPAGQTSEESRPRLSQLSVTDVTTSSLRLNWEAPPGAFDSFLLRFGVPSPSTLEPHPRPLLQRELMVPGTRHSAVLRDLRSGTLYSLTLYGLRGPHKADSIQGTARTLSPVLESPRDLQFSEIRETSAKVNWMPPPSRADSFKVSYQLADGGEPQSVQVDGQARTQKLQGLIPGARYEVTVVSVRGFEESEPLTGFLTTVPDGPTQLRALNLTEGFAVLHWKPPQNPVDTYDVQVTAPGAPPLQAETPGSAVDYPLHDLVLHTNYTATVRGLRGPNLTSPASITFTTGLEAPRDLEAKEVTPRTALLTWTEPPVRPAGYLLSFHTPGGQNQEILLPGGITSHQLLGLFPSTSYNARLQAMWGQSLLPPVSTSFTTGGLRIPFPRDCGEEMQNGAGASRTSTIFLNGNRERPLNVFCDMETDGGGWLVFQRRMDGQTDFWRDWEDYAHGFGNISGEFWLGNEALHSLTQAGDYSMRVDLRAGDEAVFAQYDSFHVDSAAEYYRLHLEGYHGTAGDSMSYHSGSVFSARDRDPNSLLISCAVSYRGAWWYRNCHYANLNGLYGSTVDHQGVSWYHWKGFEFSVPFTEMKLRPRNFRSPAGGG

SEQ ID NO: 201433 - protein, 673 aa, Artificial Sequence
  derived and/or modified sequence
MRLSWSVAQGPFDSFVVQYEDTNGQPQALLVDGDQSKILISGLEPSTPYRFLLYGLHEGKRLGPLSAEGTTGLAPAGQTSEESRPRLSQLSVTDVTTSSLRLNWEAPPGAFDSFLLRFGVPSPSTLEPHPRPLLQRELMVPGTRHSAVLRDLRSGTLYSLTLYGLRGPHKADSIQGTARTLSPVLESPRDLQFSEIRETSAKVNWMPPPSRADSFKVSYQLADGGEPQSVQVDGQARTQKLQGLIPGARYEVTVVSVRGFEESEPLTGFLTTVPDGPTQLRALNLTEGFAVLHWKPPQNPVDTYDVQVTAPGAPPLQAETPGSAVDYPLHDLVLHTNYTATVRGLRGPNLTSPASITFTTGLEAPRDLEAKEVTPRTALLTWTEPPVRPAGYLLSFHTPGGQNQEILLPGGITSHQLLGLFPSTSYNARLQAMWGQSLLPPVSTSFTTGGLRIPFPRDCGEEMQNGAGASRTSTIFLNGNRERPLNVFCDMETDGGGWLVFQRRMDGQTDFWRDWEDYAHGFGNISGEFWLGNEALHSLTQAGDYSMRVDLRAGDEAVFAQYDSFHVDSAAEYYRLHLEGYHGTAGDSMSYHSGSVFSARDRDPNSLLISCAVSYRGAWWYRNCHYANLNGLYGSTVDHQGVSWYHWKGFEFSVPFTEMKLRPRNFRSPAGGG

SEQ ID NO: 201434 - protein, 4222 aa, Artificial Sequence
  derived and/or modified sequence
MMPAQYALTSSLVLLVLLSTARAGPFSSRSNVTLPAPRPPPQPGGHTVGAGVGSPSSQLYEHTVEGGEKQVVFTHRINLPPSTGCGCPPGTEPPVLASEVQALRVRLEILEELVKGLKEQCTGGCCPASAQAGTGQTDVRTLCSLHGVFDLSRCTCSCEPGWGGPTCSDPTDAEIPPSSPPSASGSCPDDCNDQGRCVRGRCVCFPGYTGPSCGWPSCPGDCQGRGRCVQGVCVCRAGFSGPDCSQRSCPRGCSQRGRCEGGRCVCDPGYTGDDCGMRSCPRGCSQRGRCENGRCVCNPGYAGEDCGVRSCPRGCSQRGRCKDGRCVCDPGYTGEDCGTRSCPWDCGEGGRCVDGRCVCWPGYTGEDCSTRTCPRDCRGRGRCEDGECICDTGYSGDDCGVRSCPGDCNQRGRCEDGRCVCWPGYTGTDCGSRACPRDCRGRGRCENGVCVCNAGYSGEDCGVRSCPGDCRGRGRCESGRCMCWPGYTGRDCGTRACPGDCRGRGRCVDGRCVCNPGFTGEDCGSRRCPGDCRGHGLCEDGVCVCDAGYSGEDCSTRSCPGGCRGRGQCLDGRCVCEDGYSGEDCGVRQCPNDCSQHGVCQDGVCICWEGYVSEDCSIRTCPSNCHGRGRCEEGRCLCDPGYTGPTCATRMCPADCRGRGRCVQGVCLCHVGYGGEDCGQEEPPASACPGGCGPRELCRAGQCVCVEGFRGPDCAIQTCPGDCRGRGECHDGSCVCKDGYAGEDCGEEVPTIEGMRMHLLEETTVRTEWTPAPGPVDAYEIQFIPTTEGASPPFTARVPSSASAYDQRGLAPGQEYQVTVRALRGTSWGLPASKTITTMIDGPQDLRVVAVTPTTLELGWLRPQAEVDRFVVSYVSAGNQRVRLEVPPEADGTLLTDLMPGVEYVVTVTAERGRAVSYPASVRANTGSSPLGLLGTTDEPPPSGPSTTQGAQAPLLQQRPQELGELRVLGRDETGRLRVVWTAQPDTFAYFQLRMRVPEGPGAHEEVLPGDVRQALVPPPPPGTPYELSLHGVPPGGKPSDPIIYQGIMDKDEEKPGKSSGPPRLGELTVTDRTSDSLLLRWTVPEGEFDSFVIQYKDRDGQPQVVPVEGPQRSAVITSLDPGRKYKFVLYGFVGKKRHGPLVAEAKILPQSDPSPGTPPHLGNLWVTDPTPDSLHLSWTVPEGQFDTFMVQYRDRDGRPQVVPVEGPERSFVVSSLDPDHKYRFTLFGIANKKRYGPLTADGTTAPERKEEPPRPEFLEQPLLGELTVTGVTPDSLRLSWTVAQGPFDSFMVQYKDAQGQPQAVPVAGDENEVTVPGLDPDRKYKMNLYGLRGRQRVGPESVVAKTAPQEDVDETPSPTELGTEAPESPEEPLLGELTVTGSSPDSLSLFWTVPQGSFDSFTVQYKDRDGRPRAVRVGGKESEVTVGGLEPGHKYKMHLYGLHEGQRVGPVSAVGVTAPQQEETPPATESPLEPRLGELTVTDVTPNSVGLSWTVPEGQFDSFIVQYKDKDGQPQVVPVAADQREVTVYNLEPERKYKMNMYGLHDGQRMGPLSVVIVTAPLPPAPATEASKPPLEPRLGELTVTDITPDSVGLSWTVPEGEFDSFVVQYKDRDGQPQVVPVAADQREVTIPDLEPSRKYKFLLFGIQDGKRRSPVSVEAKTVARGDASPGAPPRLGELWVTDPTPDSLRLSWTVPEGQFDSFVVQFKDKDGPQVVPVEGHERSVTVTPLDAGRKYRFLLYGLLGKKRHGPLTADGTTEARSAMDDTGTKRPPKPRLGEELQVTTVTQNSVGLSWTVPEGQFDSFVVQYKDRDGQPQVVPVEGSLREVSVPGLDPAHRYKLLLYGLHHGKRVGPISAVAITAGREETETETTAPTPPAPEPHLGELTVEEATSHTLHLSWMVTEGEFDSFEIQYTDRDGQLQMVRIGGDRNDITLSGLESDHRYLVTLYGFSDGKHVGPVHVEALTVPEEEKPSEPPTATPEPPIKPRLGELTVTDATPDSLSLSWTVPEGQFDHFLVQYRNGDGQPKAVRVPGHEEGVTISGLEPDHKYKMNLYGFHGGQRMGPVSVVGVTAAEEETPSPTEPSMEAPEPAEEPLLGELTVTGSSPDSLSLSWTVPQGRFDSFTVQYKDRDGRPQVVRVGGEESEVTVGGLEPGRKYKMHLYGLHEGRRVGPVSAVGVTAPEEESPDAPLAKLRLGQMTVRDITSDSLSLSWTVPEGQFDHFLVQFKNGDGQPKAVRVPGHEDGVTISGLEPDHKYKMNLYGFHGGQRVGPVSAVGLTAPGKDEEMAPASTEPPTPEPPIKPRLEELTVTDATPDSLSLSWTVPEGQFDHFLVQYKNGDGQPKATRVPGHEDRVTISGLEPDNKYKMNLYGFHGGQRVGPVSAIGVTAAEEETPSPTEPSMEAPEPPEEPLLGELTVTGSSPDSLSLSWTVPQGRFDSFTVQYKDRDGRPQVVRVGGEESEVTVGGLEPGRKYKMHLYGLHEGRRVGPVSTVGVTAPQEDVDETPSPTEPGTEAPEPPEEPLLGELTVTGSSPDSLSLSWTVPQGRFDSFTVQYKDRDGRPQAVRVGGQESKVTVRGLEPGRKYKMHLYGLHEGRRLGPVSAVGVTEDEAETTQAVPTMTPEPPIKPRLGELTMTDATPDSLSLSWTVPEGQFDHFLVQYRNGDGQPKAVRVPGHEDGVTISGLEPDHKYKMNLYGFHGGQRVGPISVIGVTAAEEETPSPTELSTEAPEPPEEPLLGELTVTGSSPDSLSLSWTIPQGHFDSFTVQYKDRDGRPQVMRVRGEESEVTVGGLEPGRKYKMHLYGLHEGRRVGPVSTVGVTVPTTTPEPPNKPRLGELTVTDATPDSLSLSWMVPEGQFDHFLVQYRNGDGQPKVVRVPGHEDGVTISGLEPDHKYKMNLYGFHGGQRVGPISVIGVTAAEEETPAPTEPSTEAPEPPEEPLLGELTVTGSSPDSLSLSWTIPQGRFDSFTVQYKDRDGRPQVVRVRGEESEVTVGGLEPGCKYKMHLYGLHEGQRVGPVSAVGVTVPTMTPEPPIKPRLGELTVTDATPDSLSLSWMVPEGQFDHFLVQYRNGDGQPKAVRVPGHEDGVTISGLEPDHKYKMNLYGFHGGQRVGPVSAIGVTEEETPSPTEPSTEAPEAPEEPLLGELTVTGSSPDSLSLSWTVPQGRFDSFTVQYKDRDGQPQVVRVRGEESEVTVGGLEPGRKYKMHLYGLHEGQRVGPVSTVGITAPLPTPLPVEPRLGELAVAAVTSDSVGLSWTVAQGPFDSFLVQYRDAQGQPQAVPVSGDLRAVAVSGLDPARKYKFLLFGLQNGKRHGPVPVEARTAPDTKPSPRLGELTVTDATPDSVGLSWTVPEGEFDSFVVQYKDKDGRLQVVPVAANQREVTVQGLEPSRKYRFLLYGLSGRKRLGPISADSTTAPLEKELPPHLGELTVAEETSSSLRLSWTVAQGPFDSFVVQYRDTDGQPRAVPVAADQRTVTVEDLEPGKKYKFLLYGLLGGKRLGPVSALGMTAPEEDTPAPELAPEAPEPPEEPRLGVLTVTDTTPDSMRLSWSVAQGPFDSFVVQYEDTNGQPQALLVDGDQSKILISGLEPSTPYRFLLYGLHEGKRLGPLSAEGTTGLAPAGQTSEESRPRLSQLSVTDVTTSSLRLNWEAPPGAFDSFLLRFGVPSPSTLEPHPRPLLQRELMVPGTRHSAVLRDLRSGTLYSLTLYGLRGPHKADSIQGTARTLSPVLESPRDLQFSEIRETSAKVNWMPPPSRADSFKVSYQLADGGEPQSVQVDGQARTQKLQGLIPGARYEVTVVSVRGFEESEPLTGFLTTVPDGPTQLRALNLTEGFAVLHWKPPQNPVDTYDVQVTAPGAPPLQAETPGSAVDYPLHDLVLHTNYTATVRGLRGPNLTSPASITFTTGLEAPRDLEAKEVTPRTALLTWTEPPVRPAGYLLSFHTPGGQNQEILLPGGITSHQLLGLFPSTSYNARLQAMWGQSLLPPVSTSFTTGGLRIPFPRDCGEEMQNGAGASRTSTIFLNGNRERPLNVFCDMETDGGGWLVFQRRMDGQTDFWRDWEDYAHGFGNISGEFWLGNEALHSLTQAGDYSMRVDLRAGDEAVFAQYDSFHVDSAAEYYRLHLEGYHGTAGDSMSYHSGSVFSARDRDPNSLLISCAVSYRGAWWYRNCHYANLNGLYGSTVDHQGVSWYHWKGFEFSVPFTEMKLRPRNFRSPAGGG

SEQ ID NO: 201435 - protein, 2149 aa, Artificial Sequence
  derived and/or modified sequence
  misc_feature (1)..(1): Xaa can be any naturally occurring amino acid
XAEEETPSPTEPSMEAPEPAEEPLLGELTVTGSSPDSLSLSWTVPQGRFDSFTVQYKDRDGRPQVVRVGGEESEVTVGGLEPGRKYKMHLYGLHEGRRVGPVSAVGVTAPEEESPDAPLAKLRLGQMTVRDITSDSLSLSWTVPEGQFDHFLVQFKNGDGQPKAVRVPGHEDGVTISGLEPDHKYKMNLYGFHGGQRVGPVSAVGLTAPGKDEEMAPASTEPPTPEPPIKPRLEELTVTDATPDSLSLSWTVPEGQFDHFLVQYKNGDGQPKATRVPGHEDRVTISGLEPDNKYKMNLYGFHGGQRVGPVSAIGVTAAEEETPSPTEPSMEAPEPPEEPLLGELTVTGSSPDSLSLSWTVPQGRFDSFTVQYKDRDGRPQVVRVGGEESEVTVGGLEPGRKYKMHLYGLHEGRRVGPVSTVGVTAPQEDVDETPSPTEPGTEAPEPPEEPLLGELTVTGSSPDSLSLSWTVPQGRFDSFTVQYKDRDGRPQAVRVGGQESKVTVRGLEPGRKYKMHLYGLHEGRRLGPVSAVGVTEDEAETTQAVPTMTPEPPIKPRLGELTMTDATPDSLSLSWTVPEGQFDHFLVQYRNGDGQPKAVRVPGHEDGVTISGLEPDHKYKMNLYGFHGGQRVGPISVTGVTAAEEETPSPTELSTEAPEPPEEPLLGELTVTGSSPDSLSLSWTIPQGHFDSFTVQYKDRDGRPQVMRVRGEESEVTVGGLEPGRKYKMHLYGLHEGRRVGPVSTVGVTVPTTTPEPPNKPRLGELTVTDATPDSLSLSWMVPEGQFDHFLVQYRNGDGQPKVVRVPGHEDGVTISGLEPDHKYKMNLYGFHGGQRVGPISVIGVTAAEEETPAPTEPSTEAPEPPEEPLLGELTVTGSSPDSLSLSWTIPQGRFDSFTVQYKDRDGRPQVVRVRGEESEVTVGGLEPGCKYKMHLYGLHEGQRVGPVSAVGVTVPTMTPEPPIKPRLGELTVTDATPDSLSLSWMVPEGQFDHFLVQYRNGDGQPKAVRVPGHEDGVTISGLEPDHKYKMNLYGFHGGQRVGPVSAIGVTEEETPSPTEPSTEAPEAPEEPLLGELTVTGSSPDSLSLSWTVPQGRFDSFTVQYKDRDGQPQVVRVRGEESEVTVGGLEPGRKYKMHLYGLHEGQRVGPVSTVGITAPLPTPLPVEPRLGELAVAAVTSDSVGLSWTVAQGPFDSFLVQYRDAQGQPQAVPVSGDLRAVAVSGLDPARKYKFLLFGLQNGKRHGPVPVEARTAPDTKPSPRLGELTVTDATPDSVGLSWTVPEGEFDSFVVQYKDKDGRLQVVPVAANQREVTVQGLEPSRKYRFLLYGLSGRKRLGPISADSTTAPLEKELPPHLGELTVAEETSSSLRLSWTVAQGPFDSFVVQYRDTDGQPRAVPVAADQRTVTVEDLEPGKKYKFLLYGLLGGKRLGPVSALGMTAPEEDTPAPELAPEAPEPPEEPRLGVLTVTDTTPDSMRLSWSVAQGPFDSFVVQYEDTNGQPQALLVDGDQSKILISGLEPSTPYRFLLYGLHEGKRLGPLSAEGTTGLAPAGQTSEESRPRLSQLSVTDVTTSSLRLNWEAPPGAFDSFLLRFGVPSPSTLEPHPRPLLQRELMVPGTRHSAVLRDLRSGTLYSLTLYGLRGPHKADSIQGTARTLSPVLESPRDLQFSEIRETSAKVNWMPPPSRADSFKVSYQLADGGEPQSVQVDGQARTQKLQGLIPGARYEVTVVSVRGFEESEPLTGFLTTVPDGPTQLRALNLTEGFAVLHWKPPQNPVDTYDIQVTAPGAPPLQAETPGSAVDYPLHDLVLHTNYTATVRGLRGPNLTSPASITFTTGLEAPRDLEAKEVTPRTALLTWTEPPVRPAGYLLSFHTPGGQTQEILLPGGITSHQLLGLFPSTSYNARLQAMWGQSLLPPVSTSFTTGGLRIPFPRDCGEEMQNGAGASRTSTIFLNGNRERPLIVFCDMETDGGGWLVFQRRMDGQTDFWRDWEDYAHGFGNISGEFWLGNEALHSLTQAGDYSMRVDLRAGDEAVFAQYDSFHVDSAAEYYRLHLEGYHGTAGDSMSYHSGSVFSARDRDPNSLLISCAVSYRGAWWYRNCHYANLNGLYGSTVDHQGVSWYHWKGFEFSVPFTEMKLRPRNFRSPAGGG

SEQ ID NO: 201436 - protein, 3296 aa, Artificial Sequence
  derived and/or modified sequence
  misc_feature (1)..(1): Xaa can be any naturally occurring amino acid
XSSPLGLLGTTDEPPPSGPSTTQGAQAPLLQQRPQELGELRVLGRDETGRLRVVWTAQPDTFAYFQLRMRVPEGPGAHEEVLPGDVRQALVPPPPPGTPYELSLHGVPPGGKPSDPIIYQGIMDKDEEKPGKSSGPPRLGELTVTDRTSDSLLLRWTVPEGEFDSFVIQYKDRDGQPQVVPVEGPQRSAVITSLDPGRKYKFVLYGFVGKKRHGPLVAEAKILPQSDPSPGTPPHLGNLWVTDPTPDSLHLSWTVPEGQFDTFMVQYRDRDGRPQVVPVEGPERSFVVSSLDPDHKYRFTLFGIANKKRYGPLTADGTTAPERKEEPPRPEFLEQPLLGELTVTGVTPDSLRLSWTVAQGPFDSFMVQYKDAQGQPQAVPVAGDENEVTVPGLDPDRKYKMNLYGLRGRQRVGPESVVAKTAPQEDVDETPSPTELGTEAPESPEEPLLGELTVTGSSPDSLSLFWTVPQGSFDSFTVQYKDRDGRPQAVRVGGKESEVTVGGLEPGHKYKMHLYGLHEGQRVGPVSAVGVTAPQQEETPPATESPLEPRLGELTVTDVTPNSVGLSWTVPEGQFDSFIVQYKDKDGQPQVVPVAADQREVTVYNLEPERKYKMNMYGLHDGQRMGPLSVVIVTAPLPPAPATEASKPPLEPRLGELTVTDITPDSVGLSWTVPEGEFDSFVVQYKDRDGQPQVVPVAADQREVTIPDLEPSRKYKFLLFGIQDGKRRSPVSVEAKTVARGDASPGAPPRLGELWVTDPTPDSLRLSWTVPEGQFDSFVVQFKDKDGPQVVPVEGHERSVTVTPLDAGRKYRFLLYGLLGKKRHGPLTADGTTEARSAMDDTGTKRPPKPRLGEELQVTTVTQNSVGLSWTVPEGQFDSFVVQYKDRDGQPQVVPVEGSLREVSVPGLDPAHRYKLLLYGLHHGKRVGPISAVAITAGREETETETTAPTPPAPEPHLGELTVEEATSHTLHLSWMVTEGEFDSFEIQYTDRDGQLQMVRIGGDRNDITLSGLESDHRYLVTLYGFSDGKHVGPVHVEALTVPEEEKPSEPPTATPEPPIKPRLGELTVTDATPDSLSLSWTVPEGQFDHFLVQYRNGDGQPKAVRVPGHEEGVTISGLEPDHKYKMNLYGFHGGQRMGPVSVVGVTAAEEETPSPTEPSMEAPEPAEEPLLGELTVTGSSPDSLSLSWTVPQGRFDSFTVQYKDRDGRPQVVRVGGEESEVTVGGLEPGRKYKMHLYGLHEGRRVGPVSAVGVTAPEEESPDAPLAKLRLGQMTVRDITSDSLSLSWTVPEGQFDHFLVQFKNGDGQPKAVRVPGHEDGVTISGLEPDHKYKMNLYGFHGGQRVGPVSAVGLTAPGKDEEMAPASTEPPTPEPPIKPRLEELTVTDATPDSLSLSWTVPEGQFDHFLVQYKNGDGQPKATRVPGHEDRVTISGLEPDNKYKMNLYGFHGGQRVGPVSAIGVTAAEEETPSPTEPSMEAPEPPEEPLLGELTVTGSSPDSLSLSWTVPQGRFDSFTVQYKDRDGRPQVVRVGGEESEVTVGGLEPGRKYKMHLYGLHEGRRVGPVSTVGVTAPQEDVDETPSPTEPGTEAPGPPEEPLLGELTVTGSSPDSLSLSWTVPQGRFDSFTVQYKDRDGRPQAVRVGGQESKVTVRGLEPGRKYKMHLYGLHEGRRLGPVSAVGVTEDEAETTQAVPTMTPEPPIKPRLGELTMTDATPDSLSLSWTVPEGQFDHFLVQYRNGDGQPKAVRVPGHEDGVTISGLEPDHKYKMNLYGFHGGQRVGPISVIGVTAAEEETPSPTELSTEAPEPPEEPLLGELTVTGSSPDSLSLSWTIPQGHFDSFTVQYKDRDGRPQVMRVRGEESEVTVGGLEPGRKYKMHLYGLHEGRRVGPVSTVGVTVPTTTPEPPNKPRLGELTVTDATPDSLSLSWMVPEGQFDHFLVQYRNGDGQPKVVRVPGHEDGVTISGLEPDHKYKMNLYGFHGGQRVGPISVIGVTAAEEETPAPTEPSTEAPEPPEEPLLGELTVTGSSPDSLSLSWTIPQGRFDSFTVQYKDRDGRPQVVRVRGEESEVTVGGLEPGCKYKMHLYGLHEGQRVGPVSAVGVTVPTMTPEPPIKPRLGELTVTDATPDSLSLSWMVPEGQFDHFLVQYRNGDGQPKAVRVPGHEDGVTISGLEPDHKYKMNLYGFHGGQRVGPVSAIGVTEEETPSPTEPSTEAPEAPEEPLLGELTVTGSSPDSLSLSWTVPQGRFDSFTVQYKDRDGQPQVVRVRVEESEVTVGGLEPGRKYKMHLYGLHEGQRVGPVSTVGITAPLPTPLPVEPRLGELAVAAVTSDSVGLSWTVAQGPFDSFLVQYRDAQGQPQAVPVSGDLRAVAVSGLDPARKYKFLLFGLQNGKRHGPVPVEARTAPDTKPSPRLGELTVTDATPDSVGLSWTVPEGEFDSFVVQYKDKDGRLQVVPVAANQREVTVQGLEPSRKYRFLLYGLSGRKRLGPISADSTTAPLEKELPPHLGELTVAEETSSSLRLSWTVAQGPFDSFVVQYRDTDGQPRAVPVAADQRTVTVEDLEPGKKYKFLLYGLLGGKRLGPVSALGMTAPEEDTPAPELAPEAPEPPEEPRLGVLTVTDTTPDSMRLSWSVAQGPFDSFVVQYEDTNGQPQALLVDGDQSKILISGLEPSTPYRFLLYGLHEGKRLGPLSAEGTTGLAPAGQTSEESRPRLSQLSVTDVTTSSLRLNWEAPPGAFDSFLLRFGVPSPSTLEPHPRPLLQRELMVPGTRHSAVLRDLRSGTLYSLTLYGLRGPHKADSIQGTARTLSPVLESPRDLQFSEIRETSAKVNWMPPPSRADSFKVSYQLADGGEPQSVQVDGQARTQKLQGLIPGARYEVTVVSVRGFEESEPLTGFLTTVPDGPTQLRALNLTEGFAVLHWKPPQNPVDTYDVQVTAPGAPPLQAETPGSAVDYPLHDLVLHTNYTATVRGLRGPNLTSPASITFTTGLEAPRDLEAKEVTPRTALLTWTEPPVRPAGYLLSFHTPGGQNQEILLPGGITSHQLLGLFPSTSYNARLQAMWGQSLLPPVSTSFTTGGLRIPFPRDCGEEMQNGAGASRTSTIFLNGNRERPLNVFCDMETDGGGWLVFQRRMDGQTDFWRDWEDYAHGFGNISGEFWLGNEALHSLTQAGDYSMRVDLRAGDEAVFAQYDSFHVDSAAEYYRLHLEGYHGTAGDSMSYHSGSVFSARDRDPNSLLISCAVSYRGAWWYRNCHYANLNGLYGSTVDHQGVSWYHWKGFEFSVPFTEMKLRPRNFRSPAGGG

SEQ ID NO: 201437 - protein, 4222 aa, Artificial Sequence
  derived and/or modified sequence
MMPAQYALTSSLVLLVLLSTARAGPFSSRSNVTLPAPRPPPQPGGHTVGAGVGSPSSQLYEHTVEGGEKQVVFTHRINLPPSTGCGCPPGTEPPVLASEVQALRVRLEILEELVKGLKEQCTGGCCPASAQAGTGQTDVRTLCSLHGVFDLSRCTCSCEPGWGGPTCSDPTDAEIPPSSPPSASGSCPDDCNDQGRCVRGRCVCFPGYTGPSCGWPSCPGDCQGRGRCVQGVCVCRAGFSGPDCSQRSCPRGCSQRGRCEGGRCVCDPGYTGDDCGMRSCPRGCSQRGRCENGRCVCNPGYTGEDCGVRSCPRGCSQRGRCKDGRCVCDPGYTGEDCGTRSCPWDCGEGGRCVDGRCVCWPGYTGEDCSTRTCPRDCRGRGRCEDGECICDTGYSGDDCGVRSCPGDCNQRGRCEDGRCVCWPGYTGTDCGSRACPRDCRGRGRCENGVCVCNAGYSGEDCGVRSCPGDCRGRGRCESGRCMCWPGYTGRDCGTRACPGDCRGRGRCVDGRCVCNPGFTGEDCGSRRCPGDCRGHGLCEDGVCVCDAGYSGEDCSTRSCPGGCRGRGQCLDGRCVCEDGYSGEDCGVRQCPNDCSQHGVCQDGVCICWEGYVSEDCSIRTCPSNCHGRGRCEEGRCLCDPGYTGPTCATRMCPADCRGRGRCVQGVCLCHVGYGGEDCGQEEPPASACPGGCGPRELCRAGQCVCVEGFRGPDCAIQTCPGDCRGRGECHDGSCVCKDGYAGEDCGEEVPTIEGMRMHLLEETTVRTEWTPAPGPVDAYEIQFIPTTEGASPPFTARVPSSASAYDQRGLAPGQEYQVTVRALRGTSWGLPASKTITTMIDGPQDLRVVAVTPTTLELGWLRPQAEVDRFVVSYVSAGNQRVRLEVPPEADGTLLTDLMPGVEYVVTVTAERGRAVSYPASVRANTGSSPLGLLGTTDEPPPSGPSTTQGAQAPLLQQRPQELGELRVLGRDETGRLRVVWTAQPDTFAYFQLRMRVPEGPGAHEEVLPGDVRQALVPPPPPGTPYELSLHGVPPGGKPSDPIIYQGIMDKDEEKPGKSSGPPRLGELTVTDRTSDSLLLRWTVPEGEFDSFVIQYKDRDGQPQVVPVEGPQRSAVITSLDPGRKYKFVLYGFVGKKRHGPLVAEAKILPQSDPSPGTPPRLGNLWVTDPTPDSLHLSWTVPEGQFDTFMVQYRDRDGRPQVVPVEGPERSFVVSSLDPDHKYRFTLFGIANKKRYGPLTADGTTAPERKEEPPRPEFLEQPLLGELTVTGVTPDSLRLSWTVAQGPFDSFMVQYKDAQGQPQAVPVAGDENEVTVPGLDPDRKYKMNLYGLRGRQRVGPESVVAKTAPQEDVDETPSPTELGTEAPESPEEPLLGELTVTGSSPDSLSLFWTVPQGSFDSFTVQYKDRDGRPRAVRVGGKESEVTVGGLEPGHKYKMHLYGLHEGQRVGPVSAVGVTAPQQEETPPATESPLEPRLGELTVTDVTPNSVGLSWTVPEGQFDSFIVQYKDKDGQPQVVPVAADQREVTVYNLEPERKYKMNMYGLHDGQRMGPLSVVIVTAPLPPAPATEASKPPLEPRLGELTVTDITPDSVGLSWTVPEGEFDSFVVQYKDRDGQPQVVPVAADQREVTIPDLEPSRKYKFLLFGIQDGKRRSPVSVEAKTVARGDASPGAPPRLGELWVTDPTPDSLRLSWTVPEGQFDSFVVQFKDKDGPQVVPVEGHERSVTVTPLDAGRKYRFLLYGLLGKKRHGPLTADGTTEARSAMDDTGTKRPPKPRLGEELQVTTVTQNSVGLSWTVPEGQFDSFVVQYKDRDGQPQVVPVEGSLREVSVPGLDPAHRYKLLLYGLHHGKRVGPISAVAITAGREETETETTAPTPPAPEPHLGELTVEEATSHTLHLSWMVTEGEFDSFEIQYTDRDGQLQMVRIGGDRNDITLSGLESDHRYLVTLYGFSDGKHVGPVHVEALTVPEEEKPSEPPTATPEPPIKPRLGELTVTDATPDSLSLSWTVPEGQFDHFLVQYRNGDGQPKAVRVPGHEEGVTISGLEPDHKYKMNLYGFHGGQRMGPVSVVGVTAAEEETPSPTEPSMEAPEPAEEPLLGELTVTGSSPDSLSLSWTVPQGRFDSFTVQYKDRDGRPQVVRVGGEESEVTVGGLEPGRKYKMHLYGLHEGRRVGPVSAVGVTAPEEESPDAPLAKLRLGQMTVRDITSDSLSLSWTVPEGQFDHFLVQFKNGDGQPKAVRVPGHEDGVTISGLEPDHKYKMNLYGFHGGQRVGPVSAVGLTAPGKDEEMAPASTEPPTPEPPIKPRLEELTVTDATPDSLSLSWTVPEGQFDHFLVQYKNGDGQPKATRVPGHEDRVTISGLEPDNKYKMNLYGFHGGQRVGPVSAIGVTAAEEETPSPTEPSMEAPEPPEEPLLGELTVTGSSPDSLSLSWTVPQGRFDSFTVQYKDRDGRPQVVRVGGEESEVTVGGLEPGRKYKMHLYGLHEGRRVGPVSTVGVTAPQEDVDETPSPTEPGTEAPEPPEEPLLGELTVTGSSPDSLSLSWTVPQGRFDSFTVQYKDRDGRPQAVRVGGQESKVTVRGLEPGRKYKMHLYGLHEGRRLGPVSAVGVTEDEAETTQAVPTMTPEPPIKPRLGELTMTDATPDSLSLSWTVPEGQFDHFLVQYRNGDGQPKAVRVPGHEDGVTISGLEPDHKYKMNLYGFHGGQRVGPISVIGVTAAEEETPSPTELSTEAPEPPEEPLLGELTVTGSSPDSLSLSWTIPQGHFDSFTVQYKDRDGRPQVMRVRGEESEVTVGGLEPGRKYKMHLYGLHEGRRVGPVSTVGVTVPTTTPEPPNKPRLGELTVTDATPDSLSLSWMVPEGQFDHFLVQYRNGDGQPKVVRVPGHEDGVTISGLEPDHKYKMNLYGFHGGQRVGPISVIGVTAAEEETPAPTEPSTEAPEPPEEPLLGELTVTGSSPDSLSLSWTIPQGRFDSFTVQYKDRDGRPQVVRVRGEESEVTVGGLEPGCKYKMHLYGLHEGQRVGPVSAVGVTVPTMTPEPPIKPRLGELTVTDATPDSLSLSWMVPEGQFDHFLVQYRNGDGQPKAVRVPGHEDGVTISGLEPDHKYKMNLYGFHGGQRVGPVSAIGVTEEETPSPTEPSTEAPEAPEEPLLGELTVTGSSPDSLSLSWTVPQGRFDSFTVQYKDRDGQPQVVRVRGEESEVTVGGLEPGRKYKMHLYGLHEGQRVGPVSTVGITAPLPTPLPVEPRLGELAVAAVTSDSVGLSWTVAQGPFDSFLVQYRDAQGQPQAVPVSGDLRAVAVSGLDPARKYKFLLFGLQNGKRHGPVPVEARTAPDTKPSPRLGELTVTDATPDSVGLSWTVPEGEFDSFVVQYKDKDGRLQVVPVAANQREVTVQGLEPSRKYRFLLYGLSGRKRLGPISADSTTAPLEKELPPHLGELTVAEETSSSLRLSWTVAQGPFDSFVVQYRDTDGQPRAVPVAADQRTVTVEDLEPGKKYKFLLYGLLGGKRLGPVSALGMTAPEEDTPAPELAPEAPEPPEEPRLGVLTVTDTTPDSMRLSWSVAQGPFDSFVVQYEDTNGQPQALLVDGDQSKILISGLEPSTPYRFLLYGLHEGKRLGPLSAEGTTGLAPAGQTSEESRPRLSQLSVTDVTTSSLRLNWEAPPGAFDSFLLRFGVPSPSTLEPHPRPLLQRELMVPGTRHSAVLRDLRSGTLYSLTLYGLRGPHKADSIQGTARTLSPVLESPRDLQFSEIRETSAKVNWMPPPSRADSFKVSYQLADGGEPQSVQVDGQARTQKLQGLIPGARYEVTVVSVRGFEESEPLTGFLTTVPDGPTQLRALNLTEGFAVLHWKPPQNPVDTYDIQVTAPGAPPLQAETPGSAVDYPLHDLVLHTNYTATVRGLRGPNLTSPASITFTTGLEAPRDLEAKEVTPRTALLTWTEPPVRPAGYLLSFHTPGGQTQEILLPGGITSHQLLGLFPSTSYNARLQAMWGQSLLPPVSTSFTTGGLRIPFPRDCGEEMQNGAGASRTSTIFLNGNRERPLIVFCDMETDGGGWLVFQRRMDGQTDFWRDWEDYAHGFGNISGEFWLGNEALHSLTQAGDYSMRVDLRAGDEAVFAQYDSFHVDSAAEYYRLHLEGYHGTAGDSMSYHSGSVFSARDRDPNSLLISCAVSYRGAWWYRNCHYANLNGLYGSTVDHQGVSWYHWKGFEFSVPFTEMKLRPRNFRSPAGGG

SEQ ID NO: 201438 - protein, 634 aa, Artificial Sequence
  derived and/or modified sequence
  misc_feature (1)..(1): Xaa can be any naturally occurring amino acid
XSSPLGLLGTTDEPPPSGPSTTQGAQAPLLQQRPQELGELRVLGRDETGRLRVVWTAQPDTFAYFQLRMRVPEGPGAHEEVLPGDVRQALVPPPPPGTPYELSLHGVPPGGKPSDPIIYQGIMDKDEEKPGKSSGPPRLGELTVTDRTSDSLLLRWTVPEGEFDSFVIQYKDRDGQPQVVPVEGPQRSAVITSLDPGRKYKFVLYGFVGKKRHGPLVAEAKILPQSDPSPGTPPRLGNLWVTDPTPDSLHLSWTVPEGQFDTFMVQYRDRDGRPQVVPVEGPERSFVVSSLDPDHKYRFTLFGIANKKRYGPLTADGTTAPERKEEPPRPEFLEQPLLGELTVTGVTPDSLRLSWTVAQGPFDSFMVQYKDAQGQPQAVPVAGDENEVTVPGLDPDRKYKMNLYGLRGRQRVGPESVVAKTAPQEDVDETPSPTELGTEAPESPEEPLLGELTVTGSSPDSLSLFWTVPQGSFDSFTVQYKDRDGRPRAVRVGGKESEVTVGGLEPGHKYKMHLYGLHEGQRVGPVSAVGVTAPQQEETPPATESPLEPRLGELTVTDVTPNSVGLSWTVPEGQFDSFIVQYKDKDGQPQVVPVAADQREVTVYNLEPERKYKMNMYGLHDGQRMGPLSVVIVT

SEQ ID NO: 201439 - protein, 4222 aa, Artificial Sequence
  derived and/or modified sequence
MMPAQYALTSSLVLLVLLSTARAGPFSSRSNVTLPAPRPPPQPGGHTVGAGVGSPSSQLYEHTVEGGEKQVVFTHRINLPPSTGCGCPPGTEPPVLASEVQALRVRLEILEELVKGLKEQCTGGCCPASAQAGTGQTDVRTLCSLHGVFDLSRCTCSCEPGWGGPTCSDPTDAEIPPSSPPSASGSCPDDCNDQGRCVRGRCVCFPGYTGPSCGWPSCPGDCQGRGRCVQGVCVCRAGFSGPDCSQRSCPRGCSQRGRCEGGRCVCDPGYTGDDCGMRSCPRGCSQRGRCENGRCVCNPGYTGEDCGVRSCPRGCSQRGRCKDGRCVCDPGYTGEDCGTRSCPWDCGEGGRCVDGRCVCWPGYTGEDCSTRTCPRDCRGRGRCEDGECICDTGYSGDDCGVRSCPGDCNQRGRCEDGRCVCWPGYTGTDCGSRACPRDCRGRGRCENGVCVCNAGYSGEDCGVRSCPGDCRGRGRCESGRCMCWPGYTGRDCGTRACPGDCRGRGRCVDGRCVCNPGFTGEDCGSRRCPGDCRGHGLCEDGVCVCDAGYSGEDCSTRSCPGGCRGRGQCLDGRCVCEDGYSGEDCGVRQCPNDCSQHGVCQDGVCICWEGYVSEDCSIRTCPSNCHGRGRCEEGRCLCDPGYTGPTCATRMCPADCRGRGRCVQGVCLCHVGYGGEDCGQEEPPASACPGGCGPRELCRAGQCVCVEGFRGPDCAIQTCPGDCRGRGECHDGSCVCKDGYAGEDCGEEVPTIEGMRMHLLEETTVRTEWTPAPGPVDAYEIQFIPTTEGASPPFTARVPSSASAYDQRGLAPGQEYQVTVRALRGTSWGLPASKTITTMIDGPQDLRVVAVTPTTLELGWLRPQAEVDRFVVSYVSAGNQRVRLEVPPEADGTLLTDLMPGVEYVVTVTAERGRAVSYPASVRANTGSSPLGLLGTTDEPPPSGPSTTQGAQAPLLQQRPQELGELRVLGRDETGRLRVVWTAQPDTFAYFQLRMRVPEGPGAHEEVLPGDVRQALVPPPPPGTPYELSLHGVPPGGKPSDPIIYQGIMDKDEEKPGKSSGPPRLGELTVTDRTSDSLLLRWTVPEGEFDSFVIQYKDRDGQPQVVPVEGPQRSAVITSLDPGRKYKFVLYGFVGKKRHGPLVAEAKILPQSDPSPGTPPRLGNLWVTDPTPDSLHLSWTVPEGQFDTFMVQYRDRDGRPQVVPVEGPERSFVVSSLDPDHKYRFTLFGIANKKRYGPLTADGTTAPERKEEPPHPEFLEQPLLGELTVTGVTPDSLRLSWTVAQGPFDSFMVQYKDAQGQPQAVPVAGDENEVTVPGLDPDRKYKMNLYGLRGRQRVGPESVVAKTAPQEDVDETPSPTELGTEAPESPEEPLLGELTVTGSSPDSLSLFWTVPQGSFDSFTVQYKDRDGRPRAVRVGGKESEVTVGGLEPGHKYKMHLYGLHEGQRVGPVSAVGVTAPQQEETPPATESPLEPRLGELTVTDVTPNSVGLSWTVPEGQFDSFIVQYKDKDGQPQVVPVAADQREVTVYNLEPERKYKMNMYGLHDGQRMGPLSVVIVTAPLPPAPATEASKPPLEPRLGELTVTDITPDSVGLSWTVPEGEFDSFVVQYKDRDGQPQVVPVAADQREVTIPDLEPSRKYKFLLFGIQDGKRRSPVSVEAKTVARGDASPGAPPRLGELWVTDPTPDSLRLSWTVPEGQFDSFVVQFKDKDGPQVVPVEGHERSVTVTPLDAGRKYRFLLYGLLGKKRHGPLTADGTTEARSAMDDTGTKRPPKPRLGEELQVTTVTQNSVGLSWTVPEGQFDSFVVQYKDRDGQPQVVPVEGSLREVSVPGLDPAHRYKLLLYGLHHGKRVGPISAVAITAGREETETETTAPTPPAPEPHLGELTVEEATSHTLHLSWMVTEGEFDSFEIQYTDRDGQLQMVRIGGDRNDITLSGLESDHRYLVTLYGFSDGKHVGPVHVEALTVPEEEKPSEPPTATPEPPIKPRLGELTVTDATPDSLSLSWTVPEGQFDHFLVQYRNGDGQPKAVRVPGHEEGVTISGLEPDHKYKMNLYGFHGGQRMGPVSVVGVTAAEEETPSPTEPSMEAPEPAEEPLLGELTVTGSSPDSLSLSWTVPQGRFDSFTVQYKDRDGRPQVVRVGGEESEVTVGGLEPGRKYKMHLYGLHEGRRVGPVSAVGVTAPEEESPDAPLAKLRLGQMTVRDITSDSLSLSWTVPEGQFDHFLVQFKNGDGQPKAVRVPGHEDGVTISGLEPDHKYKMNLYGFHGGQRVGPVSAVGLTAPGKDEEMAPASTEPPTPEPPIKPRLEELTVTDATPDSLSLSWTVPEGQFDHFLVQYKNGDGQPKATRVPGHEDRVTISGLEPDNKYKMNLYGFHGGQRVGPVSAIGVTAAEEETPSPTEPSMEAPEPPEEPLLGELTVTGSSPDSLSLSWTVPQGRFDSFTVQYKDRDGRPQVVRVGGEESEVTVGGLEPGRKYKMHLYGLHEGRRVGPVSTVGVTAPQEDVDETPSPTEPGTEAPEPPEEPLLGELTVTGSSPDSLSLSWTVPQGRFDSFTVQYKDRDGRPQAVRVGGQESKVTVRGLEPGRKYKMHLYGLHEGRRLGPVSAVGVTEDEAETTQAVPTMTPEPPIKPRLGELTMTDATPDSLSLSWTVPEGQFDHFLVQYRNGDGQPKAVRVPGHEDGVTISGLEPDHKYKMNLYGFHGGQRVGPISVIGVTAAEEETPSPTELSTEAPEPPEEPLLGELTVTGSSPDSLSLSWTIPQGHFDSFTVQYKDRDGRPQVMRVRGEESEVTVGGLEPGRKYKMHLYGLHEGRRVGPVSTVGVTVPTTTPEPPNKPRLGELTVTDATPDSLSLSWMVPEGQFDHFLVQYRNGDGQPKVVRVPGHEDGVTISGLEPDHKYKMNLYGFHGGQRVGPISVIGVTAAEEETPAPTEPSTEAPEPPEEPLLGELTVTGSSPDSLSLSWTIPQGRFDSFTVQYKDRDGRPQVVRVRGEESEVTVGGLEPGCKYKMHLYGLHEGQRVGPVSAVGVTVPTMTPEPPIKPRLGELTVTDATPDSLSLSWMVPEGQFDHFLVQYRNGDGQPKAVRVPGHEDGVTISGLEPDHKYKMNLYGFHGGQRVGPVSAIGVTEEETPSPTEPSTEAPEAPEEPLLGELTVTGSSPDSLSLSWTIPQGRFDSFTVQYKDRDGQPQVVRVRGEESEVTVGGLEPGRKYKMHLYGLHEGQRVGPVSTVGITAPLPTPLPVEPRLGELAVAAVTSDSVGLSWTVAQGPFDSFLVQYRDAQGQPQAVPVSGDLRAVAVSGLDPARKYKFLLFGLQNGKRHGPVPVEARTAPDTKPSPRLGELTVTDATPDSVGLSWTVPEGEFDSFVVQYKDKDGRLQVVPVAANQREVTVQGLEPSRKYRFLLYGLSGRKRLGPISADSTTAPLEKELPPHLGELTVAEETSSSLRLSWTVAQGPFDSFVVQYRDTDGQPRAVPVAADQRTVTVEDLEPGKKYKFLLYGLLGGKRLGPVSALGMTAPEEDTPAPELAPEAPEPPEEPRLGVLTVTDTTPDSMRLSWSVAQGPFDSFVVQYEDTNGQPQALLVDGDQSKILISGLEPSTPYRFLLYGLHEGKRLGPLSAEGTTGLAPAGQTSEESRPRLSQLSVTDVTTSSLRLNWEAPPGAFDSFLLRFGVPSPSTLEPHPRPLLQRELMVPGTRHSAVLRDLRSGTLYSLTLYGLRGPHKADSIQGTARTLSPVLESPRDLQFSEIRETSAKVNWMPPPSRADSFKVSYQLADGGEPQSVQVDGQARTQKLQGLIPGARYEVTVVSVRGFEESEPLTGFLTTVPDGPTQLRALNLTEGFAVLHWKPPQNPVDTYDIQVTAPGAPPLQAETPGSAVDYPLHDLVLHTNYTATVRGLRGPNLTSPASITFTTGLEAPRDLEAKEVTPRTALLTWTEPPVRPAGYLLSFHTPGGQTQEILLPGGITSHQLLGLFPSTSYNARLQATWGQSLLPPVSTSFTTGGLRIPFPRDCGEEMQNGAGASRTSTIFLNGNRERPLNVFCDMETDGGGWLVFQRRMDGQTDFWRDWEDYAHGFGNISGEFWLGNEALHSLTQAGDYSMRVDLRAGDEAVFAQYDSFHVDSAAEYYRLHLEGYHGTAGDSMSYHSGSVFSARDRDPNSLLISCAVSYRGAWWYRNCHYANLNGLYGSTVDHQGVSWYHWKGFEFSVPFTEMKLRPRNFRSPAGGG

SEQ ID NO: 201440 - protein, 2280 aa, Artificial Sequence
  derived and/or modified sequence
MMPAQYALTSSLVLLVLLSTARAGPFSSRSNVTLPAPRPPPQPGGHTVGAGVGSPSSQLYEHTVEGGEKQVVFTHRINLPPSTGCGCPPGTEPPVLASEVQALRVRLEILEELVKGLKEQCTGGCCPASAQAGTGQTDVRTLCSLHGVFDLSRCTCSCEPGWGGPTCSDPTDAEIPPSSPPSASGSCPDDCNDQGRCVRGRCVCFPGYTGPSCGWPSCPGDCQGRGRCVQGVCVCRAGFSGPDCSQRSCPRGCSQRGRCEGGRCVCDPGYTGDDCGMRSCPRGCSQRGRCENGRCVCNPGYTGEDCGVRSCPRGCSQRGRCKDGRCVCDPGYTGEDCGTRSCPWDCGEGGRCVDGRCVCWPGYTGEDCSTRTCPRDCRGRGRCEDGECICDTGYSGDDCGVRSCPGDCNQRGRCEDGRCVCWPGYTGTDCGSRACPRDCRGRGRCENGVCVCNAGYSGEDCGVRSCPGDCRGRGRCESGRCMCWPGYTGRDCGTRACPGDCRGRGRCVDGRCVCNPGFTGEDCGSRRCPGDCRGHGLCEDGVCVCDAGYSGEDCSTRSCPGGCRGRGQCLDGRCVCEDGYSGEDCGVRQCPNDCSQHGVCQDGVCICWEGYVSEDCSIRTCPSNCHGRGRCEEGRCLCDPGYTGPTCATRMCPADCRGRGRCVQGVCLCHVGYGGEDCGQEEPPASACPGGCGPRELCRAGQCVCVEGFRGPDCAIQTCPGDCRGRGECHDGSCVCKDGYAGEDCGEEVPTIEGMRMHLLEETTVRTEWTPAPGPVDAYEIQFIPTTEGASPPFTARVPSSASAYDQRGLAPGQEYQVTVRALRGTSWGLPASKTITTMIDGPQDLRVVAVTPTTLELGWLRPQAEVDRFVVSYVSAGNQRVRLEVPPEADGTLLTDLMPGVEYVVTVTAERGRAVSYPASVRANTGSSPLGLLGTTDEPPPSGPSTTQGAQAPLLQQRPQELGELRVLGRDETGRLRVVWTAQPDTFAYFQLRMRVPEGPGAHEEVLPGDVRQALVPPPPPGTPYELSLHGVPPGGKPSDPIIYQGIMDKDEEKPGKSSGPPRLGELTVTDRTSDSLLLRWTVPEGEFDSFVIQYKDRDGQPQVVPVEGPQRSAVITSLDPGRKYKFVLYGFVGKKRHGPLVAEAKILPQSDPSPGTPPHLGNLWVTDPTPDSLHLSWTVPEGQFDTFMVQYRDRDGRPQVVPVEGPERSFVVSSLDPDHKYRFTLFGIANKKRYGPLTADGTTAPERKEEPPRPEFLEQPLLGELTVTGVTPDSLRLSWTVAQGPFDSFMVQYKDAQGQPQAVPVAGDENEVTVPGLDPDRKYKMNLYGLRGRQRVGPESVVAKTAPQEDVDETPSPTELGTEAPESPEEPLLGELTVTGSSPDSLSLFWTVPQGSFDSFTVQYKDRDGRPRAVRVGGKESEVTVGGLEPGHKYKMHLYGLHEGQRVGPVSAVGVTAPQQEETPPATESPLEPRLGELTVTDVTPNSVGLSWTVPEGQFDSFIVQYKDKDGQPQVVPVAADQREVTVYNLEPERKYKMNMYGLHDGQRMGPLSVVIVTAPLPPAPATEASKPPLEPRLGELTVTDITPDSVGLSWTVPEGEFDSFVVQYKDRDGQPQVVPVAADQREVTIPDLEPSRKYKFLLFGIQDGKRRSPVSVEAKTVARGDASPGAPPRLGELWVTDPTPDSLRLSWTVPEGQFDSFVVQFKDKDGPQVVPVEGHERSVTVTPLDAGRKYRFLLYGLLGKKRHGPLTADGTTEARSAMDDTGTKRPPKPRLGEELQVTTVTQNSVGLSWTVPEGQFDSFVVQYKDRDGQPQVVPVEGSLREVSVPGLDPAHRYKLLLYGLHHGKRVGPISAVAITAGREETETETTAPTPPAPEPHLGELTVEEATSHTLHLSWMVTEGEFDSFEIQYTDRDGQLQMVRIGGDRNDITLSGLESDHRYLVTLYGFSDGKHVGPVHVEALTVPEEEKPSEPPTATPEPPIKPRLGELTVTDATPDSLSLSWTVPEGQFDHFLVQYRNGDGQPKAVRVPGHEEGVTISGLEPDHKYKMNLYGFHGGQRMGPVSVVGVTAAEEETPSPTEPSMEAPEPAEEPLLGELTVTGSSPDSLSLSWTVPQGRFDSFTVQYKDRDGRPQVVRVGGEESEVTVGGLEPGRKYKMHLYGLHEGRRVGPVSAVGVTAPEEESPDAPLAKLRLGQMTVRDITSDSLSLSWTVPEGQFDHFLVQFKNGDGQPKAVRVPGHEDGVTISGLEPDHKYKMNLYGFHGGQRVGPVSAVGLT

SEQ ID NO: 201441 - protein, 673 aa, Artificial Sequence
  derived and/or modified sequence
MRLSWSVAQGPFDSFVVQYEDTNGQPQALLVDGDQSKILISGLEPSTPYRFLLYGLHEGKRLGPLSAEGTTGLAPAGQTSEESRPRLSQLSVTDVTTSSLRLNWEAPPGAFDSFLLRFGVPSPSTLEPHPRPLLQRELMVPGTRHSAVLRDLRSGTLYSLTLYGLRGPHKADSIQGTARTLSPVLESPRDLQFSEIRETSAKVNWMPPPSRADSFKVSYQLADGGEPQSVQVDGQARTQKLQGLIPGARYEVTVVSVRGFEESEPLTGFLTTVPDGPTQLRALNLTEGFAVLHWKPPQNPVDTYDIQVTAPGAPPLQAETPGSAVDYPLHDLVLHTNYTATVRGLRGPNLTSPASITFTTGLEAPRDLEAKEVTPRTALLTWTEPPVRPAGYLLSFHTPGGQTQEILLPGGITSHQLLGLFPSTSYNARLQAMWGQSLLPPVSTSFTTGGLRIPFPRDCGEEMQNGAGASRTSTIFLNGNRERPLIVFCDMETDGGGWLVFQRRMDGQTDFWRDWEDYAHGFGNISGEFWLGNEALHSLTQAGDYSMRVDLRAGDEAVFAQYDSFHVDSAAEYYRLHLEGYHGTAGDSMSYHSGSVFSARDRDPNSLLISCAVSYRGAWWYRNCHYANLNGLYGSTVDHQGVSWYHWKGFEFSVPFTEMKLRPRNFRSPAGGG

SEQ ID NO: 201442 - protein, 217 aa, Artificial Sequence
  derived and/or modified sequence
APGKDEEMAPASTEPPTPEPPIKPRLEELTVTDATPDSLSLSWTVPEGQFDHFLVQYKNGDGQPKATRVPGHEDRVTISGLEPDNKYKMNLYGFHGGQRVGPVSAIGVTAAEEETPSPTEPSMEAPEPPEEPLLGELTVTGSSPDSLSLSWTVPQGRFDSFTVQYKDRDGRPQVVRVGGEESEVTVGGLEPGRKYKMHLYGLHEGRRVGPVSTVGVT

SEQ ID NO: 201443 - protein, 4242 aa, Artificial Sequence
  derived and/or modified sequence
MMPAQYALTSSLVLLVLLSTARAGPFSSRSNVTLPAPRPPPQPGGHTVGAGVGSPSSQLYEHTVEGGEKQVVFTHRINLPPSTGCGCPPGTEPPVLASEVQALRVRLEILEELVKGLKEQCTGGCCPASAQAGTGQTDVRTLCSLHGVFDLSRCTCSCEPGWGGPTCSDPTDAEIPPSSPPSASGSCPDDCNDQGRCVRGRCVCFPGYTGPSCGWPSCPGDCQGRGRCVQGVCVCRAGFSGPDCSQRSCPRGCSQRGRCEGGRCVCDPGYTGDDCGMRSCPRGCSQRGRCENGRCVCNPGYTGEDCGVRSCPRGCSQRGRCKDGRCVCDPGYTGEDCGTRSCPWDCGEGGRCVDGRCVCWPGYTGEDCSTRTCPRDCRGRGRCEDGECICDTGYSGDDCGVRSCPGDCNQRGRCEDGRCVCWPGYTGTDCGSRACPRDCRGRGRCENGVCVCNAGYSGEDCGVRSCPGDCRGRGRCESGRCMCWPGYTGRDCGTRACPGDCRGRGRCVDGRCVCNPGFTGEDCGSRRCPGDCRGHGLCEDGVCVCDAGYSGEDCSTRSCPGGCRGRGQCLDGRCVCEDGYSGEDCGVRQCPNDCSQHGVCQDGVCICWEGYVSEDCSIRTCPSNCHGRGRCEEGRCLCDPGYTGPTCATRMCPADCRGRGRCVQGVCLCHVGYGGEDCGQEEPPASACPGGCGPRELCRAGQCVCVEGFRGPDCAIQTCPGDCRGRGECHDGSCVCKDGYAGEDCGEEVPTIEGMRMHLLEETTVRTEWTPAPGPVDAYEIQFIPTTEGASPPFTARVPSSASAYDQRGLAPGQEYQVTVRALRGTSWGLPASKTITTMIDGPQDLRVVAVTPTTLELGWLRPQAEVDRFVVSYVSAGNQRVRLEVPPEADGTLLTDLMPGVEYVVTVTAERGRAVSYPASVRANTGSSPLGLLGTTDEPPPSGPSTTQGAQAPLLQQRPQELGELRVLGRDETGRLRVVWTAQPDTFAYFQLRMRVPEGPGAHEEVLPGDVRQALVPPPPPGTPYELSLHGVPPGGKPSDPIIYQGIMDKDEEKPGKSSGPPRLGELTVTDRTSDSLLLRWTVPEGEFDSFVIQYKDRDGQPQVVPVEGPQRSAVITSLDPGRKYKFVLYGFVGKKRHGPLVAEAKILPQSDPSPGTPPRLGNLWVTDPTPDSLHLSWTVPEGQFDTFMVQYRDRDGRPQVVPVEGPERSFVVSSLDPDHKYRFTLFGIANKKRYGPLTADGTTAPERKEEPPRPEFLEQPLLGELTVTGVTPDSLRLSWTVAQGPFDSFMVQYKDAQGQPQAVPVAGDENEVTVPGLDPDRKYKMNLYGLRGRQRVGPESVVAKTAPQEDVDETPSPTELGTEAPESPEEPLLGELTVTGSSPDSLSLFWTVPQGSFDSFTVQYKDRDGRPRAVRVGGKESEVTVGGLEPGHKYKMHLYGLHEGQRVGPVSAVGVTAPQQEETPPATESPLEPRLGELTVTDVTPNSVGLSWTVPEGQFDSFIVQYKDKDGQPQVVPVAADQREVTVYNLEPERKYKMNMYGLHDGQRMGPLSVVIVTAPLPPAPATEASKPPLEPRLGELTVTDITPDSVGLSWTVPEGEFDSFVVQYKDRDGQPQVVPVAADQREVTIPDLEPSRKYKFLLFGIQDGKRRSPVSVEAKTVARGDASPGAPPRLGELWVTDPTPDSLRLSWTVPEGQFDSFVVQFKDKDGPQVVPVEGHERSVTVTPLDAGRKYRFLLYGLLGKKRHGPLTADGTTEARSAMDDTGTKRPPKPRLGEELQVTTVTQNSVGLSWTVPEGQFDSFVVQYKDRDGQPQVVPVEGSLREVSVPGLDPAHRYKLLLYGLHHGKRVGPISAVAITAGREETETETTAPTPPAPEPHLGELTVEEATSHTLHLSWMVTEGEFDSFEIQYTDRDGQLQMVRIGGDRNDITLSGLESDHRYLVTLYGFSDGKHVGPVHVEALTVPEEEKPSEPPTATPEPPIKPRLGELTVTDATPDSLSLSWTVPEGQFDHFLVQYRNGDGQPKAVRVPGHEEGVTISGLEPDHKYKMNLYGFHGGQRMGPVSVVGVTAAEEETPSPTEPSMEAPEPAEEPLLGELTVTGSSPDSLSLSWTVPQGRFDSFTVQYKDRDGRPQVVRVGGEESEVTVGGLEPGRKYKMHLYGLHEGRRVGPVSAVGVTAPEEESPDAPLAKLRLGQMTVRDITSDSLSLSWTVPEGQFDHFLVQFKNGDGQPKAVRVPGHEDGVTISGLEPDHKYKMNLYGFHGGQRVGPVSAVGLTAPGKDEEMAPASTEPPTPEPPIKPRLEELTVTDATPDSLSLSWTVPEGQFDHFLVQYKNGDGQPKATRVPGHEDRVTISGLEPDNKYKMNLYGFHGGQRVGPVSAIGVTAAEEETPSPTEPSMEAPEPPEEPLLGELTVTGSSPDSLSLSWTVPQGRFDSFTVQYKDRDGRPQVVRVGGEESEVTVGGLEPGRKYKMHLYGLHEGRRVGPVSTVGVTAPQEDVDETPSPTEPGTEAPEPPEEPLLGELTVTGSSPDSLSLSWTVPQGRFDSFTVQYKDRDGRPQAVRVGGQESKVTVRGLEPGRKYKMHLYGLHEGRRLGPVSAVGVTEDEAETTQAVPTMTPEPPIKPRLGELTMTDATPDSLSLSWTVPEGQFDHFLVQYRNGDGQPKAVRVPGHEDGVTISGLEPDHKYKMNLYGFHGGQRVGPISVIGVTAAEEETPSPTELSTEAPEPPEEPLLGELTVTGSSPDSLSLSWTIPQGHFDSFTVQYKDRDGRPQVMRVRGEESEVTVGGLEPGRKYKMHLYGLHEGRRVGPVSTVGVTEDEAETTQAVPTTTPEPPNKPRLGELTVTDATPDSLSLSWMVPEGQFDHFLVQYRNGDGQPKVVRVPGHEDGVTISGLEPDHKYKMNLYGFHGGQRVGPISVIGVTAAEEETPAPTEPSTEAPEPPEEPLLGELTVTGSSPDSLSLSWTIPQGRFDSFTVQYKDRDGRPQVVRVRGEESEVTVGGLEPGCKYKMHLYGLHEGQRVGPVSAVGVTAPKDEAETTQAVPTMTPEPPIKPRLGELTVTDATPDSLSLSWMVPEGQFDHFLVQYRNGDGQPKAVRVPGHEDGVTISGLEPDHKYKMNLYGFHGGQRVGPVSAIGVTEEETPSPTEPSTEAPEAPEEPLLGELTVTGSSPDSLSLSWTVPQGRFDSFTVQYKDRDGQPQVVRVRGEESEVTVGGLEPGRKYKMHLYGLHEGQRVGPVSTVGITAPLPTPLPVEPRLGELAVAAVTSDSVGLSWTVAQGPFDSFLVQYRDAQGQPQAVPVSGDLRAVAVSGLDPARKYKFLLFGLQNGKRHGPVPVEARTAPDTKPSPRLGELTVTDATPDSVGLSWTVPEGEFDSFVVQYKDKDGRLQVVPVAANQREVTVQGLEPSRKYRFLLYGLSGRKRLGPISADSTTAPLEKELPPHLGELTVAEETSSSLRLSWTVAQGPFDSFVVQYRDTDGQPRAVPVAADQRTVTVEDLEPGKKYKFLLYGLLGGKRLGPVSALGMTAPEEDTPAPELAPEAPEPPEEPRLGVLTVTDTTPDSMRLSWSVAQGPFDSFVVQYEDTNGQPQALLVDGDQSKILISGLEPSTPYRFLLYGLHEGKRLGPLSAEGTTGLAPAGQTSEESRPRLSQLSVTDVTTSSLRLNWEAPPGAFDSFLLRFGVPSPSTLEPHPRPLLQRELMVPGTRHSAVLRDLRSGTLYSLTLYGLRGPHKADSIQGTARTLSPVLESPRDLQFSEIRETSAKVNWMPPPSRADSFKVSYQLADGGEPQSVQVDGQARTQKLQGLIPGARYEVTVVSVRGFEESEPLTGFLTTVPDGPTQLRALNLTEGFAVLHWKPPQNPVDTYDIQVTAPGAPPLQAETPGSAVDYPLHDLVLHTNYTATVRGLRGPNLTSPASITFTTGLEAPRDLEAKEVTPRTALLTWTEPPVRPAGYLLSFHTPGGQTQEILLPGGITSHQLLGLFPSTSYNARLQAMWGQSLLPPVSTSFTTGGLRIPFPRDCGEEMQNGAGASRTSTIFLNGNRERPLIVFCDMETDGGGWLVFQRRMDGQTDFWRDWEDYAHGFGNISGEFWLGNEALHSLTQAGDYSMRVDLRAGDEAVFAQYDSFHVDSAAEYYRLHLEGYHGTAGDSMSYHSGSVFSARDRDPNSLLISCAVSYRGAWWYRNCHYANLNGLYGSTVDHQGVSWYHWKGFEFSVPFTEMKLRPRNFRSPAGGG

SEQ ID NO: 201444 - protein, 4242 aa, Artificial Sequence
  derived and/or modified sequence
MMPAQYALTSSLVLLVLLSTARAGPFSSRSNVTLPAPRPPPQPGGHTVGAGVGSPSSQLYEHTVEGGEKQVVFTHRINLPPSTGCGCPPGTEPPVLASEVQALRVRLEILEELVKGLKEQCTGGCCPASAQAGTGQTDVRTLCSLHGVFDLSRCTCSCEPGWGGPTCSDPTDAEIPPSSPPSASGSCPDDCNDQGRCVRGRCVCFPGYTGPSCGWPSCPGDCQGRGRCVQGVCVCRAGFSGPDCSQRSCPRGCSQRGRCEGGRCVCDPGYTGDDCGMRSCPRGCSQRGRCENGRCVCNPGYAGEDCGVRSCPRGCSQRGRCKDGRCVCDPGYTGEDCGTRSCPWDCGEGGRCVDGRCVCWPGYTGEDCSTRTCPRDCRGRGRCEDGECICDTGYSGDDCGVRSCPGDCNQRGRCEDGRCVCWPGYTGTDCGSRACPRDCRGRGRCENGVCVCNAGYSGEDCGVRSCPGDCRGRGRCESGRCMCWPGYTGRDCGTRACPGDCRGRGRCVDGRCVCNPGFTGEDCGSRRCPGDCRGHGLCEDGVCVCDAGYSGEDCSTRSCPGGCRGRGQCLDGRCVCEDGYSGEDCGVRQCPNDCSQHGVCQDGVCICWEGYVSEDCSIRTCPSNCHGRGRCEEGRCLCDPGYTGPTCATRMCPADCRGRGRCVQGVCLCHVGYGGEDCGQEEPPASACPGGCGPRELCRAGQCVCVEGFRGPDCAIQTCPGDCRGRGECHDGSCVCKDGYAGEDCGEEVPTIEGMRMHLLEETTVRTEWTPAPGPVDAYEIQFIPTTEGASPPFTARVPSSASAYDQRGLAPGQEYQVTVRALRGTSWGLPASKTITTMIDGPQDLRVVAVTPTTLELGWLRPQAEVDRFVVSYVSAGNQRVRLEVPPEADGTLLTDLMPGVEYVVTVTAERGRAVSYPASVRANTGSSPLGLLGTTDEPPPSGPSTTQGAQAPLLQQRPQELGELRVLGRDETGRLRVVWTAQPDTFAYFQLRMRVPEGPGAHEEVLPGDVRQALVPPPPPGTPYELSLHGVPPGGKPSDPIIYQGIMDKDEEKPGKSSGPPRLGELTVTDRTSDSLLLRWTVPEGEFDSFVIQYKDRDGQPQVVPVEGPQRSAVITSLDPGRKYKFVLYGFVGKKRHGPLVAEAKILPQSDPSPGTPPHLGNLWVTDPTPDSLHLSWTVPEGQFDTFMVQYRDRDGRPQVVPVEGPERSFVVSSLDPDHKYRFTLFGIANKKRYGPLTADGTTAPERKEEPPRPEFLEQPLLGELTVTGVTPDSLRLSWTVAQGPFDSFMVQYKDAQGQPQAVPVAGDENEVTVPGLDPDRKYKMNLYGLRGRQRVGPESVVAKTAPQEDVDETPSPTELGTEAPESPEEPLLGELTVTGSSPDSLSLFWTVPQGSFDSFTVQYKDRDGRPRAVRVGGKESEVTVGGLEPGHKYKMHLYGLHEGQRVGPVSAVGVTAPQQEETPPATESPLEPRLGELTVTDVTPNSVGLSWTVPEGQFDSFIVQYKDKDGQPQVVPVAADQREVTVYNLEPERKYKMNMYGLHDGQRMGPLSVVIVTAPLPPAPATEASKPPLEPRLGELTVTDITPDSVGLSWTVPEGEFDSFVVQYKDRDGQPQVVPVAADQREVTIPDLEPSRKYKFLLFGIQDGKRRSPVSVEAKTVARGDASPGAPPRLGELWVTDPTPDSLRLSWTVPEGQFDSFVVQFKDKDGPQVVPVEGHERSVTVTPLDAGRKYRFLLYGLLGKKRHGPLTADGTTEARSAMDDTGTKRPPKPRLGEELQVTTVTQNSVGLSWTVPEGQFDSFVVQYKDRDGQPQVVPVEGSLREVSVPGLDPAHRYKLLLYGLHHGKRVGPISAVAITAGREETETETTAPTPPAPEPHLGELTVEEATSHTLHLSWMVTEGEFDSFEIQYTDRDGQLQMVRIGGDRNDITLSGLESDHRYLVTLYGFSDGKHVGPVHVEALTVPEEEKPSEPPTATPEPPIKPRLGELTVTDATPDSLSLSWTVPEGQFDHFLVQYRNGDGQPKAVRVPGHEEGVTISGLEPDHKYKMNLYGFHGGQRMGPVSVVGVTAAEEETPSPTEPSMEAPEPAEEPLLGELTVTGSSPDSLSLSWTVPQGRFDSFTVQYKDRDGRPQVVRVGGEESEVTVGGLEPGRKYKMHLYGLHEGRRVGPVSAVGVTAPEEESPDAPLAKLRLGQMTVRDITSDSLSLSWTVPEGQFDHFLVQFKNGDGQPKAVRVPGHEDGVTISGLEPDHKYKMNLYGFHGGQRVGPVSAVGLTAPGKDEEMAPASTEPPTPEPPIKPRLEELTVTDATPDSLSLSWTVPEGQFDHFLVQYKNGDGQPKATRVPGHEDRVTISGLEPDNKYKMNLYGFHGGQRVGPVSAIGVTAAEEETPSPTEPSMEAPEPPEEPLLGELTVTGSSPDSLSLSWTVPQGRFDSFTVQYKDRDGRPQVVRVGGEESEVTVGGLEPGRKYKMHLYGLHEGRRVGPVSTVGVTAPQEDVDETPSPTEPGTEAPEPPEEPLLGELTVTGSSPDSLSLSWTVPQGRFDSFTVQYKDRDGRPQAVRVGGQESKVTVRGLEPGRKYKMHLYGLHEGRRLGPVSAVGVTEDEAETTQAVPTMTPEPPIKPRLGELTMTDATPDSLSLSWTVPEGQFDHFLVQYRNGDGQPKAVRVPGHEDGVTISGLEPDHKYKMNLYGFHGGQRVGPISVIGVTAAEEETPSPTELSTEAPEPPEEPLLGELTVTGSSPDSLSLSWTIPQGHFDSFTVQYKDRDGRPQVMRVRGEESEVTVGGLEPGRKYKMHLYGLHEGRRVGPVSTVGVTEDEAETTQAVPTTTPEPPNKPRLGELTVTDATPDSLSLSWMVPEGQFDHFLVQYRNGDGQPKVVRVPGHEDGVTISGLEPDHKYKMNLYGFHGGQRVGPISVIGVTAAEEETPAPTEPSTEAPEPPEEPLLGELTVTGSSPDSLSLSWTIPQGRFDSFTVQYKDRDGRPQVVRVRGEESEVTVGGLEPGCKYKMHLYGLHEGQRVGPVSAVGVTAPKDEAETTQAVPTMTPEPPIKPRLGELTVTDATPDSLSLSWMVPEGQFDHFLVQYRNGDGQPKAVRVPGHEDGVTISGLEPDHKYKMNLYGFHGGQRVGPVSAIGVTEEETPSPTEPSTEAPEAPEEPLLGELTVTGSSPDSLSLSWTVPQGRFDSFTVQYKDRDGQPQVVRVRGEESEVTVGGLEPGRKYKMHLYGLHEGQRVGPVSTVGITAPLPTPLPVEPRLGELAVAAVTSDSVGLSWTVAQGPFDSFLVQYRDAQGQPQAVPVSGDLRAVAVSGLDPARKYKFLLFGLQNGKRHGPVPVEARTAPDTKPSPRLGELTVTDATPDSVGLSWTVPEGEFDSFVVQYKDKDGRLQVVPVAANQREVTVQGLEPSRKYRFLLYGLSGRKRLGPISADSTTAPLEKELPPHLGELTVAEETSSSLRLSWTVAQGPFDSFVVQYRDTDGQPRAVPVAADQRTVTVEDLEPGKKYKFLLYGLLGGKRLGPVSALGMTAPEEDTPAPELAPEAPEPPEEPRLGVLTVTDTTPDSMRLSWSVAQGPFDSFVVQYEDTNGQPQALLVDGDQSKILISGLEPSTPYRFLLYGLHEGKRLGPLSAEGTTGLAPAGQTSEESRPRLSQLSVTDVTTSSLRLNWEAPPGAFDSFLLRFGVPSPSTLEPHPRPLLQRELMVPGTRHSAVLRDLRSGTLYSLTLYGLRGPHKADSIQGTARTLSPVLESPRDLQFSEIRETSAKVNWMPPPSRADSFKVSYQLADGGEPQSVQVDGQARTQKLQGLIPGARYEVTVVSVRGFEESEPLTGFLTTVPDGPTQLRALNLTEGFAVLHWKPPQNPVDTYDVQVTAPGAPPLQAETPGSAVDYPLHDLVLHTNYTATVRGLRGPNLTSPASITFTTGLEAPRDLEAKEVTPRTALLTWTEPPVRPAGYLLSFHTPGGQNQEILLPGGITSHQLLGLFPSTSYNARLQAMWGQSLLPPVSTSFTTGGLRIPFPRDCGEEMQNGAGASRTSTIFLNGNRERPLNVFCDMETDGGGWLVFQRRMDGQTDFWRDWEDYAHGFGNISGEFWLGNEALHSLTQAGDYSMRVDLRAGDEAVFAQYDSFHVDSAAEYYRLHLEGYHGTAGDSMSYHSGSVFSARDRDPNSLLISCAVSYRGAWWYRNCHYANLNGLYGSTVDHQGVSWYHWKGFEFSVPFTEMKLRPRNFRSPAGGG

SEQ ID NO: 201445 - protein, 280 aa, Artificial Sequence
  derived and/or modified sequence
MVTEGEFDSFEIQYTDRDGQLQMVRIGGDRNDITLSGLESDHRYLVTLYGFSDGKHVGPVHVEALTVPEEEKPSEPPTATPEPPIKPRLGELTVTDATPDSLSLSWTVPEGQFDHFLVQYRNGDGQPKAVRVPGHEEGVTISGLEPDHKYKMNLYGFHGGQRMGPVSVVGVTAAEEETPSPTEPSMEAPEPAEEPLLGELTVTGSSPDSLSLSWTVPQGRFDSFTVQYKDRDGRPQVVRVGGEESEVTVGGLEPGRKYKMHLYGLHEGRRVGPVSAVGVT

SEQ ID NO: 201446 - protein, 4242 aa, Artificial Sequence
  derived and/or modified sequence
MMPAQYALTSSLVLLVLLSTARAGPFSSRSNVTLPAPRPPPQPGGHTVGAGVGSPSSQLYEHTVEGGEKQVVFTHRINLPPSTGCGCPPGTEPPVLASEVQALRVRLEILEELVKGLKEQCTGGCCPASAQAGTGQTDVRTLCSLHGVFDLSRCTCSCEPGWGGPTCSDPTDAEIPPSSPPSASGSCPDDCNDQGRCVRGRCVCFPGYTGPSCGWPSCPGDCQGRGRCVQGVCVCRAGFSGPDCSQRSCPRGCSQRGRCEGGRCVCDPGYTGDDCGMRSCPRGCSQRGRCENGRCVCNPGYTGEDCGVRSCPRGCSQRGRCKDGRCVCDPGYTGEDCGTRSCPWDCGEGGRCVDGRCVCWPGYTGEDCSTRTCPRDCRGRGRCEDGECICDTGYSGDDCGVRSCPGDCNQRGRCEDGRCVCWPGYTGTDCGSRACPRDCRGRGRCENGVCVCNAGYSGEDCGVRSCPGDCRGRGRCESGRCMCWPGYTGRDCGTRACPGDCRGRGRCVDGRCVCNPGFTGEDCGSRRCPGDCRGHGLCEDGVCVCDAGYSGEDCSTRSCPGGCRGRGQCLDGRCVCEDGYSGEDCGVRQCPNDCSQHGVCQDGVCICWEGYVSEDCSIRTCPSNCHGRGRCEEGRCLCDPGYTGPTCATRMCPADCRGRGRCVQGVCLCHVGYGGEDCGQEEPPASACPGGCGPRELCRAGQCVCVEGFRGPDCAIQTCPGDCRGRGECHDGSCVCKDGYAGEDCGEEVPTIEGMRMHLLEETTVRTEWTPAPGPVDAYEIQFIPTTEGASPPFTARVPSSASAYDQRGLAPGQEYQVTVRALRGTSWGLPASKTITTMIDGPQDLRVVAVTPTTLELGWLRPQAEVDRFVVSYVSAGNQRVRLEVPPEADGTLLTDLMPGVEYVVTVTAERGRAVSYPASVRANTGSSPLGLLGTTDEPPPSGPSTTQGAQAPLLQQRPQELGELRVLGRDETGRLRVVWTAQPDTFAYFQLRMRVPEGPGAHEEVLPGDVRQALVPPPPPGTPYELSLHGVPPGGKPSDPIIYQGIMDKDEEKPGKSSGPPRLGELTVTDRTSDSLLLRWTVPEGEFDSFVIQYKDRDGQPQVVPVEGPQRSAVITSLDPGRKYKFVLYGFVGKKRHGPLVAEAKILPQSDPSPGTPPRLGNLWVTDPTPDSLHLSWTVPEGQFDTFMVQYRDRDGRPQVVPVEGPERSFVVSSLDPDHKYRFTLFGIANKKRYGPLTADGTTAPERKEEPPHPEFLEQPLLGELTVTGVTPDSLRLSWTVAQGPFDSFMVQYKDAQGQPQAVPVAGDENEVTVPGLDPDRKYKMNLYGLRGRQRVGPESVVAKTAPQEDVDETPSPTELGTEAPESPEEPLLGELTVTGSSPDSLSLFWTVPQGSFDSFTVQYKDRDGRPRAVRVGGKESEVTVGGLEPGHKYKMHLYGLHEGQRVGPVSAVGVTAPQQEETPPATESPLEPRLGELTVTDVTPNSVGLSWTVPEGQFDSFIVQYKDKDGQPQVVPVAADQREVTVYNLEPERKYKMNMYGLHDGQRMGPLSVVIVTAPLPPAPATEASKPPLEPRLGELTVTDITPDSVGLSWTVPEGEFDSFVVQYKDRDGQPQVVPVAADQREVTIPDLEPSRKYKFLLFGIQDGKRRSPVSVEAKTVARGDASPGAPPRLGELWVTDPTPDSLRLSWTVPEGQFDSFVVQFKDKDGPQVVPVEGHERSVTVTPLDAGRKYRFLLYGLLGKKRHGPLTADGTTEARSAMDDTGTKRPPKPRLGEELQVTTVTQNSVGLSWTVPEGQFDSFVVQYKDRDGQPQVVPVEGSLREVSVPGLDPAHRYKLLLYGLHHGKRVGPISAVAITAGREETETETTAPTPPAPEPHLGELTVEEATSHTLHLSWMVTEGEFDSFEIQYTDRDGQLQMVRIGGDRNDITLSGLESDHRYLVTLYGFSDGKHVGPVHVEALTVPEEEKPSEPPTATPEPPIKPRLGELTVTDATPDSLSLSWTVPEGQFDHFLVQYRNGDGQPKAVRVPGHEEGVTISGLEPDHKYKMNLYGFHGGQRMGPVSVVGVTAAEEETPSPTEPSMEAPEPAEEPLLGELTVTGSSPDSLSLSWTVPQGRFDSFTVQYKDRDGRPQVVRVGGEESEVTVGGLEPGRKYKMHLYGLHEGRRVGPVSAVGVTAPEEESPDAPLAKLRLGQMTVRDITSDSLSLSWTVPEGQFDHFLVQFKNGDGQPKAVRVPGHEDGVTISGLEPDHKYKMNLYGFHGGQRVGPVSAVGLTAPGKDEEMAPASTEPPTPEPPIKPRLEELTVTDATPDSLSLSWTVPEGQFDHFLVQYKNGDGQPKATRVPGHEDRVTISGLEPDNKYKMNLYGFHGGQRVGPVSAIGVTAAEEETPSPTEPSMEAPEPPEEPLLGELTVTGSSPDSLSLSWTVPQGRFDSFTVQYKDRDGRPQVVRVGGEESEVTVGGLEPGRKYKMHLYGLHEGRRVGPVSTVGVTAPQEDVDETPSPTEPGTEAPEPPEEPLLGELTVTGSSPDSLSLSWTVPQGRFDSFTVQYKDRDGRPQAVRVGGQESKVTVRGLEPGRKYKMHLYGLHEGRRLGPVSAVGVTEDEAETTQAVPTMTPEPPIKPRLGELTMTDATPDSLSLSWTVPEGQFDHFLVQYRNGDGQPKAVRVPGHEDGVTISGLEPDHKYKMNLYGFHGGQRVGPISVIGVTAAEEETPSPTELSTEAPEPPEEPLLGELTVTGSSPDSLSLSWTIPQGHFDSFTVQYKDRDGRPQVMRVRGEESEVTVGGLEPGRKYKMHLYGLHEGRRVGPVSTVGVTEDEAETTQAVPTTTPEPPNKPRLGELTVTDATPDSLSLSWMVPEGQFDHFLVQYRNGDGQPKVVRVPGHEDGVTISGLEPDHKYKMNLYGFHGGQRVGPISVIGVTAAEEETPAPTEPSTEAPEPPEEPLLGELTVTGSSPDSLSLSWTIPQGRFDSFTVQYKDRDGRPQVVRVRGEESEVTVGGLEPGCKYKMHLYGLHEGQRVGPVSAVGVTAPKDEAETTQAVPTMTPEPPIKPRLGELTVTDATPDSLSLSWMVPEGQFDHFLVQYRNGDGQPKAVRVPGHEDGVTISGLEPDHKYKMNLYGFHGGQRVGPVSAIGVTEEETPSPTEPSTEAPEAPEEPLLGELTVTGSSPDSLSLSWTIPQGRFDSFTVQYKDRDGQPQVVRVRGEESEVTVGGLEPGRKYKMHLYGLHEGQRVGPVSTVGITAPLPTPLPVEPRLGELAVAAVTSDSVGLSWTVAQGPFDSFLVQYRDAQGQPQAVPVSGDLRAVAVSGLDPARKYKFLLFGLQNGKRHGPVPVEARTAPDTKPSPRLGELTVTDATPDSVGLSWTVPEGEFDSFVVQYKDKDGRLQVVPVAANQREVTVQGLEPSRKYRFLLYGLSGRKRLGPISADSTTAPLEKELPPHLGELTVAEETSSSLRLSWTVAQGPFDSFVVQYRDTDGQPRAVPVAADQRTVTVEDLEPGKKYKFLLYGLLGGKRLGPVSALGMTAPEEDTPAPELAPEAPEPPEEPRLGVLTVTDTTPDSMRLSWSVAQGPFDSFVVQYEDTNGQPQALLVDGDQSKILISGLEPSTPYRFLLYGLHEGKRLGPLSAEGTTGLAPAGQTSEESRPRLSQLSVTDVTTSSLRLNWEAPPGAFDSFLLRFGVPSPSTLEPHPRPLLQRELMVPGTRHSAVLRDLRSGTLYSLTLYGLRGPHKADSIQGTARTLSPVLESPRDLQFSEIRETSAKVNWMPPPSRADSFKVSYQLADGGEPQSVQVDGQARTQKLQGLIPGARYEVTVVSVRGFEESEPLTGFLTTVPDGPTQLRALNLTEGFAVLHWKPPQNPVDTYDIQVTAPGAPPLQAETPGSAVDYPLHDLVLHTNYTATVRGLRGPNLTSPASITFTTGLEAPRDLEAKEVTPRTALLTWTEPPVRPAGYLLSFHTPGGQTQEILLPGGITSHQLLGLFPSTSYNARLQATWGQSLLPPVSTSFTTGGLRIPFPRDCGEEMQNGAGASRTSTIFLNGNRERPLNVFCDMETDGGGWLVFQRRMDGQTDFWRDWEDYAHGFGNISGEFWLGNEALHSLTQAGDYSMRVDLRAGDEAVFAQYDSFHVDSAAEYYRLHLEGYHGTAGDSMSYHSGSVFSARDRDPNSLLISCAVSYRGAWWYRNCHYANLNGLYGSTVDHQGVSWYHWKGFEFSVPFTEMKLRPRNFRSPAGGG

SEQ ID NO: 201447 - protein, 313 aa, Artificial Sequence
  derived and/or modified sequence
TEPGTEAPGPPEEPLLGELTVTGSSPDSLSLSWTVPQGRFDSFTVQYKDRDGRPQAVRVGGQESKVTVRGLEPGRKYKMHLYGLHEGRRLGPVSAVGVTEDEAETTQAVPTMTPEPPIKPRLGELTMTDATPDSLSLSWTVPEGQFDHFLVQYRNGDGQPKAVRVPGHEDGVTISGLEPDHKYKMNLYGFHGGQRVGPISVIGVTAAEEETPSPTELSTEAPEPPEEPLLGELTVTGSSPDSLSLSWTIPQGHFDSFTVQYKDRDGRPQVMRVRGEESEVTVGGLEPGRKYKMHLYGLHEGRRVGPVSTVGVT

SEQ ID NO: 201448 - protein, 313 aa, Artificial Sequence
  derived and/or modified sequence
MTPEPPIKPRLGELTMTDATPDSLSLSWTVPEGQFDHFLVQYRNGDGQPKAVRVPGHEDGVTISGLEPDHKYKMNLYGFHGGQRVGPISVTGVTAAEEETPSPTELSTEAPEPPEEPLLGELTVTGSSPDSLSLSWTIPQGHFDSFTVQYKDRDGRPQVMRVRGEESEVTVGGLEPGRKYKMHLYGLHEGRRVGPVSTVGVTAPEDEEEETPAPTEPSTEAPEPPEEPLLGELTVTGSSPDSLSLSWTIPQGRFDSFTVQYKDRDGRPQVVRVRGEESEVTVGGLEPGCKYKMHLYGLHEGQRVGPVSAVGVT

SEQ ID NO: 201449 - protein, 426 aa, Artificial Sequence
  derived and/or modified sequence
AGEDCGEEVPTIEGMRMHLLEETTVRTEWTPAPGPVDAYEIQFIPTTEGASPPFTARVPSSASAYDQRGLAPGQEYQVTVRALRGTSWGLPASKTITTMIDGPQDLRVVAVTPTTLELGWLRPQAEVDRFVVSYVSAGNQRVRLEVPPEADGTLLTDLMPGVEYVVTVTAERGRAVSYPASVRANTGSSPLGLLGTTDEPPPSGPSTTQGAQAPLLQQRPQELGELRVLGRDETGRLRVVWTAQPDTFAYFQLRMRVPEGPGAHEEVLPGDVRQALVPPPPPGTPYELSLHGVPPGGKPSDPIIYQGIMDKDEEKPGKSSGPPRLGELTVTDRTSDSLLLRWTVPEGEFDSFVIQYKDRDGQPQVVPVEGPQRSAVITSLDPGRKYKFVLYGFVGKKRHGPLVAEAKILPQSDPSPGTPPHLGNLW

SEQ ID NO: 201450 - protein, 865 aa, Artificial Sequence
  derived and/or modified sequence
LYGLRGRQRVGPESVVAKTAPQEDVDETPSPTELGTEAPESPEEPLLGELTVTGSSPDSLSLFWTVPQGSFDSFTVQYKDRDGRPRAVRVGGKESEVTVGGLEPGHKYKMHLYGLHEGQRVGPVSAVGVTAPQQEETPPATESPLEPRLGELTVTDVTPNSVGLSWTVPEGQFDSFIVQYKDKDGQPQVVPVAADQREVTVYNLEPERKYKMNMYGLHDGQRMGPLSVVIVTAPLPPAPATEASKPPLEPRLGELTVTDITPDSVGLSWTVPEGEFDSFVVQYKDRDGQPQVVPVAADQREVTIPDLEPSRKYKFLLFGIQDGKRRSPVSVEAKTVARGDASPGAPPRLGELWVTDPTPDSLRLSWTVPEGQFDSFVVQFKDKDGPQVVPVEGHERSVTVTPLDAGRKYRFLLYGLLGKKRHGPLTADGTTEARSAMDDTGTKRPPKPRLGEELQVTTVTQNSVGLSWTVPEGQFDSFVVQYKDRDGQPQVVPVEGSLREVSVPGLDPAHRYKLLLYGLHHGKRVGPISAVAITAGREETETETTAPTPPAPEPHLGELTVEEATSHTLHLSWMVTEGEFDSFEIQYTDRDGQLQMVRIGGDRNDITLSGLESDHRYLVTLYGFSDGKHVGPVHVEALTVPEEEKPSEPPTATPEPPIKPRLGELTVTDATPDSLSLSWTVPEGQFDHFLVQYRNGDGQPKAVRVPGHEEGVTISGLEPDHKYKMNLYGFHGGQRMGPVSVVGVTAAEEETPSPTEPSMEAPEPAEEPLLGELTVTGSSPDSLSLSWTVPQGRFDSFTVQYKDRDGRPQVVRVGGEESEVTVGGLEPGRKYKMHLYGLHEGRRVGPVSAVGVTAPEEESPDAPLA

SEQ ID NO: 201451 - DNA, 12735 bp, Artificial Sequence
  derived and/or modified sequence
atgatgcccgcccagtacgccctgaccagcagcctggtgctgctggtgctgctgagcaccgccagagccggccccttcagcagcagaagcaacgtgaccctgcccgcccccagaccccccccccagcccggcggccacaccgtgggcgccggcgtgggcagccccagcagccagctgtacgagcacaccgtggagggcggcgagaagcaggtggtgttcacccacagaatcaacctgccccccagcaccggctgcggctgcccccccggcaccgagccccccgtgctggccagcgaggtgcaggccctgagagtgagactggagatcctggaggagctggtgaagggcctgaaggagcagtgcaccggcggctgctgccccgccagcgcccaggccggcaccggccagaccgacgtgagaaccctgtgcagcctgcacggcgtgttcgacctgagcagatgcacctgcagctgcgagcccggctggggcggccccacctgcagcgaccccaccgacgccgagatcccccccagcagcccccccagcgccagcggcagctgccccgacgactgcaacgaccagggcagatgcgtgagaggcagatgcgtgtgcttccccggctacaccggccccagctgcggctggcccagctgccccggcgactgccagggcagaggcagatgcgtgcagggcgtgtgcgtgtgcagagccggcttcagcggccccgactgcagccagagaagctgccccagaggctgcagccagagaggcagatgcgagggcggcagatgcgtgtgcgaccccggctacaccggcgacgactgcggcatgagaagctgccccagaggctgcagccagagaggcagatgcgagaacggcagatgcgtgtgcaaccccggctacaccggcgaggactgcggcgtgagaagctgccccagaggctgcagccagagaggcagatgcaaggacggcagatgcgtgtgcgaccccggctacaccggcgaggactgcggcaccagaagctgcccctgggactgcggcgagggcggcagatgcgtggacggcagatgcgtgtgctggcccggctacaccggcgaggactgcagcaccagaacctgccccagagactgcagaggcagaggcagatgcgaggacggcgagtgcatctgcgacaccggctacagcggcgacgactgcggcgtgagaagctgccccggcgactgcaaccagagaggcagatgcgaggacggcagatgcgtgtgctggcccggctacaccggcaccgactgcggcagcagagcctgccccagagactgcagaggcagaggcagatgcgagaacggcgtgtgcgtgtgcaacgccggctacagcggcgaggactgcggcgtgagaagctgccccggcgactgcagaggcagaggcagatgcgagagcggcagatgcatgtgctggcccggctacaccggcagagactgcggcaccagagcctgccccggcgactgcagaggcagaggcagatgcgtggacggcagatgcgtgtgcaaccccggcttcaccggcgaggactgcggcagcagaagatgccccggcgactgcagaggccacggcctgtgcgaggacggcgtgtgcgtgtgcgacgccggctacagcggcgaggactgcagcaccagaagctgccccggcggctgcagaggcagaggccagtgcctggacggcagatgcgtgtgcgaggacggctacagcggcgaggactgcggcgtgagacagtgccccaacgactgcagccagcacggcgtgtgccaggacggcgtgtgcatctgctgggagggctacgtgagcgaggactgcagcatcagaacctgccccagcaactgccacggcagaggcagatgcgaggagggcagatgcctgtgcgaccccggctacaccggccccacctgcgccaccagaatgtgccccgccgactgcagaggcagaggcagatgcgtgcagggcgtgtgcctgtgccacgtgggctacggcggcgaggactgcggccaggaggagccccccgccagcgcctgccccggcggctgcggccccagagagctgtgcagagccggccagtgcgtgtgcgtggagggcttcagaggccccgactgcgccatccagacctgccccggcgactgcagaggcagaggcgagtgccacgacggcagctgcgtgtgcaaggacggctacgccggcgaggactgcggcgaggaggtgcccaccatcgagggcatgagaatgcacctgctggaggagaccaccgtgagaaccgagtggacccccgcccccggccccgtggacgcctacgagatccagttcatccccaccaccgagggcgccagcccccccttcaccgccagagtgcccagcagcgccagcgcctacgaccagagaggcctggcccccggccaggagtaccaggtgaccgtgagagccctgagaggcaccagctggggcctgcccgccagcaagaccatcaccaccatgatcgacggcccccaggacctgagagtggtggccgtgacccccaccaccctggagctgggctggctgagaccccaggccgaggtggacagattcgtggtgagctacgtgagcgccggcaaccagagagtgagactggaggtgccccccgaggccgacggcaccctgctgaccgacctgatgcccggcgtggagtacgtggtgaccgtgaccgccgagagaggcagagccgtgagctaccccgccagcgtgagagccaacaccggcagcagccccctgggcctgctgggcaccaccgacgagcccccccccagcggccccagcaccacccagggcgcccaggcccccctgctgcagcagagaccccaggagctgggcgagctgagagtgctgggcagagacgagaccggcagactgagagtggtgtggaccgcccagcccgacaccttcgcctacttccagctgagaatgagagtgcccgagggccccggcgcccacgaggaggtgctgcccggcgacgtgagacaggccctggtgcccccccccccccccggcaccccctacgagctgagcctgcacggcgtgccccccggcggcaagcccagcgaccccatcatctaccagggcatcatggacaaggacgaggagaagcccggcaagagcagcggcccccccagactgggcgagctgaccgtgaccgacagaaccagcgacagcctgctgctgagatggaccgtgcccgagggcgagttcgacagcttcgtgatccagtacaaggacagagacggccagccccaggtggtgcccgtggagggcccccagagaagcgccgtgatcaccagcctggaccccggcagaaagtacaagttcgtgctgtacggcttcgtgggcaagaagagacacggccccctggtggccgaggccaagatcctgccccagagcgaccccagccccggcacccccccccacctgggcaacctgtgggtgaccgaccccacccccgacagcctgcacctgagctggaccgtgcccgagggccagttcgacaccttcatggtgcagtacagagacagagacggcagaccccaggtggtgcccgtggagggccccgagagaagcttcgtggtgagcagcctggaccccgaccacaagtacagattcaccctgttcggcatcgccaacaagaagagatacggccccctgaccgccgacggcaccaccgcccccgagagaaaggaggagccccccagacccgagttcctggagcagcccctgctgggcgagctgaccgtgaccggcgtgacccccgacagcctgagactgagctggaccgtggcccagggccccttcgacagcttcatggtgcagtacaaggacgcccagggccagccccaggccgtgcccgtggccggcgacgagaacgaggtgaccgtgcccggcctggaccccgacagaaagtacaagatgaacctgtacggcctgagaggcagacagagagtgggccccgagagcgtggtggccaagaccgccccccaggaggacgtggacgagacccccagccccaccgagctgggcaccgaggcccccgagagccccgaggagcccctgctgggcgagctgaccgtgaccggcagcagccccgacagcctgagcctgttctggaccgtgccccagggcagcttcgacagcttcaccgtgcagtacaaggacagagacggcagacccagagccgtgagagtgggcggcaaggagagcgaggtgaccgtgggcggcctggagcccggccacaagtacaagatgcacctgtacggcctgcacgagggccagagagtgggccccgtgagcgccgtgggcgtgaccgccccccagcaggaggagaccccccccgccaccgagagccccctggagcccagactgggcgagctgaccgtgaccgacgtgacccccaacagcgtgggcctgagctggaccgtgcccgagggccagttcgacagcttcatcgtgcagtacaaggacaaggacggccagccccaggtggtgcccgtggccgccgaccagagagaggtgaccgtgtacaacctggagcccgagagaaagtacaagatgaacatgtacggcctgcacgacggccagagaatgggccccctgagcgtggtgatcgtgaccgcccccctgccccccgcccccgccaccgaggccagcaagccccccctggagcccagactgggcgagctgaccgtgaccgacatcacccccgacagcgtgggcctgagctggaccgtgcccgagggcgagttcgacagcttcgtggtgcagtacaaggacagagacggccagccccaggtggtgcccgtggccgccgaccagagagaggtgaccatccccgacctggagcccagcagaaagtacaagttcctgctgttcggcatccaggacggcaagagaagaagccccgtgagcgtggaggccaagaccgtggccagaggcgacgccagccccggcgccccccccagactgggcgagctgtgggtgaccgaccccacccccgacagcctgagactgagctggaccgtgcccgagggccagttcgacagcttcgtggtgcagttcaaggacaaggacggcccccaggtggtgcccgtggagggccacgagagaagcgtgaccgtgacccccctggacgccggcagaaagtacagattcctgctgtacggcctgctgggcaagaagagacacggccccctgaccgccgacggcaccaccgaggccagaagcgccatggacgacaccggcaccaagagaccccccaagcccagactgggcgaggagctgcaggtgaccaccgtgacccagaacagcgtgggcctgagctggaccgtgcccgagggccagttcgacagcttcgtggtgcagtacaaggacagagacggccagccccaggtggtgcccgtggagggcagcctgagagaggtgagcgtgcccggcctggaccccgcccacagatacaagctgctgctgtacggcctgcaccacggcaagagagtgggccccatcagcgccgtggccatcaccgccggcagagaggagaccgagaccgagaccaccgcccccaccccccccgcccccgagccccacctgggcgagctgaccgtggaggaggccaccagccacaccctgcacctgagctggatggtgaccgagggcgagttcgacagcttcgagatccagtacaccgacagagacggccagctgcagatggtgagaatcggcggcgacagaaacgacatcaccctgagcggcctggagagcgaccacagatacctggtgaccctgtacggcttcagcgacggcaagcacgtgggccccgtgcacgtggaggccctgaccgtgcccgaggaggagaagcccagcgagccccccaccgccacccccgagccccccatcaagcccagactgggcgagctgaccgtgaccgacgccacccccgacagcctgagcctgagctggaccgtgcccgagggccagttcgaccacttcctggtgcagtacagaaacggcgacggccagcccaaggccgtgagagtgcccggccacgaggagggcgtgaccatcagcggcctggagcccgaccacaagtacaagatgaacctgtacggcttccacggcggccagagaatgggccccgtgagcgtggtgggcgtgaccgccgccgaggaggagacccccagccccaccgagcccagcatggaggcccccgagcccgccgaggagcccctgctgggcgagctgaccgtgaccggcagcagccccgacagcctgagcctgagctggaccgtgccccagggcagattcgacagcttcaccgtgcagtacaaggacagagacggcagaccccaggtggtgagagtgggcggcgaggagagcgaggtgaccgtgggcggcctggagcccggcagaaagtacaagatgcacctgtacggcctgcacgagggcagaagagtgggccccgtgagcgccgtgggcgtgaccgcccccgaggaggagagccccgacgcccccctggccaagctgagactgggccagatgaccgtgagagacatcaccagcgacagcctgagcctgagctggaccgtgcccgagggccagttcgaccacttcctggtgcagttcaagaacggcgacggccagcccaaggccgtgagagtgcccggccacgaggacggcgtgaccatcagcggcctggagcccgaccacaagtacaagatgaacctgtacggcttccacggcggccagagagtgggccccgtgagcgccgtgggcctgaccgcccccggcaaggacgaggagatggcccccgccagcaccgagccccccacccccgagccccccatcaagcccagactggaggagctgaccgtgaccgacgccacccccgacagcctgagcctgagctggaccgtgcccgagggccagttcgaccacttcctggtgcagtacaagaacggcgacggccagcccaaggccaccagagtgcccggccacgaggacagagtgaccatcagcggcctggagcccgacaacaagtacaagatgaacctgtacggcttccacggcggccagagagtgggccccgtgagcgccatcggcgtgaccgccgccgaggaggagacccccagccccaccgagcccagcatggaggcccccgagccccccgaggagcccctgctgggcgagctgaccgtgaccggcagcagccccgacagcctgagcctgagctggaccgtgccccagggcagattcgacagcttcaccgtgcagtacaaggacagagacggcagaccccaggtggtgagagtgggcggcgaggagagcgaggtgaccgtgggcggcctggagcccggcagaaagtacaagatgcacctgtacggcctgcacgagggcagaagagtgggccccgtgagcaccgtgggcgtgaccgccccccaggaggacgtggacgagacccccagccccaccgagcccggcaccgaggcccccggcccccccgaggagcccctgctgggcgagctgaccgtgaccggcagcagccccgacagcctgagcctgagctggaccgtgccccagggcagattcgacagcttcaccgtgcagtacaaggacagagacggcagaccccaggccgtgagagtgggcggccaggagagcaaggtgaccgtgagaggcctggagcccggcagaaagtacaagatgcacctgtacggcctgcacgagggcagaagactgggccccgtgagcgccgtgggcgtgaccgaggacgaggccgagaccacccaggccgtgcccaccatgacccccgagccccccatcaagcccagactgggcgagctgaccatgaccgacgccacccccgacagcctgagcctgagctggaccgtgcccgagggccagttcgaccacttcctggtgcagtacagaaacggcgacggccagcccaaggccgtgagagtgcccggccacgaggacggcgtgaccatcagcggcctggagcccgaccacaagtacaagatgaacctgtacggcttccacggcggccagagagtgggccccatcagcgtgatcggcgtgaccgccgccgaggaggagacccccagccccaccgagctgagcaccgaggcccccgagccccccgaggagcccctgctgggcgagctgaccgtgaccggcagcagccccgacagcctgagcctgagctggaccatcccccagggccacttcgacagcttcaccgtgcagtacaaggacagagacggcagaccccaggtgatgagagtgagaggcgaggagagcgaggtgaccgtgggcggcctggagcccggcagaaagtacaagatgcacctgtacggcctgcacgagggcagaagagtgggccccgtgagcaccgtgggcgtgaccgcccccgaggacgaggccgagaccacccaggccgtgcccaccaccacccccgagccccccaacaagcccagactgggcgagctgaccgtgaccgacgccacccccgacagcctgagcctgagctggatggtgcccgagggccagttcgaccacttcctggtgcagtacagaaacggcgacggccagcccaaggtggtgagagtgcccggccacgaggacggcgtgaccatcagcggcctggagcccgaccacaagtacaagatgaacctgtacggcttccacggcggccagagagtgggccccatcagcgtgatcggcgtgaccgccgccgaggaggagacccccgcccccaccgagcccagcaccgaggcccccgagccccccgaggagcccctgctgggcgagctgaccgtgaccggcagcagccccgacagcctgagcctgagctggaccatcccccagggcagattcgacagcttcaccgtgcagtacaaggacagagacggcagaccccaggtggtgagagtgagaggcgaggagagcgaggtgaccgtgggcggcctggagcccggctgcaagtacaagatgcacctgtacggcctgcacgagggccagagagtgggccccgtgagcgccgtgggcgtgaccgcccccaaggacgaggccgagaccacccaggccgtgcccaccatgacccccgagccccccatcaagcccagactgggcgagctgaccgtgaccgacgccacccccgacagcctgagcctgagctggatggtgcccgagggccagttcgaccacttcctggtgcagtacagaaacggcgacggccagcccaaggccgtgagagtgcccggccacgaggacggcgtgaccatcagcggcctggagcccgaccacaagtacaagatgaacctgtacggcttccacggcggccagagagtgggccccgtgagcgccatcggcgtgaccgaggaggagacccccagccccaccgagcccagcaccgaggcccccgaggcccccgaggagcccctgctgggcgagctgaccgtgaccggcagcagccccgacagcctgagcctgagctggaccgtgccccagggcagattcgacagcttcaccgtgcagtacaaggacagagacggccagccccaggtggtgagagtgagaggcgaggagagcgaggtgaccgtgggcggcctggagcccggcagaaagtacaagatgcacctgtacggcctgcacgagggccagagagtgggccccgtgagcaccgtgggcatcaccgcccccctgcccacccccctgcccgtggagcccagactgggcgagctggccgtggccgccgtgaccagcgacagcgtgggcctgagctggaccgtggcccagggccccttcgacagcttcctggtgcagtacagagacgcccagggccagccccaggccgtgcccgtgagcggcgacctgagagccgtggccgtgagcggcctggaccccgccagaaagtacaagttcctgctgttcggcctgcagaacggcaagagacacggccccgtgcccgtggaggccagaaccgcccccgacaccaagcccagccccagactgggcgagctgaccgtgaccgacgccacccccgacagcgtgggcctgagctggaccgtgcccgagggcgagttcgacagcttcgtggtgcagtacaaggacaaggacggcagactgcaggtggtgcccgtggccgccaaccagagagaggtgaccgtgcagggcctggagcccagcagaaagtacagattcctgctgtacggcctgagcggcagaaagagactgggccccatcagcgccgacagcaccaccgcccccctggagaaggagctgcccccccacctgggcgagctgaccgtggccgaggagaccagcagcagcctgagactgagctggaccgtggcccagggccccttcgacagcttcgtggtgcagtacagagacaccgacggccagcccagagccgtgcccgtggccgccgaccagagaaccgtgaccgtggaggacctggagcccggcaagaagtacaagttcctgctgtacggcctgctgggcggcaagagactgggccccgtgagcgccctgggcatgaccgcccccgaggaggacacccccgcccccgagctggcccccgaggcccccgagccccccgaggagcccagactgggcgtgctgaccgtgaccgacaccacccccgacagcatgagactgagctggagcgtggcccagggccccttcgacagcttcgtggtgcagtacgaggacaccaacggccagccccaggccctgctggtggacggcgaccagagcaagatcctgatcagcggcctggagcccagcaccccctacagattcctgctgtacggcctgcacgagggcaagagactgggccccctgagcgccgagggcaccaccggcctggcccccgccggccagaccagcgaggagagcagacccagactgagccagctgagcgtgaccgacgtgaccaccagcagcctgagactgaactgggaggccccccccggcgccttcgacagcttcctgctgagattcggcgtgcccagccccagcaccctggagccccaccccagacccctgctgcagagagagctgatggtgcccggcaccagacacagcgccgtgctgagagacctgagaagcggcaccctgtacagcctgaccctgtacggcctgagaggcccccacaaggccgacagcatccagggcaccgccagaaccctgagccccgtgctggagagccccagagacctgcagttcagcgagatcagagagaccagcgccaaggtgaactggatgcccccccccagcagagccgacagcttcaaggtgagctaccagctggccgacggcggcgagccccagagcgtgcaggtggacggccaggccagaacccagaagctgcagggcctgatccccggcgccagatacgaggtgaccgtggtgagcgtgagaggcttcgaggagagcgagcccctgaccggcttcctgaccaccgtgcccgacggccccacccagctgagagccctgaacctgaccgagggcttcgccgtgctgcactggaagcccccccagaaccccgtggacacctacgacgtgcaggtgaccgcccccggcgccccccccctgcaggccgagacccccggcagcgccgtggactaccccctgcacgacctggtgctgcacaccaactacaccgccaccgtgagaggcctgagaggccccaacctgaccagccccgccagcatcaccttcaccaccggcctggaggcccccagagacctggaggccaaggaggtgacccccagaaccgccctgctgacctggaccgagccccccgtgagacccgccggctacctgctgagcttccacacccccggcggccagaaccaggagatcctgctgcccggcggcatcaccagccaccagctgctgggcctgttccccagcaccagctacaacgccagactgcaggccatgtggggccagagcctgctgccccccgtgagcaccagcttcaccaccggcggcctgagaatccccttccccagagactgcggcgaggagatgcagaacggcgccggcgccagcagaaccagcaccatcttcctgaacggcaacagagagagacccctgaacgtgttctgcgacatggagaccgacggcggcggctggctggtgttccagagaagaatggacggccagaccgacttctggagagactgggaggactacgcccacggcttcggcaacatcagcggcgagttctggctgggcaacgaggccctgcacagcctgacccaggccggcgactacagcatgagagtggacctgagagccggcgacgaggccgtgttcgcccagtacgacagcttccacgtggacagcgccgccgagtactacagactgcacctggagggctaccacggcaccgccggcgacagcatgagctaccacagcggcagcgtgttcagcgccagagacagagaccccaacagcctgctgatcagctgcgccgtgagctacagaggcgcctggtggtacagaaactgccactacgccaacctgaacggcctgtacggcagcaccgtggaccaccagggcgtgagctggtaccactggaagggcttcgagttcagcgtgcccttcaccgagatgaagctgagacccagaaacttcagaagccccgccggcggcggctag

SEQ ID NO: 201452 - DNA, 12729 bp, Artificial Sequence
  derived and/or modified sequence
atgatgcccgcccagtacgccctgaccagcagcctggtgctgctggtgctgctgagcaccgccagagccggccccttcagcagcagaagcaacgtgaccctgcccgcccccagaccccccccccagcccggcggccacaccgtgggcgccggcgtgggcagccccagcagccagctgtacgagcacaccgtggagggcggcgagaagcaggtggtgttcacccacagaatcaacctgccccccagcaccggctgcggctgcccccccggcaccgagccccccgtgctggccagcgaggtgcaggccctgagagtgagactggagatcctggaggagctggtgaagggcctgaaggagcagtgcaccggcggctgctgccccgccagcgcccaggccggcaccggccagaccgacgtgagaaccctgtgcagcctgcacggcgtgttcgacctgagcagatgcacctgcagctgcgagcccggctggggcggccccacctgcagcgaccccaccgacgccgagatcccccccagcagcccccccagcgccagcggcagctgccccgacgactgcaacgaccagggcagatgcgtgagaggcagatgcgtgtgcttccccggctacaccggccccagctgcggctggcccagctgccccggcgactgccagggcagaggcagatgcgtgcagggcgtgtgcgtgtgcagagccggcttcagcggccccgactgcagccagagaagctgccccagaggctgcagccagagaggcagatgcgagggcggcagatgcgtgtgcgaccccggctacaccggcgacgactgcggcatgagaagctgccccagaggctgcagccagagaggcagatgcgagaacggcagatgcgtgtgcaaccccggctacaccggcgaggactgcggcgtgagaagctgccccagaggctgcagccagagaggcagatgcaaggacggcagatgcgtgtgcgaccccggctacaccggcgaggactgcggcaccagaagctgcccctgggactgcggcgagggcggcagatgcgtggacggcagatgcgtgtgctggcccggctacaccggcgaggactgcagcaccagaacctgccccagagactgcagaggcagaggcagatgcgaggacggcgagtgcatctgcgacaccggctacagcggcgacgactgcggcgtgagaagctgccccggcgactgcaaccagagaggcagatgcgaggacggcagatgcgtgtgctggcccggctacaccggcaccgactgcggcagcagagcctgccccagagactgcagaggcagaggcagatgcgagaacggcgtgtgcgtgtgcaacgccggctacagcggcgaggactgcggcgtgagaagctgccccggcgactgcagaggcagaggcagatgcgagagcggcagatgcatgtgctggcccggctacaccggcagagactgcggcaccagagcctgccccggcgactgcagaggcagaggcagatgcgtggacggcagatgcgtgtgcaaccccggcttcaccggcgaggactgcggcagcagaagatgccccggcgactgcagaggccacggcctgtgcgaggacggcgtgtgcgtgtgcgacgccggctacagcggcgaggactgcagcaccagaagctgccccggcggctgcagaggcagaggccagtgcctggacggcagatgcgtgtgcgaggacggctacagcggcgaggactgcggcgtgagacagtgccccaacgactgcagccagcacggcgtgtgccaggacggcgtgtgcatctgctgggagggctacgtgagcgaggactgcagcatcagaacctgccccagcaactgccacggcagaggcagatgcgaggagggcagatgcctgtgcgaccccggctacaccggccccacctgcgccaccagaatgtgccccgccgactgcagaggcagaggcagatgcgtgcagggcgtgtgcctgtgccacgtgggctacggcggcgaggactgcggccaggaggagccccccgccagcgcctgccccggcggctgcggccccagagagctgtgcagagccggccagtgcgtgtgcgtggagggcttcagaggccccgactgcgccatccagacctgccccggcgactgcagaggcagaggcgagtgccacgacggcagctgcgtgtgcaaggacggctacgccggcgaggactgcggcgaggaggtgcccaccatcgagggcatgagaatgcacctgctggaggagaccaccgtgagaaccgagtggacccccgcccccggccccgtggacgcctacgagatccagttcatccccaccaccgagggcgccagcccccccttcaccgccagagtgcccagcagcgccagcgcctacgaccagagaggcctggcccccggccaggagtaccaggtgaccgtgagagccctgagaggcaccagctggggcctgcccgccagcaagaccatcaccaccatgatcgacggcccccaggacctgagagtggtggccgtgacccccaccaccctggagctgggctggctgagaccccaggccgaggtggacagattcgtggtgagctacgtgagcgccggcaaccagagagtgagactggaggtgccccccgaggccgacggcaccctgctgaccgacctgatgcccggcgtggagtacgtggtgaccgtgaccgccgagagaggcagagccgtgagctaccccgccagcgtgagagccaacaccggcagcagccccctgggcctgctgggcaccaccgacgagcccccccccagcggccccagcaccacccagggcgcccaggcccccctgctgcagcagagaccccaggagctgggcgagctgagagtgctgggcagagacgagaccggcagactgagagtggtgtggaccgcccagcccgacaccttcgcctacttccagctgagaatgagagtgcccgagggccccggcgcccacgaggaggtgctgcccggcgacgtgagacaggccctggtgcccccccccccccccggcaccccctacgagctgagcctgcacggcgtgccccccggcggcaagcccagcgaccccatcatctaccagggcatcatggacaaggacgaggagaagcccggcaagagcagcggcccccccagactgggcgagctgaccgtgaccgacagaaccagcgacagcctgctgctgagatggaccgtgcccgagggcgagttcgacagcttcgtgatccagtacaaggacagagacggccagccccaggtggtgcccgtggagggcccccagagaagcgccgtgatcaccagcctggaccccggcagaaagtacaagttcgtgctgtacggcttcgtgggcaagaagagacacggccccctggtggccgaggccaagatcctgccccagagcgaccccagccccggcacccccccccacctgggcaacctgtgggtgaccgaccccacccccgacagcctgcacctgagctggaccgtgcccgagggccagttcgacaccttcatggtgcagtacagagacagagacggcagaccccaggtggtgcccgtggagggccccgagagaagcttcgtggtgagcagcctggaccccgaccacaagtacagattcaccctgttcggcatcgccaacaagaagagatacggccccctgaccgccgacggcaccaccgcccccgagagaaaggaggagccccccagacccgagttcctggagcagcccctgctgggcgagctgaccgtgaccggcgtgacccccgacagcctgagactgagctggaccgtggcccagggccccttcgacagcttcatggtgcagtacaaggacgcccagggccagccccaggccgtgcccgtggccggcgacgagaacgaggtgaccgtgcccggcctggaccccgacagaaagtacaagatgaacctgtacggcctgagaggcagacagagagtgggccccgagagcgtggtggccaagaccgccccccaggaggacgtggacgagacccccagccccaccgagctgggcaccgaggcccccgagagccccgaggagcccctgctgggcgagctgaccgtgaccggcagcagccccgacagcctgagcctgttctggaccgtgccccagggcagcttcgacagcttcaccgtgcagtacaaggacagagacggcagacccagagccgtgagagtgggcggcaaggagagcgaggtgaccgtgggcggcctggagcccggccacaagtacaagatgcacctgtacggcctgcacgagggccagagagtgggccccgtgagcgccgtgggcgtgaccgccccccagcaggaggagaccccccccgccaccgagagccccctggagcccagactgggcgagctgaccgtgaccgacgtgacccccaacagcgtgggcctgagctggaccgtgcccgagggccagttcgacagcttcatcgtgcagtacaaggacaaggacggccagccccaggtggtgcccgtggccgccgaccagagagaggtgaccgtgtacaacctggagcccgagagaaagtacaagatgaacatgtacggcctgcacgacggccagagaatgggccccctgagcgtggtgatcgtgaccgcccccctgccccccgcccccgccaccgaggccagcaagccccccctggagcccagactgggcgagctgaccgtgaccgacatcacccccgacagcgtgggcctgagctggaccgtgcccgagggcgagttcgacagcttcgtggtgcagtacaaggacagagacggccagccccaggtggtgcccgtggccgccgaccagagagaggtgaccatccccgacctggagcccagcagaaagtacaagttcctgctgttcggcatccaggacggcaagagaagaagccccgtgagcgtggaggccaagaccgtggccagaggcgacgccagccccggcgccccccccagactgggcgagctgtgggtgaccgaccccacccccgacagcctgagactgagctggaccgtgcccgagggccagttcgacagcttcgtggtgcagttcaaggacaaggacggcccccaggtggtgcccgtggagggccacgagagaagcgtgaccgtgacccccctggacgccggcagaaagtacagattcctgctgtacggcctgctgggcaagaagagacacggccccctgaccgccgacggcaccaccgaggccagaagcgccatggacgacaccggcaccaagagaccccccaagcccagactgggcgaggagctgcaggtgaccaccgtgacccagaacagcgtgggcctgagctggaccgtgcccgagggccagttcgacagcttcgtggtgcagtacaaggacagagacggccagccccaggtggtgcccgtggagggcagcctgagagaggtgagcgtgcccggcctggaccccgcccacagatacaagctgctgctgtacggcctgcaccacggcaagagagtgggccccatcagcgccgtggccatcaccgccggcagagaggagaccgagaccgagaccaccgcccccaccccccccgcccccgagccccacctgggcgagctgaccgtggaggaggccaccagccacaccctgcacctgagctggatggtgaccgagggcgagttcgacagcttcgagatccagtacaccgacagagacggccagctgcagatggtgagaatcggcggcgacagaaacgacatcaccctgagcggcctggagagcgaccacagatacctggtgaccctgtacggcttcagcgacggcaagcacgtgggccccgtgcacgtggaggccctgaccgtgcccgaggaggagaagcccagcgagccccccaccgccacccccgagccccccatcaagcccagactgggcgagctgaccgtgaccgacgccacccccgacagcctgagcctgagctggaccgtgcccgagggccagttcgaccacttcctggtgcagtacagaaacggcgacggccagcccaaggccgtgagagtgcccggccacgaggagggcgtgaccatcagcggcctggagcccgaccacaagtacaagatgaacctgtacggcttccacggcggccagagaatgggccccgtgagcgtggtgggcgtgaccgccgccgaggaggagacccccagccccaccgagcccagcatggaggcccccgagcccgccgaggagcccctgctgggcgagctgaccgtgaccggcagcagccccgacagcctgagcctgagctggaccgtgccccagggcagattcgacagcttcaccgtgcagtacaaggacagagacggcagaccccaggtggtgagagtgggcggcgaggagagcgaggtgaccgtgggcggcctggagcccggcagaaagtacaagatgcacctgtacggcctgcacgagggcagaagagtgggccccgtgagcgccgtgggcgtgaccgcccccgaggaggagagccccgacgcccccctggccaagctgagactgggccagatgaccgtgagagacatcaccagcgacagcctgagcctgagctggaccgtgcccgagggccagttcgaccacttcctggtgcagttcaagaacggcgacggccagcccaaggccgtgagagtgcccggccacgaggacggcgtgaccatcagcggcctggagcccgaccacaagtacaagatgaacctgtacggcttccacggcggccagagagtgggccccgtgagcgccgtgggcctgaccgcccccggcaaggacgaggagatggcccccgccagcaccgagccccccacccccgagccccccatcaagcccagactggaggagctgaccgtgaccgacgccacccccgacagcctgagcctgagctggaccgtgcccgagggccagttcgaccacttcctggtgcagtacaagaacggcgacggccagcccaaggccaccagagtgcccggccacgaggacagagtgaccatcagcggcctggagcccgacaacaagtacaagatgaacctgtacggcttccacggcggccagagagtgggccccgtgagcgccatcggcgtgaccgccgccgaggaggagacccccagccccaccgagcccagcatggaggcccccgagccccccgaggagcccctgctgggcgagctgaccgtgaccggcagcagccccgacagcctgagcctgagctggaccgtgccccagggcagattcgacagcttcaccgtgcagtacaaggacagagacggcagaccccaggtggtgagagtgggcggcgaggagagcgaggtgaccgtgggcggcctggagcccggcagaaagtacaagatgcacctgtacggcctgcacgagggcagaagagtgggccccgtgagcaccgtgggcgtgaccgccccccaggaggacgtggacgagacccccagccccaccgagcccggcaccgaggcccccggcccccccgaggagcccctgctgggcgagctgaccgtgaccggcagcagccccgacagcctgagcctgagctggaccgtgccccagggcagattcgacagcttcaccgtgcagtacaaggacagagacggcagaccccaggccgtgagagtgggcggccaggagagcaaggtgaccgtgagaggcctggagcccggcagaaagtacaagatgcacctgtacggcctgcacgagggcagaagactgggccccgtgagcgccgtgggcgtgaccgaggacgaggccgagaccacccaggccgtgcccaccatgacccccgagccccccatcaagcccagactgggcgagctgaccatgaccgacgccacccccgacagcctgagcctgagctggaccgtgcccgagggccagttcgaccacttcctggtgcagtacagaaacggcgacggccagcccaaggccgtgagagtgcccggccacgaggacggcgtgaccatcagcggcctggagcccgaccacaagtacaagatgaacctgtacggcttccacggcggccagagagtgggccccatcagcgtgatcggcgtgaccgccgccgaggaggagacccccagccccaccgagctgagcaccgaggcccccgagccccccgaggagcccctgctgggcgagctgaccgtgaccggcagcagccccgacagcctgagcctgagctggaccatcccccagggccacttcgacagcttcaccgtgcagtacaaggacagagacggcagaccccaggtgatgagagtgagaggcgaggagagcgaggtgaccgtgggcggcctggagcccggcagaaagtacaagatgcacctgtacggcctgcacgagggcagaagagtgggccccgtgagcaccgtgggcgtgaccgaggacgaggccgagaccacccaggccgtgcccaccaccacccccgagccccccaacaagcccagactgggcgagctgaccgtgaccgacgccacccccgacagcctgagcctgagctggatggtgcccgagggccagttcgaccacttcctggtgcagtacagaaacggcgacggccagcccaaggtggtgagagtgcccggccacgaggacggcgtgaccatcagcggcctggagcccgaccacaagtacaagatgaacctgtacggcttccacggcggccagagagtgggccccatcagcgtgatcggcgtgaccgccgccgaggaggagacccccgcccccaccgagcccagcaccgaggcccccgagccccccgaggagcccctgctgggcgagctgaccgtgaccggcagcagccccgacagcctgagcctgagctggaccatcccccagggcagattcgacagcttcaccgtgcagtacaaggacagagacggcagaccccaggtggtgagagtgagaggcgaggagagcgaggtgaccgtgggcggcctggagcccggctgcaagtacaagatgcacctgtacggcctgcacgagggccagagagtgggccccgtgagcgccgtgggcgtgaccgcccccaaggacgaggccgagaccacccaggccgtgcccaccatgacccccgagccccccatcaagcccagactgggcgagctgaccgtgaccgacgccacccccgacagcctgagcctgagctggatggtgcccgagggccagttcgaccacttcctggtgcagtacagaaacggcgacggccagcccaaggccgtgagagtgcccggccacgaggacggcgtgaccatcagcggcctggagcccgaccacaagtacaagatgaacctgtacggcttccacggcggccagagagtgggccccgtgagcgccatcggcgtgaccgaggaggagacccccagccccaccgagcccagcaccgaggcccccgaggcccccgaggagcccctgctgggcgagctgaccgtgaccggcagcagccccgacagcctgagcctgagctggaccgtgccccagggcagattcgacagcttcaccgtgcagtacaaggacagagacggccagccccaggtggtgagagtgagaggcgaggagagcgaggtgaccgtgggcggcctggagcccggcagaaagtacaagatgcacctgtacggcctgcacgagggccagagagtgggccccgtgagcaccgtgggcatcaccgcccccctgcccacccccctgcccgtggagcccagactgggcgagctggccgtggccgccgtgaccagcgacagcgtgggcctgagctggaccgtggcccagggccccttcgacagcttcctggtgcagtacagagacgcccagggccagccccaggccgtgcccgtgagcggcgacctgagagccgtggccgtgagcggcctggaccccgccagaaagtacaagttcctgctgttcggcctgcagaacggcaagagacacggccccgtgcccgtggaggccagaaccgcccccgacaccaagcccagccccagactgggcgagctgaccgtgaccgacgccacccccgacagcgtgggcctgagctggaccgtgcccgagggcgagttcgacagcttcgtggtgcagtacaaggacaaggacggcagactgcaggtggtgcccgtggccgccaaccagagagaggtgaccgtgcagggcctggagcccagcagaaagtacagattcctgctgtacggcctgagcggcagaaagagactgggccccatcagcgccgacagcaccaccgcccccctggagaaggagctgcccccccacctgggcgagctgaccgtggccgaggagaccagcagcagcctgagactgagctggaccgtggcccagggccccttcgacagcttcgtggtgcagtacagagacaccgacggccagcccagagccgtgcccgtggccgccgaccagagaaccgtgaccgtggaggacctggagcccggcaagaagtacaagttcctgctgtacggcctgctgggcggcaagagactgggccccgtgagcgccctgggcatgaccgcccccgaggaggacacccccgcccccgagctggcccccgaggcccccgagccccccgaggagcccagactgggcgtgctgaccgtgaccgacaccacccccgacagcatgagactgagctggagcgtggcccagggccccttcgacagcttcgtggtgcagtacgaggacaccaacggccagccccaggccctgctggtggacggcgaccagagcaagatcctgatcagcggcctggagcccagcaccccctacagattcctgctgtacggcctgcacgagggcaagagactgggccccctgagcgccgagggcaccaccggcctggcccccgccggccagaccagcgaggagagcagacccagactgagccagctgagcgtgaccgacgtgaccaccagcagcctgagactgaactgggaggccccccccggcgccttcgacagcttcctgctgagattcggcgtgcccagccccagcaccctggagccccaccccagacccctgctgcagagagagctgatggtgcccggcaccagacacagcgccgtgctgagagacctgagaagcggcaccctgtacagcctgaccctgtacggcctgagaggcccccacaaggccgacagcatccagggcaccgccagaaccctgagccccgtgctggagagccccagagacctgcagttcagcgagatcagagagaccagcgccaaggtgaactggatgcccccccccagcagagccgacagcttcaaggtgagctaccagctggccgacggcggcgagccccagagcgtgcaggtggacggccaggccagaacccagaagctgcagggcctgatccccggcgccagatacgaggtgaccgtggtgagcgtgagaggcttcgaggagagcgagcccctgaccggcttcctgaccaccgtgcccgacggccccacccagctgagagccctgaacctgaccgagggcttcgccgtgctgcactggaagcccccccagaaccccgtggacacctacgacgtgcaggtgaccgcccccggcgccccccccctgcaggccgagacccccggcagcgccgtggactaccccctgcacgacctggtgctgcacaccaactacaccgccaccgtgagaggcctgagaggccccaacctgaccagccccgccagcatcaccttcaccaccggcctggaggcccccagagacctggaggccaaggaggtgacccccagaaccgccctgctgacctggaccgagccccccgtgagacccgccggctacctgctgagcttccacacccccggcggccagaaccaggagatcctgctgcccggcggcatcaccagccaccagctgctgggcctgttccccagcaccagctacaacgccagactgcaggccatgtggggccagagcctgctgccccccgtgagcaccagcttcaccaccggcggcctgagaatccccttccccagagactgcggcgaggagatgcagaacggcgccggcgccagcagaaccagcaccatcttcctgaacggcaacagagagagacccctgaacgtgttctgcgacatggagaccgacggcggcggctggctggtgttccagagaagaatggacggccagaccgacttctggagagactgggaggactacgcccacggcttcggcaacatcagcggcgagttctggctgggcaacgaggccctgcacagcctgacccaggccggcgactacagcatgagagtggacctgagagccggcgacgaggccgtgttcgcccagtacgacagcttccacgtggacagcgccgccgagtactacagactgcacctggagggctaccacggcaccgccggcgacagcatgagctaccacagcggcagcgtgttcagcgccagagacagagaccccaacagcctgctgatcagctgcgccgtgagctacagaggcgcctggtggtacagaaactgccactacgccaacctgaacggcctgtacggcagcaccgtggaccaccagggcgtgagctggtaccactggaagggcttcgagttcagcgtgcccttcaccgagatgaagctgagacccagaaacttcagaagccccgccggcggcggctag

SEQ ID NO: 201453 - DNA, 12735 bp, Artificial Sequence
  derived and/or modified sequence
atgatgcctgcccagtatgcactcacttccagtctggtgctattagttttgctcagtactgctagggccggtccattctccagccggtctaacgtaaccctaccggctcccagaccccccccccagccgggaggacacaccgtgggcgccggcgtggggtcccctagctcacagctatacgaacacacggtagaaggtggtgagaagcaggtcgttttcactcacaggatcaacttgccgccaagcacaggatgtggctgtccccctggaacagagcctcctgtgctggcctctgaggtacaggcactccgggtgcgtctcgaaatcttagaggaacttgtgaaagggctgaaagagcagtgcaccggaggttgctgtccggcatcagcccaggctggtaccggacagaccgacgtgaggacactgtgcagcctccatggggttttcgatctctctaggtgcacctgcagttgcgaaccaggatggggcggtcccacttgcagcgaccctacagatgcggagatacctccctcctcccctcctagcgcaagcgggagttgtcccgacgactgcaacgaccagggacgatgtgtgcgcggaagatgcgtgtgttttcctgggtacactggtccttcttgtgggtggcccagttgccctggcgattgccagggaagaggtagatgcgtgcagggtgtttgcgtttgcagagccggcttcagcggcccagactgcagccagcgaagttgccctaggggctgctcacagaggggccgctgcgagggtgggagatgtgtctgcgacccggggtacacaggcgacgattgcggcatgcggtcttgtccacgagggtgctctcagcgaggacgctgtgagaacggccgctgcgtctgcaacccaggttatacaggggaggactgtggcgtgcgtagttgcccacgtggttgctctcagcgtggcagatgtaaggacgggcgatgtgtatgtgaccctggctatactggagaggattgcgggactcgttcatgcccttgggattgtggcgaaggcgggcgctgcgtggacggtcgatgtgtctgttggcccggatacactggggaggactgctccacaagaacctgtcctcgggattgtcgtggtagaggcaggtgtgaggatggtgaatgtatttgcgataccggatatagcggtgatgactgtggggtccgaagctgccccggcgattgcaaccagcgcgggcgctgcgaggacggaagatgcgtgtgttggcccggctataccggtactgattgtggcagcagggcttgcccccgggattgtagagggcgcgggagatgtgagaacggagtttgcgtctgtaatgccggatactcaggagaggactgcggggttcgatcgtgtcctggcgactgcaggggaaggggcaggtgtgaaagtgggagatgtatgtgttggcccggttacaccggacgtgactgtggcacacgcgcttgtcctggcgattgtagagggcggggtcgctgtgttgacggtcgctgcgtgtgcaatcctggcttcacgggggaggactgcgggtctcgtagatgtcctggggattgtcgcggacacggcctctgcgaggacggggtttgcgtatgcgatgccggctactcaggcgaagactgttcgacgagaagttgcccaggcggctgccgcggcaggggccagtgtctggacgggcgctgcgtttgtgaggacgggtactctggggaagactgcggggtacggcagtgcccgaatgactgtagtcagcacggcgtatgccaggacggcgtgtgcatttgctgggagggatacgtctcagaggactgttcaattagaacgtgcccatccaattgccacggtaggggaagatgcgaggaaggacgctgcctgtgtgaccctggttatactggcccaacgtgcgccacgcgcatgtgcccagcagactgcagggggaggggacgctgtgtccagggggtatgtctttgtcacgtggggtatggtggtgaagactgcggccaagaggagcctcccgcatccgcctgccccggcgggtgcggacctagagagctgtgccgggcaggtcaatgcgtgtgtgttgagggtttccgcggaccggattgtgctatccagacttgtccaggagattgccgggggcgtggcgaatgtcacgacggatcatgcgtgtgcaaggatgggtatgccggggaagattgtggtgaagaagtgccaaccatagaagggatgagaatgcacctgctcgaggaaacaactgtgcgcaccgaatggacgccggccccgggacccgtggatgcgtacgagattcagtttatacccacaactgaaggggcttcacctccatttaccgcacgagtgccaagttcagcttctgcctacgatcagcgggggttggccccaggacaggaataccaagttactgtcagagccctgcgcggcacttcctggggactcccagcctccaagacaattacgaccatgatcgatggccctcaggacttgcgagtcgtagctgtgacacctacgacactggaactgggctggctgagacctcaggctgaggtcgacagattcgttgtgtcctacgtgagcgcaggtaaccaacgggtcaggctggaggttccgccagaagccgatggaaccctgcttaccgatctgatgcctggcgtcgagtatgtggtgacagtgaccgccgagcgtggaagagctgtgagctaccccgcgtcggtgcgggccaacaccgggtcatcgcctctcggcctgcttggcactacggacgagcctcctccctccggacctagtactacccagggtgcccaggcgccactcctgcagcagaggccccaggagcttggcgagctgcgcgttctcggcagggacgagaccggacgcctgcgggtggtgtggaccgcccagcctgacacattcgcttactttcagctacggatgagggtgcccgaggggccaggcgcacatgaggaggtcctgccgggggatgtccggcaggctttagtgcccccacccccaccagggacaccttatgaactgtccctgcacggcgtgccaccagggggtaagccatccgatccgattatctatcaggggatcatggataaggacgaggaaaaacctggcaaatcctccggaccaccccgattaggcgaactgacagtgacagaccgaacatcagattcacttttactcaggtggacagtaccggaaggggagtttgactcgtttgtgattcagtacaaggaccgggatggccagcctcaggtagtacccgttgagggaccacagcgatctgctgtgatcacttcattagacccaggccggaagtataagttcgtgctttacggctttgtagggaaaaagagacatggccctctcgtagccgaagccaaaatcctgccacagagtgatccttctcctggaacgccccctcatctgggtaacctttgggtgactgaccccacccccgattctcttcacctctcctggactgttcccgaaggacaattcgatacattcatggtacagtatagggatagagatgggagaccccaggttgtcccagtggaggggcccgaaagatcattcgtggtcagctccctggaccctgatcacaaatacaggttcaccctgttcggcatcgcaaataagaaacgatacggtcctttgaccgccgacgggacgaccgccccggaaaggaaggaagaacctccaaggcccgagttcctagaacaacctctactcggagagctcacagtaactggtgtgacccccgatagcctcaggctctcctggaccgtcgctcaggggccttttgacagctttatggtacagtacaaggacgcccagggccaaccccaggccgtcccggttgctggagacgagaacgaagtgactgtcccgggcctcgaccccgacagaaagtacaaaatgaacttatatgggctacgtggtcgccagagggtgggccccgagagtgtggtggccaagaccgccccccaggaggatgtggacgaaaccccctctcccacggaactcggaactgaggcacctgagtcgccagaggaacctctgctgggcgagttgacagtcaccggcagctctccagacagtctttctctcttttggaccgtgccccagggaagcttcgacagctttaccgtacagtacaaggatagagacgggaggcccagggccgtgagggtggggggaaaggagtccgaagtgactgttggcggtctggaaccaggccataagtataagatgcacctgtacgggctgcatgagggtcagagggtggggcccgtgagcgccgtgggagtcactgcgccgcagcaagaggaaaccccgcccgccacagagagcccactcgaaccacgcttgggcgagctgacagtaacggacgtcacccctaactcagtcggactctcttggacggttcctgagggacagtttgacagttttatcgtgcaatataaagacaaagacgggcagcctcaggtggtgccagtggccgctgatcagagagaggtaaccgtgtacaacttagagcctgagcggaagtacaaaatgaatatgtatggcctgcatgatggccaacggatgggccccctgtcagttgtgatcgtgactgcccctttgccgcctgcgccagcaaccgaagcatcaaaaccccctctcgaaccccggctgggggagctgacagtcacagacataaccccagacagtgtcggcctctcctggaccgtgcccgaaggagagttcgattcctttgtggtacagtataaggatagggatggccaaccacaggtcgttcccgtggccgctgaccagcgtgaggtgacgatcccggacttggaaccatccaggaagtataagttcctgctttttggaattcaggatggaaaacgccgctcacccgtttctgtggaggctaaaacagttgccaggggcgatgcctcgcctggcgctccaccaaggctgggagagctgtgggtaaccgatcccaccccggatagcttgcggctaagctggacggttcccgaaggtcagttcgactcttttgtggtgcagttcaaggataaggacggtccccaggtggtaccggtggagggccacgagcggtctgtgacagtgacgccactcgatgccggaaggaaatatcgattcctgctgtacgggctgctgggtaagaagaggcatggccctctgactgcggatgggacaacagaggcccgatcagcgatggatgatactggaacaaaacgcccacctaagccccgtctcggggaggagcttcaggtgacaaccgttacccaaaatagtgtgggcctttcatggactgtgcctgagggccaatttgacagctttgtggtacagtataaagatagagacggccagccacaggttgtgccagtggaaggtagcctgagagaggtgagcgttccaggactggaccctgcacaccgttataagttgctgctctacgggctgcatcacggcaagagggtcggcccgatatctgcagtcgccatcaccgcgggccgagaggaaacagagaccgaaacaactgccccgacgccgccagcaccagagccgcatctgggcgagctaacagtcgaggaggccacatcgcacaccctccacctgtcttggatggtcactgaaggggagtttgactccttcgagatccaatacaccgaccgtgatggccagctgcagatggtgaggattgggggagaccgaaatgatatcaccctgtccggactggagtctgaccatcggtatctcgttaccctctatggcttcagcgacggcaagcatgtaggccccgttcatgtcgaggctcttacggttccggaagaggagaaaccatctgagcctccaaccgcaactccagaacctccaataaagcctcgcctgggtgaactaactgtcacggacgctacaccggattccctctcgctttcttggactgttccagagggacagtttgaccatttcttagtccagtaccgtaatggggatggtcagccaaaggcagttagagtcccagggcacgaagagggagtcactatctcgggcctggaaccggatcacaaatacaaaatgaatttgtatgggtttcatggggggcagagaatgggacctgtttcggtggttggggtaaccgcggctgaggaagagacgccctcccccaccgaaccatccatggaggcaccggagccggctgaggagcctcttctcggcgagctcaccgtcactggttcttcaccagattctctgtccctgagttggactgtaccccagggacggtttgacagcttcaccgttcaatataaggaccgggatggacgtcctcaggtcgtccgtgtaggcggcgaggaaagcgaggtcaccgtaggaggtttggaacccgggagaaagtacaaaatgcacctatatgggttacacgagggcagacgggttggccccgtgagcgctgtcggggtgacggcccctgaggaagagtccccagatgctccactggcgaaactcaggttggggcagatgacagtaagggatattacttccgattctttgtccctgagctggacagtgcctgagggccagttcgatcacttcctagttcagtttaagaatggagacggacagccaaaagccgtacgagtccctggccatgaagatggggttacaatttccggtctagaaccagaccacaaatacaagatgaacctttacggctttcatggcggccagcgggtcgggccagtgtctgctgtgggcttgactgctcccgggaaggatgaagagatggcgccagcctcgaccgagccccccaccccagagccacccattaagcctcgactggaagaacttactgtcaccgacgctacgccagacagtctcagcctgtcctggacggtgcccgagggacagtttgatcattttctcgttcagtacaaaaatggagacggacaaccaaaagccacccgggtgcccggacacgaagatagagtgacaatctcaggcctggagcccgataataagtacaagatgaatttatatggatttcatgggggccaacgggtggggcctgtgagtgctatcggcgtgacagccgccgaggaagagacccctagtccaaccgagccatctatggaggctcccgagcccccagaagagcccctcttgggcgagttaaccgtaactggcagcagtcccgactctcttagcctcagctggaccgtgccacaaggacgatttgactcatttacagtgcagtataaagacagagacggacgaccccaagtggtacgcgtgggcggggaggagtccgaagtcaccgtcggtggtttagagcccggccgcaagtataagatgcacctgtacggactgcacgagggacggcgggtagggcctgtatctacggtgggggtgactgctcctcaggaagacgtagacgagactccaagccccaccgagccagggaccgaggcccccgggccacccgaggagccactgctgggtgaactcaccgtgacaggtagtagtcccgacagcctgtcgttaagctggaccgtgcctcagggccgtttcgactcttttacggtacaatacaaggacagggacggtcgcccacaggccgttagggttggaggtcaggagtccaaggtgactgtgcggggattggagccggggcggaagtataagatgcacctgtatggtctgcacgaggggcgtcggctcggccccgtttcagccgtcggggttacagaggacgaagctgagactactcaggctgttcccactatgacacccgaaccccctattaagcccaggctgggagagctgaccatgacagatgccactcccgactcactgagcctgtcctggaccgtaccagaagggcagttcgatcactttctggtgcagtatcggaatggggacgggcagcctaaagctgtgcgtgtgcccgggcacgaagatggggtgacaatcagtgggctggaaccagaccacaagtataaaatgaacttatacgggttccatggaggacagagggtggggcccatttctgtgatcggcgttactgctgcggaggaggaaaccccctcacccacggaactgtccacagaagcccccgagccaccagaggagcccctgttgggggagctgacagtcactggctcttcccctgactctctatccctttcctggacaataccccagggtcactttgacagtttcactgtgcagtacaaggatagggacggccggccccaggttatgcgcgttaggggcgaggaaagcgaagttaccgttggcggcctggaacccggccgcaagtataaaatgcatctgtatgggctgcatgaggggcgacgcgtgggccctgtgtctacagtgggagtgacagcaccagaggacgaagcggaaactacccaagctgtgccaactaccacacctgaacctcccaacaaaccccgtttgggtgagttaacagttaccgacgctaccccggattccctcagtctaagttggatggtcccggagggccagtttgatcatttcctggtccaatacaggaacggggacgggcaacccaaggttgtgcgggtgccaggccatgaggacggggtcaccatctccggactagagccagatcataaatacaaaatgaacctttacggcttccatggggggcaaagagttggcccaatttccgtcattggagtcaccgccgccgaagaagagacccccgcccccacagagccaagtaccgaggcgcctgagcctccagaggaaccactcctgggggaattgaccgtgactgggagctcccctgactctctctctctgagctggaccattccccagggcagatttgattctttcaccgtacagtacaaagatcgcgatggcaggccccaggtggtgcgcgtgcggggagaagagtctgaggtaacagttggcggcctcgagccagggtgtaagtacaaaatgcatctatatggtctgcacgaaggacagcgggtcgggcccgtgtccgcagtgggcgttacagcgcccaaagatgaggccgagaccacacaggccgttccaactatgacacctgaaccccccatcaaacccagactgggtgagctcacagtaaccgatgctacacccgattctctgtccctctcctggatggtaccggaaggccaatttgatcacttcctggttcagtacaggaacggtgatggacagcctaaagcggtccgggtaccaggacacgaggatggcgtcaccatcagcggattagagcccgaccataagtataaaatgaatctatatggcttccatggcgggcagagggtggggccggttagtgcgatcggggtcactgaagaggaaaccccgagccccacggaaccctcaaccgaggctcctgaagcccctgaggagccactattgggcgaactgaccgttaccggttcaagtcccgattccctgagtcttagctggacggtgccgcagggacgcttcgactcctttacagtgcagtataaagacagagacgggcaaccacaggttgtcagagtgaggggtgaagagtccgaagtgacagtcggaggccttgagccaggacgcaagtacaaaatgcacctctacggactgcacgagggacaaagagtggggcccgtctcgacggtaggcattaccgcacccttgcccacccccctgcctgttgaacctcggctgggcgaactggctgttgctgctgtgacaagcgactctgtgggactttcctggaccgtggctcagggacctttcgacagcttcctggtgcaatatcgcgacgcgcaaggccagccgcaggccgtgcctgtctctggagatttgagggcggtcgcggtgagtgggctggacccagcaagaaagtacaagttcttactcttcggactgcaaaatggcaaacgacacggacccgtacccgtagaagctcggacagccccggacacaaaaccatcccctcgcctgggggaactcacagtcactgacgctacacctgactcggtgggcctatcttggacggtcccagagggagaattcgattcatttgtcgtccagtacaaggataaagacggccgcctgcaggtagtaccagtggctgctaatcagcgggaagtgaccgtccaaggccttgaaccatcgcggaagtatcggttcttgctgtatggcctgtctggacgcaaacgccttggtccaatctctgccgattctaccaccgcccccctggagaaagagcttccgccccatctgggggaattgactgtcgcagaggaaacttccagtagcctgaggctatcctggaccgtggcacaaggcccctttgacagcttcgtggtccagtaccgggacacagatggacagccacgggccgtgcctgtggcagcggaccaacgcaccgttacagtggaagatttggaacctggtaagaaatacaagttcttattgtacggcttgctaggaggcaagaggctcgggcccgtgtcagctctggggatgaccgcacctgaggaggacacccccgctcccgagttagccccagaggcccccgaacctcctgaggagcctaggctgggggtcttgactgttacagacacaacacccgacagcatgcgcctgagctggtctgtcgcgcagggcccattcgatagttttgtggttcagtatgaagatacaaatggacagcctcaggccctgctggtcgacggagaccaaagcaagatccttattagcggattggagccaagtaccccctatcgctttttgctatacgggctccatgagggtaagcggctggggcctctaagcgcagaggggactaccggtctggccccggctggacagacgtctgaagaatctaggcctaggctctcacagttgtctgttaccgacgtcaccacatcatctctccgcctcaattgggaagctccaccgggagctttcgactcctttctcctgcgattcggagtgccgtccccttctactttggagcctcatcctagaccattgttacagagagagctcatggtcccaggcaccagacattctgcagtgttaagggacctgaggtctggcaccctatactcactgaccttgtatgggctgaggggtccacacaaggcagactccattcaggggaccgccagaacactctccccagtgctggagagccccagagacctgcagttcagcgaaattcgggagacttcggctaaagttaattggatgccacccccgtcacgagcggattcatttaaggtcagttatcagcttgccgacgggggcgagccacagagtgtccaagtcgatggccaggccagaacccagaagcttcaaggtctcatcccaggggcccgatacgaggtcacagtggtcagcgtgagaggattcgaagagagcgaaccactgactggtttcttaacgaccgtgcccgacggcccaactcagcttcgcgccctcaatttaacagaagggttcgctgtgctgcactggaagccaccccagaatcccgtcgacacatacgatgtccaggtgacagcacccggcgcccccccgctccaagccgagacccctggaagcgccgtcgactatcctctacacgacctggtgctgcatacgaattataccgctactgtgaggggtctcaggggaccaaatctgacatctcccgcatcgattacattcactacaggcctggaggctcccagggacttagaagcaaaggaagtgaccccccgaacagcccttctcacctggacagagccacctgtgaggcccgctggttacctgctaagttttcacactccaggcgggcagaaccaggaaattctgctccccggcggcataacctcccaccaactgctggggctgttccctagcaccagttacaatgcaagactgcaagccatgtggggccagagcctgctgccaccagtgagcacttcctttaccactggggggctacgcattcccttcccaagggactgtggggaggagatgcaaaacggagcaggcgcgtctagaacaagcacgatttttctgaacggcaatcgggaacggccactgaacgtgttctgcgacatggagactgacggcggtgggtggttagtgttccaaagaaggatggacggccaaacagacttctggagggactgggaggattacgcccatggatttggtaacatttctggcgagttctggttgggcaacgaggcactgcatagcctgacccaggccggggactactccatgagggtcgatttgagagcaggcgacgaagcggtctttgcccagtatgactcattccatgtggattctgctgccgaatactaccgactccacttggagggctaccatggaaccgccggagattccatgtcataccattctggctcagtgtttagcgctcgggaccgggaccccaattctctgcttatctcatgcgcagtgtcctatcgtggcgcctggtggtaccggaactgccattatgctaacctgaacggactctatggctccaccgtcgatcaccagggtgtgtcttggtaccattggaagggattcgagtttagcgtgccattcactgagatgaagcttagacccagaaattttcgtagtcccgccggaggaggctag

SEQ ID NO: 201454 - DNA, 12729 bp, Artificial Sequence
  derived and/or modified sequence
atgatgcctgctcaatatgccttaacaagtagtcttgtgctactggtcttgttaagcactgcccgggccggacctttttcctcccgctccaacgtcactctccccgccccccggccccctccgcagccgggcgggcacacagtgggcgccggcgtcggaagtcccagcagccagctgtacgagcatactgttgaaggcggagaaaaacaggtggtgtttacacatcggattaatctgccaccatccactggctgcgggtgcccacctggcactgagcctccagtcttagcctctgaggtgcaagccctacgcgtgagattagaaatcctggaagagttggtaaaaggcttgaaggagcagtgcaccggaggctgctgtccagccagtgcacaggcagggacgggccaaacggatgtgcgaaccctgtgctcgctacacggcgtcttcgatctctctcggtgcacgtgctcctgcgagccaggctggggcgggcctacttgcagcgacccaactgacgccgagattcctccgtcaagccccccctcagcgtctggatcttgccctgacgattgcaatgaccagggcagatgcgtcagaggccggtgtgtttgtttccctgggtacaccggacccagctgcggctggccgagctgtcctggcgactgccagggacgaggcagatgcgtgcaaggggtctgtgtatgtcgcgccgggttcagcggcccagactgttcacagaggagttgcccgcggggatgctcacagagggggcgctgtgagggcggacgatgcgtttgcgaccctggctacactggagatgactgcggcatgagatcctgtcccagaggttgttcacagcgcgggaggtgcgaaaacggtagatgcgtgtgtaatccaggctatacaggagaagactgtggagttcgtagttgtccccgtggctgtagtcagaggggacgatgtaaagacggtaggtgcgtgtgcgatccggggtatacaggggaagattgcggtactcgctcatgcccatgggattgcggggaaggtggtcgctgcgtggatggcagatgtgtgtgttggccaggctatacaggagaagattgttcaacgcgtacatgcccccgagattgcagagggcggggtcggtgcgaggatggcgagtgtatctgcgacaccggatactcaggagatgactgcggagttcgctcttgccccggggattgtaaccagaggggtagatgcgaggatggccggtgcgtttgctggcctgggtacacaggtacagactgtggaagcagggcttgtccccgcgactgccgtgggcgcggtcgttgcgagaacggggtgtgcgtgtgcaacgcgggatatagcggcgaggattgcggggtaaggtcatgtcccggcgattgcagaggcagagggcggtgcgagtcgggccgctgtatgtgttggcctggctacaccggcagagattgcggcactcgagcctgcccaggggactgtaggggaagggggcgctgtgttgacgggaggtgcgtttgcaatcccggcttcactggcgaggactgcggcagtcggcggtgtcctggagactgccgcgggcacggactttgtgaggacggcgtgtgcgtctgcgatgccggctactccggggaagactgcagcacacgaagctgtccaggagggtgccgtggtcgggggcagtgtttggacggacggtgtgtttgtgaggacggatacagcggcgaggattgtggcgtgcgccagtgccccaacgactgttcccagcacggagtctgccaagatggtgtgtgcatatgctgggagggttacgtgtcagaggattgttcaatacggacatgcccaagcaactgccacggccgcggacggtgcgaggagggaaggtgcctgtgcgaccccggctacactgggcctacctgcgcaacccggatgtgccccgccgactgcagggggagaggcagatgcgtgcagggagtgtgtttatgtcacgtggggtatggaggtgaggactgcggccaggaggaaccacctgcttcagcttgtcccggaggctgtggcccaagagaattgtgccgtgcaggccagtgtgtgtgcgtcgagggattcagaggcccagactgtgccatccaaacatgcccaggggattgccgcggccggggcgagtgccatgatggaagttgcgtttgtaaggacgggtacgccggagaagattgtggcgaagaggtgcccaccatcgagggaatgagaatgcatctcctggaagagacgaccgtacgaactgagtggacccctgcccccggccccgttgacgcctacgaaattcagttcatcccaacgactgagggtgcctcccctccatttacagctcgagtccctagctcagccagcgcatacgatcagcgtggccttgccccgggccaggaatatcaggtcaccgtaagagccctgcggggtacctcatggggactcccagcatcaaagacaatcacaacaatgattgatggaccccaggacttgagagttgtggccgtaacacccacgaccctggagctgggctggctcagaccgcaggccgaggtcgataggtttgtagtcagctacgtgagtgccggaaatcaacgcgtgcggcttgaggtaccacccgaggctgacgggacgctcctcacagatctgatgcctggagttgagtacgtcgtgactgtgaccgctgaacgcggacgcgccgtctcttacccagccagtgtgcgggcgaatacagggtcatctcctctgggactcctcgggactaccgacgaacccccacccagcgggccatcaaccacgcagggcgcgcaggcccccctgctacagcagcggcctcaagagctcggagaactgcgagtgctgggccgagatgaaactgggagattaagagtggtctggacggctcagcccgataccttcgcgtatttccaactgcgcatgcgtgtccccgagggccccggggcacacgaggaagtgcttccaggcgatgttcggcaggctctcgtgcccccacccccacccggtaccccttatgaactttccctgcacggcgtgccaccaggcggtaagccgagcgatcccatcatttaccaggggattatggataaagacgaggaaaaacccggcaagtcaagcgggcctccccgcctaggagaactgacagtgaccgaccgaaccagtgactcattactcctgaggtggacagtgccggaaggagagtttgattccttcgtcatacaatacaaagaccgggacggacagcctcaagtagtccctgtcgaaggtcctcagcggtccgccgtgatcacgagtctggatcccggacgcaaatataaatttgtcctgtacggcttcgtcggtaaaaagcgacatggtcctctcgtggcggaggctaagatcctgcctcaatcggacccttcaccgggtacgccgccccacttggggaacctgtgggtgactgacccaacgcccgattctctccacctttcctggaccgtccctgaagggcaattcgacacgttcatggtccagtaccgggatcgggatgggagaccccaagtggtcccagtggagggacccgagaggtcttttgtagtctcatcactggacccagaccataagtaccgcttcactctgttcggcatcgctaataaaaagcgctacggaccgctgacagccgatggcacaaccgcacctgagaggaaagaagagccacctagacctgagtttttagagcagccactgctgggggaactgacagtcaccggtgttacccctgatagcctgcggctatcatggacagtggcacaagggcctttcgattcctttatggtgcaatacaaagacgcccagggccagcctcaggccgtacctgtggctggggacgagaacgaggtcaccgtacccggactcgaccctgaccggaagtataagatgaatctatatggcctgaggggacggcaacgtgtggggccagagtccgtcgtagctaaaacagccccacaggaggatgttgatgagacgccttcccctaccgagctcggaactgaggcgcccgagagcccagaggagccccttttaggagaactgactgtgaccggatcctcgcctgatagcctctcgctgttttggacggtgccccagggcagcttcgactcgttcaccgttcagtacaaggaccgtgatggcaggccacgcgcagtgcgggttggaggtaaggaatccgaagtcacggttggcggattggagccagggcacaagtacaagatgcacctgtacgggctccacgagggccaacgggtgggacctgtatctgcggtcggggtgactgcccctcagcaggaagagacaccgcctgctacagaaagtcctcttgaacccagactcggcgaacttacggttacagacgtcaccccaaactctgtaggtctgtcttggaccgtgcctgaaggccagttcgactcttttattgtccagtacaaggataaagacggccagccgcaggtcgtgcccgttgcggccgatcagcgggaagtcaccgtgtacaacctggagccagagcgtaagtacaagatgaatatgtacggtttgcatgatgggcagcggatgggcccactctcagtggtcattgttacagctccactgccacctgcacccgccacagaggctagcaagccacctctcgaaccacgactgggggaattaacagtcacagacataaccccggattctgtcggtttaagctggactgtgcctgagggtgagttcgattcctttgtcgttcaatataaggaccgtgacggacagccccaggtggtgcctgtcgccgcggaccaacgcgaggtgacaattccagatttggaacccagccgcaaatacaagttcctgctgttcggcatacaggacggtaagagacgaagtcccgtgtcagttgaggctaaaacagttgctcggggcgacgcctccccgggcgcaccccctcgactcggggagctgtgggttaccgacccgacgccggactctctgcgactgtcctggacggtgcctgagggacagttcgactcatttgtagtgcagtttaaggataaggatggaccccaggtggtgccagtggagggccacgaacgctccgtgaccgtgaccccccttgacgctggtcggaagtacagatttctgctgtatgggctgttaggtaagaaacgacacggaccgctcacggccgatggcacaactgaggctcgatccgccatggacgataccggaaccaagcgcccgcccaagccaagactgggagaggaacttcaggtgacaaccgtgacgcaaaattccgtgggactctcctggactgtacccgaaggacagtttgactctttcgtcgtccagtataaagacagggacggccagccgcaagtagtgcctgtggaaggctctcttagagaagtatctgtgcctgggctcgacccggcacatcgctacaaactgttgctctacggcctgcaccacggcaaacgcgtcggtcctatttcagccgtcgctataaccgccgggagagaagagaccgaaactgaaaccacagccccaaccccccccgctccagagccacacctgggagagctgaccgtcgaagaagccacatctcacacattgcatctctcatggatggtgaccgagggcgaattcgactcctttgagatccaatacacagatcgtgacgggcagctgcagatggtgagaatcggaggcgatcgaaatgacataacactgagtgggctcgaatccgaccatcggtatctagtaaccctatacggctttagcgatggcaaacacgtgggacctgtgcacgttgaggcactcactgtcccggaagaggagaaaccctctgaaccccctaccgccacccctgaaccccccatcaagccccggctgggcgagctcaccgtgaccgatgctacgccagatagtctctccctgtcatggactgtccccgaaggccagttcgaccactttcttgtgcagtatcgaaacggggatgggcagcctaaagcagtgagggtgcctggccatgaggagggtgtgacaatttctgggctggagcccgaccataagtataaaatgaacctgtacggctttcacggaggacagcggatgggacccgtctctgttgtcggagtcactgcagcagaggaagagactccctcaccgactgaaccaagtatggaagctcccgagccggcagaagagccattgctgggagagcttaccgtgactggctcgtccccagattctctttccctgtcatggaccgtgccacaaggtagattcgattcgtttaccgtgcagtataaggacagagatgggaggccacaagtcgtacgtgtgggaggtgaagagagcgaagtgactgtaggtggattggagcctggacgcaagtataagatgcatctctacgggctgcatgaagggcggcgggtaggacccgtgtccgccgtgggcgtgacggctcccgaggaggaatcgcctgacgcgcctctggccaagttgaggctgggtcagatgacagttagagatattacatcagatagcctttccttatcttggaccgttccagaaggacagttcgatcactttcttgtgcagtttaagaatggtgatggtcaacccaaagcagtccgggtgcccggacacgaagatggggttaccatctcagggctggaacccgaccacaagtataagatgaatctgtacgggttccatggcgggcagcgggtcggccctgtttcagcggttggtctgacagctccaggaaaagacgaggagatggcccctgcgagcaccgaaccacctacccctgaaccccctattaaacctcgcctggaggaactcactgtgactgacgccacccctgatagtttatctctaagctggacagttccagaggggcaattcgaccatttcctggtgcagtataaaaatggggacggccaaccaaaagcaaccagagtgccagggcacgaggacagagtaactattagtggtctggaacctgacaacaagtacaaaatgaacctttatggcttccatggaggccaaagagtgggccccgtatcggctataggagtgactgccgcggaggaggagacaccaagccccacggagccatctatggaggctcctgaacctcccgaagagcctctcctcggtgagctgaccgtgacgggatctagtccagattcactgtccctgtcatggacagtacctcagggacgatttgacagtttcactgtacagtacaaagacagggatggcaggccacaggttgttcgagttggcggggaggagagcgaggtaaccgtgggaggcctcgagcccggccgcaaatacaaaatgcatctctatggccttcacgagggcagacgtgtggggccagtatccactgtgggggtaacagcacctcaggaggacgtagacgaaacgcccagtccaaccgaaccaggcactgaggcaccgggtccgccagaagaacctctgctcggggaacttaccgtaactggcagttcaccagactccctgtcgttgtcctggaccgtccctcagggccgttttgatagctttaccgtccagtataaggatagggatgggagaccgcaggctgtgcgagtaggtggacaagaatctaaagtgacggtccgaggtctcgagccaggccgtaagtataaaatgcatctttacgggctccatgagggaagaagactgggacctgtctcagccgttggggtgaccgaagatgaagccgagacaacccaggctgtgccgacaatgacgcccgagcctcccataaagcccagacttggggaactgacaatgacagacgccactcctgattcccttagcttatcctggaccgtgccagaggggcaattcgatcacttcctcgtacagtatagaaacggagatgggcagccaaaagcagtcagggtaccagggcatgaggacggggtgactatttctggccttgaaccagatcacaagtataagatgaacctttacgggtttcacggaggccagcgcgtgggccctatctcggtcatcggcgtgacggccgcggaagaagagactccttcacctactgagctgtccactgaagcccccgagcccccagaggagcccctcctgggcgaactgaccgtgacagggtcgagccccgattctctgagtctctcttggaccatacctcagggccacttcgacagttttactgtgcaatacaaagaccgggacgggcggcctcaggtgatgagagtgaggggtgaggaatcagaagttaccgttggtggtctggagccggggcggaagtataagatgcacctgtatggcctgcacgaggggcgccgggtcggccccgtctcgactgtgggtgtcaccgaagatgaagcggaaaccacacaggctgttccgaccacaacacctgagcctcccaataagcccaggctaggggagctgaccgttaccgacgcaactcctgactccttgagcctgtcttggatggtgccagaaggacagttcgaccattttctcgtccagtacaggaatggtgatgggcaacccaaggtcgtgagagtgccaggtcatgaagacggtgttaccatctcaggtctagaacctgaccataagtataagatgaacctctacggattccatgggggccagagagtgggaccaatcagcgtgatcggcgtgactgcagccgaggaggaaactcccgcccctactgagcccagtacggaggctccagaacctcctgaggagcccctcctcggagaactcaccgtgactgggtcgtcccccgacagcctgagcttgtcttggaccattccccaggggagattcgatagctttacagttcaatataaggacagggacggccgtccgcaggtggtacgggtccgcggagaagaaagcgaggtgacagttggaggtctggagccaggttgtaagtataagatgcacctgtacgggctccatgaaggccagcgtgtgggccccgtttcagctgtcggtgttacagcccctaaagatgaagccgagacaactcaggctgttccgaccatgacccccgaaccacctattaagcctcgcttaggggaattaacagtaacggacgctacaccagattccctgtctttgtcatggatggtcccagaaggacagtttgaccatttcctggtccaataccgtaacggtgacggacaacccaaggccgtgcgcgtgcctgggcacgaggacggcgtgactatcagtggcctggagccagatcacaagtacaaaatgaacctgtacggctttcacggagggcagagggtgggacctgtgtccgccatcggagtgacagaagaggaaacaccatccccaaccgagccttccactgaagcgccagaggccccagaggagcccctgcttggcgaactcactgttactggatcctcccccgattccctctcactttcatggacagtacctcaagggcggtttgattccttcacagtgcaatataaggacagggacggtcagccccaggtcgttcgggtccgaggagaggagtcagaagtcacagtgggtggtttggagccaggcaggaagtataaaatgcacctgtacggtctccacgaaggacagcgagtgggtcccgtgtccaccgtgggtataaccgccccactccccacccctctacctgtggagcccaggcttggcgaactggccgtcgcagctgtcaccagcgactcagtcggcctgtcttggaccgtggcgcagggaccctttgattcctttctggtgcagtatcgtgacgcgcagggccagccacaggctgtgcccgtatccggagaccttcgcgctgtcgccgtgagcgggctggaccccgcacgtaagtacaagttcctgttatttggccttcaaaatgggaagcggcatggacccgtgccagtcgaagcccggaccgcccccgatacaaagcccagtcctcgactgggtgaactgactgttactgacgccacccctgactccgtgggcctctcttggacagtcccggaaggtgagttcgattcctttgtggtgcaatacaaggacaaagatggcaggctgcaggtcgtcccggttgccgccaatcagcgagaggtcacggtgcaaggactcgaaccttctagaaagtacagattcttgctctacgggctgtccgggagaaaaagactgggccctatttccgccgattctaccaccgccccactagaaaaggagctgcctccccacttaggtgagctcacggtagccgaggagacatctagctcccttcggctctcttggacagtggcccagggaccttttgattcgttcgtcgtgcaataccgagataccgatggacagcctagggcagtccccgtagcagctgatcagaggactgtgacagtcgaagacctcgagcccggaaagaaatacaaattcctcctatatggcctgcttggcggcaagcggttggggcctgtgtccgctttgggcatgactgccccggaggaggataccccagccccagaattagcacccgaggcacccgaacctcccgaggagcccaggctcggggtgttgactgtcactgatacaactccggactcgatgaggctaagctggtccgtggcacagggacccttcgattcatttgtggtgcagtatgaggacacaaatggacagccccaggccctcttggtggacggggaccagtctaaaatactcattagcgggctggagccatccaccccctatcgcttcctcttatacggtctccatgagggaaaaagactggggcccctgagcgccgaagggacaacaggcctcgcaccggctgggcagactagcgaagagagcaggccaaggctctctcagctgagcgtcaccgatgttactacttccagtctgaggttgaactgggaggcaccacccggcgcgtttgattcctttctgttgcgctttggcgtgcccagcccatctaccctcgagccccatcctcgtccccttctgcagagagaactgatggtgcccggcacccggcactcagcagtcctgcgggacctgagatccggcacactgtactctttaacactgtatgggctgagaggtcctcacaaggccgatagtatccagggcactgcccggactctgagtccagttctagaatcccctcgggatctgcagttctcagaaatcagggagacctctgccaaggtgaattggatgccccctcccagccgtgcagatagtttcaaagtttcctaccagttagcggacgggggggaaccgcaaagcgtacaggtggatggccaggctcgcacccagaaactgcagggcctaattccaggcgcccggtatgaggtaacggtcgtctccgttcgagggttcgaagaatccgagcctctaactggcttcctgaccacggtgccagacggaccaactcaacttcgcgccctgaacttaacggaagggtttgccgtactacactggaaaccaccacaaaatcctgtcgatacctacgatgttcaggtaacagcgcctggcgcgccccccctacaggccgaaactccaggcagtgccgttgattatccactgcacgatcttgtgctgcatacaaactatacagcaaccgtgaggggactccggggccccaatttaacatccccggcgagcattacctttaccactggtctggaagcgccaagagatctggaagccaaagaggtgacgccaaggacagccctcctgacttggactgagcccccagtacgtccagcaggctacctcttgtctttccacacgccgggggggcaaaaccaagaaatcttgctccccggcgggataacgagccaccagctcctcgggctgttcccttcaacttcttacaatgcaaggctacaggcaatgtggggacagtcactcctgcctccagtgtctaccagctttacaacaggagggcttcgtatcccctttccaagagactgcggcgaagagatgcaaaatggagccggagctagcagaacctcaaccattttcttgaacggaaatcgggagaggccactcaacgtattctgtgatatggaaaccgatggcggaggatggttagtatttcagagaaggatggatgggcagacggatttctggagagactgggaagactacgcccatggctttggaaacatctccggcgaattctggctgggaaacgaggccctgcacagcctgactcaagctggtgactatagtatgcgggtggacttgagagctggcgatgaagcagtgtttgcacagtatgattcctttcacgtggactcagccgctgaatactataggttacatttggagggataccatggaaccgccggggactctatgtcctatcattccggatccgtattctctgccagggatcgcgaccctaattctctactcatctcctgtgcggtttcatatagaggtgcctggtggtaccgcaattgtcattacgctaacctgaatggtctgtacgggtcgacagtcgatcaccagggagtttcttggtatcactggaaaggtttcgagttttctgttccttttaccgagatgaaattaagacctcggaattttagaagccccgccggaggtgggtag

SEQ ID NO: 201455 - DNA, 12735 bp, Artificial Sequence
  derived and/or modified sequence
atgatgcctgcccagtatgccctgaccagcagcctggtgctgctggtgctgctgagcacagcccgggccggccccttcagcagccgcagcaatgtgaccctgcctgccccccggcccccaccccagcccggcggccacacagtgggcgctggggtgggcagccccagcagccagctgtatgagcacacagtggagggcggggagaagcaggtggtgttcacccaccgcatcaacctgccccccagcacaggctgcggctgccccccaggcacagagccccctgtgctggccagcgaggtgcaggccctgcgggtgcggctggagatcctggaggagctggtgaagggcctgaaggagcagtgcaccggcggctgctgcccagccagcgcccaggccggcaccggccagacagatgtgaggaccctgtgcagcctgcacggcgtgtttgacctgagccgctgcacctgcagctgtgagcccggctggggcggccccacctgcagcgaccccacagatgctgagatcccccccagcagcccccccagcgccagcggcagctgcccagatgactgcaatgaccagggccgctgtgtgcggggccgctgtgtgtgcttccctggctacacaggccccagctgtggctggcccagctgccctggggactgccagggccggggccgctgtgtgcagggcgtgtgtgtgtgcagagctggcttcagcggccctgactgcagccagaggagctgcccccggggctgcagccagaggggccgctgtgagggcggccgctgtgtgtgtgaccccggctacacaggagatgactgtggcatgaggagctgcccccggggctgcagccagaggggccgctgtgaaaatggccgctgtgtgtgcaaccctggctacaccggggaggactgtggggtgcgcagctgcccccggggctgcagccagaggggccgctgcaaggatggccgctgtgtgtgtgaccccggctacacaggagaggactgtggcaccaggagctgcccctgggactgtggggagggcggccgctgtgtggatggccgctgtgtgtgctggccaggctacaccggggaggactgcagcaccaggacctgcccccgggactgccggggccggggccgctgtgaagatggagagtgcatctgtgacaccggctacagcggagatgactgtggggtgcgcagctgccctggggactgcaaccagaggggccgctgtgaagatggccgctgtgtgtgctggccaggctacacaggaacagactgtggcagccgggcctgcccccgggactgccggggccggggccgctgtgaaaatggagtgtgtgtgtgcaatgccggctacagcggggaggactgtggggtgcgcagctgccctggggactgccggggccggggccgctgtgagagcggccgctgcatgtgctggccaggctacacaggccgggactgtggcacccgggcctgccctggggactgccggggccggggccgctgtgtggatggccgctgtgtgtgcaaccctggcttcaccggggaggactgtggcagccgccgctgccctggggactgccggggccacggcctgtgtgaagatggagtgtgtgtgtgtgatgctggctacagcggggaggactgcagcaccaggagctgccctgggggctgccggggccggggccagtgcctggatggccgctgtgtgtgtgaagatggctacagcggggaggactgtggggtgcggcagtgccccaatgactgcagccagcacggcgtgtgccaggatggagtgtgcatctgctgggagggctacgtgtctgaggactgcagcatccgcacctgccccagcaactgccacggccggggccgctgtgaggagggccgctgcctgtgtgaccccggctacacaggccccacctgtgccaccaggatgtgcccagctgactgccggggccggggccgctgtgtgcagggcgtgtgcctgtgccacgtgggctatggaggagaggactgtggccaggaggagcccccagccagcgcctgccctgggggctgcggcccccgggagctgtgccgggccggccagtgtgtgtgtgtggagggcttccggggccctgactgtgccatccagacctgccctggggactgccggggccgcggggagtgccatgatggcagctgtgtgtgcaaggatggctatgctggggaggactgtggggaggaggtgcccaccatcgagggcatgaggatgcacctgctggaggagaccaccgtgaggacagagtggaccccagcccctggccctgtggatgcctatgagatccagttcatccccaccacagaaggagccagcccccccttcaccgcccgggtgcccagcagcgccagcgcctatgaccagaggggcctggcccctggccaggagtaccaggtgacagtgcgggccctgcggggcacctcctggggcctgcctgccagcaagaccatcaccaccatgattgatggcccccaggacctgcgggtggtggccgtgacccccaccaccctggagctgggctggctgcggccccaggccgaggtggacagatttgtggtgtcctatgtgtctgctggcaaccagagggtgcggctggaggtgcccccagaggctgatggcaccctgctgacagacctgatgcctggggtggagtatgtggtgacagtgacagctgagcggggccgggctgtgtcctacccagcctctgtgcgggccaacacaggcagcagccccctgggcctgctgggcaccacagatgagcccccaccttctggccccagcaccacccagggcgcccaggcccccctgctgcagcagaggccccaggagctgggggagctgcgggtgctgggcagagatgagaccggccgcctgcgggtggtgtggacagcccagcctgacacctttgcctacttccagctgaggatgagggtgcctgagggccctggggcccacgaggaggtgctgcctggagatgtgcggcaggccctggtgcccccacctcctcctggcaccccctatgagctgagcctgcatggagtgcccccaggcggcaagcccagcgaccccatcatctaccagggcatcatggacaaggatgaggagaagccaggcaagagcagcggccccccccggctgggggagctgactgtgacagacaggaccagtgacagcctgctgctgcgctggacagtgcctgagggggagtttgacagctttgtgatccagtacaaggacagagatggccagccccaggtggtgcctgtggagggcccccagaggtctgctgtgatcaccagcctggaccccggcaggaagtacaagtttgtgctgtatggctttgtgggcaagaagagacatggccccctggtggccgaggccaagatcctgccccagagcgaccccagccctggcaccccaccccacctgggcaacctgtgggtgacagaccccaccccagacagcctgcacctgtcctggacagtgcctgagggccagtttgacaccttcatggtgcagtacagagacagagatggccggccccaggtggtgcctgtggagggccctgagaggagctttgtggtgagcagcctggaccctgaccacaagtaccgcttcaccctgtttggcatcgccaacaagaagagatatggccccctgacagcagatggcaccacagcccctgagaggaaggaggagccccccaggcctgagttcctggagcagcccctgctgggggagctgactgtgactggagtgaccccagacagcctgcggctgtcctggacagtggcccagggcccctttgacagcttcatggtgcagtacaaggatgcccagggccagccccaggccgtgcctgtggccggagatgaaaatgaggtgacagtgcccggcctggaccctgacaggaagtacaagatgaacctgtatggcctgcggggccggcagagggtgggccctgagagcgtggtggccaagacagccccccaggaggatgtggatgagacccccagccccacagagctgggcacagaggcccctgagagccctgaggagcccctgctgggggagctgactgtgacaggcagcagcccagacagcctgagcctcttctggacagtgccccagggcagctttgacagcttcaccgtgcagtacaaggacagagatggccggcccagggctgtgcgggtgggcggcaaggagagcgaggtgacagtgggcggcctggagcccggccacaagtacaagatgcacctgtatggcctgcacgagggccagagggtgggccctgtgtctgctgtgggcgtgacagccccccagcaggaggagaccccaccagccacagagagccccctggagccccggctgggggagctgactgtgacagatgtgacccccaacagcgtgggcctgtcctggacagtgcctgagggccagtttgacagcttcatcgtgcagtacaaggacaaggatggccagccccaggtggtgcctgtggccgctgaccagcgggaggtgacagtgtacaacctggagcctgagaggaagtacaagatgaacatgtatggcctgcatgatggccagaggatgggccccctgtctgtggtgattgtgacagcccccctgcccccagccccagccacagaggccagcaagccacccctggagccccggctgggggagctgactgtgacagacatcaccccagacagcgtgggcctgtcctggacagtgcctgagggggagtttgacagctttgtggtgcagtacaaggacagagatggccagccccaggtggtgcctgtggccgctgaccagcgggaggtgaccatcccagacctggagcccagcaggaagtacaagttcctgctgtttggcatccaggacggcaagagaagaagccctgtgtctgtggaggccaagacagtggcccggggagatgccagccctggggccccaccccggctgggggagctgtgggtgacagaccccaccccagacagcctgcggctgtcctggacagtgcctgagggccagtttgacagctttgtggtgcagttcaaggacaaggatggcccccaggtggtgcctgtggagggccacgagaggtctgtgacagtgacccccctggatgctggcaggaagtaccgcttcctgctgtatggcctgctgggcaagaagagacatggccccctgacagcagatggcaccacagaggcccggagcgccatggatgacaccggcaccaagaggcctcccaagccccggctgggggaggagctgcaggtgaccaccgtgacccagaacagcgtgggcctgtcctggacagtgcctgagggccagtttgacagctttgtggtgcagtacaaggacagagatggccagccccaggtggtgcctgtggagggcagcctgcgggaggtgtctgtgcccggcctggaccctgcccaccgctacaagctgctgctgtatggcctgcaccacggcaagagggtgggccccatctctgctgtggccatcacagctggccgggaggagacagaaacagagaccacagcccccaccccaccagcccctgagccccacctgggggagctgactgtggaggaggccaccagccacaccctgcacctgtcctggatggtgacagaaggagaatttgacagctttgagatccagtacacagacagagatggccagctgcagatggtgagaattggaggagacagaaatgacatcaccctgagcggcctggagagtgaccaccgctacctggtgaccctgtatggcttcagtgatggcaagcacgtgggccctgtgcacgtggaggccctgactgtgcctgaggaggagaagcccagcgagcccccaacagccaccccagagccccccatcaagccccggctgggggagctgactgtgacagatgccaccccagacagcctgagcctgtcctggacagtgcctgagggccagtttgaccacttcctggtgcagtacagaaatggagatggccagcccaaggctgtgcgggtgcccggccacgaggagggcgtgaccatcagcggcctggagccagaccacaagtacaagatgaacctgtatggcttccatggaggccagaggatgggccctgtgtctgtggtgggcgtgacagctgctgaggaggagacccccagccccacagagcccagcatggaggcccctgagcctgctgaggagcccctgctgggggagctgactgtgacaggcagcagcccagacagcctgagcctgtcctggacagtgccccagggccgctttgacagcttcaccgtgcagtacaaggacagagatggccggccccaggtggtgcgggtgggcggggaggagagcgaggtgacagtgggcggcctggagcccggcaggaagtacaagatgcacctgtatggcctgcacgagggccggcgggtgggccctgtgtctgctgtgggcgtgacagcccctgaggaggagagcccagatgcccccctggccaagctgcggctgggccagatgacagtgcgggacatcaccagtgacagcctgagcctgtcctggacagtgcctgagggccagtttgaccacttcctggtgcagttcaagaatggagatggccagcccaaggctgtgcgggtgcccggccatgaagatggagtgaccatcagcggcctggagccagaccacaagtacaagatgaacctgtatggcttccacggcggccagagggtgggccctgtgtctgctgtgggcctgacagcccctgggaaggatgaggagatggccccagccagcacagagccccccaccccagagccccccatcaagccccggctggaggagctgactgtgacagatgccaccccagacagcctgagcctgtcctggacagtgcctgagggccagtttgaccacttcctggtgcagtacaagaatggagatggccagcccaaggccaccagggtgcccggccatgaagatagagtgaccatcagcggcctggagccagacaacaagtacaagatgaacctgtatggcttccatggaggccagagggtgggccctgtgtctgccatcggcgtgacagctgctgaggaggagacccccagccccacagagcccagcatggaggcccctgagcccccagaggagcccctgctgggggagctgactgtgacaggcagcagcccagacagcctgagcctgtcctggacagtgccccagggccgctttgacagcttcaccgtgcagtacaaggacagagatggccggccccaggtggtgcgggtgggcggggaggagagcgaggtgacagtgggcggcctggagcccggcaggaagtacaagatgcacctgtatggcctgcacgagggccggcgggtgggccctgtgtccacagtgggcgtgacagccccccaggaggatgtggatgagacccccagccccacagagcccggcacagaggcccctggccccccagaggagcccctgctgggggagctgactgtgacaggcagcagcccagacagcctgagcctgtcctggacagtgccccagggccgctttgacagcttcaccgtgcagtacaaggacagagatggccggccccaggccgtgcgggtgggcggccaggagagcaaggtgacagtgcggggcctggagcccggcaggaagtacaagatgcacctgtatggcctgcacgagggccgccgcctgggccctgtgtctgctgtgggcgtgacagaagatgaggccgagaccacccaggccgtgcccaccatgaccccagagccccccatcaagccccggctgggggagctgaccatgacagatgccaccccagacagcctgagcctgtcctggacagtgcctgagggccagtttgaccacttcctggtgcagtacagaaatggagatggccagcccaaggctgtgcgggtgcccggccatgaagatggagtgaccatcagcggcctggagccagaccacaagtacaagatgaacctgtatggcttccacggcggccagagggtgggccccatctctgtgattggagtgacagctgctgaggaggagacccccagccccacagagctgagcacagaggcccctgagcccccagaggagcccctgctgggggagctgactgtgacaggcagcagcccagacagcctgagcctgtcctggaccatcccccagggccactttgacagcttcaccgtgcagtacaaggacagagatggccggccccaggtgatgagggtgcggggggaggagagcgaggtgacagtgggcggcctggagcccggcaggaagtacaagatgcacctgtatggcctgcacgagggcagaagagtgggccctgtgtccacagtgggcgtgacagccccagaagatgaggccgagaccacccaggccgtgcccaccaccaccccagagccccccaacaagccccggctgggggagctgactgtgacagatgccaccccagacagcctgagcctgtcctggatggtgcctgagggccagtttgaccacttcctggtgcagtacagaaatggagatggccagcccaaggtggtgcgggtgcccggccatgaagatggagtgaccatcagcggcctggagccagaccacaagtacaagatgaacctgtatggcttccacggcggccagagggtgggccccatctctgtgattggagtgacagctgctgaggaggagaccccagcccccacagagcccagcacagaggcccctgagcccccagaggagcccctgctgggggagctgactgtgacaggcagcagcccagacagcctgagcctgtcctggaccatcccccagggccgctttgacagcttcaccgtgcagtacaaggacagagatggccggccccaggtggtgcgggtgcggggggaggagagcgaggtgacagtgggcggcctggagcccggctgcaagtacaagatgcacctgtatggcctgcacgagggccagagggtgggccctgtgtctgctgtgggcgtgacagcccccaaggatgaggccgagaccacccaggccgtgcccaccatgaccccagagccccccatcaagccccggctgggggagctgactgtgacagatgccaccccagacagcctgagcctgtcctggatggtgcctgagggccagtttgaccacttcctggtgcagtacagaaatggagatggccagcccaaggctgtgcgggtgcccggccatgaagatggagtgaccatcagcggcctggagccagaccacaagtacaagatgaacctgtatggcttccacggcggccagagggtgggccctgtgtctgccatcggcgtgacagaggaggagacccccagccccacagagcccagcacagaggcccctgaggcccctgaggagcccctgctgggggagctgactgtgacaggcagcagcccagacagcctgagcctgtcctggacagtgccccagggccgctttgacagcttcaccgtgcagtacaaggacagagatggccagccccaggtggtgcgggtgcggggggaggagagcgaggtgacagtgggcggcctggagcccggcaggaagtacaagatgcacctgtatggcctgcacgagggccagagggtgggccctgtgtccacagtgggcatcacagcccccctgcccacccccctgcctgtggagccccggctgggggagctggccgtggccgctgtgaccagtgacagcgtgggcctgtcctggacagtggcccagggcccctttgacagcttcctggtgcagtacagagatgcccagggccagccccaggccgtgcctgtgtctggggacctgcgggctgtggccgtgtctggcctggaccctgccaggaagtacaagttcctgctgtttggcctgcagaatggcaagagacatggccctgtgcctgtggaggccaggacagccccagacaccaagcccagcccccggctgggggagctgactgtgacagatgccaccccagacagcgtgggcctgtcctggacagtgcctgagggggagtttgacagctttgtggtgcagtacaaggacaaggatggccgcctgcaggtggtgcctgtggccgccaaccagcgggaggtgacagtgcagggcctggagcccagcaggaagtaccgcttcctgctgtatggcctgagcggcaggaagaggctgggccccatctctgctgacagcaccacagcccccctggagaaggagctgcccccccacctgggggagctgactgtggccgaggagaccagcagcagcctgcggctgtcctggacagtggcccagggcccctttgacagctttgtggtgcagtacagagacacagatggccagcccagggctgtgcctgtggccgctgaccagaggacagtgacagtggaggacctggagcccgggaagaagtacaagttcctgctgtatggcctgctgggcggcaagaggctgggccctgtgtctgccctgggcatgacagcccctgaggaggacaccccagcccctgagctggcccctgaggcccctgagcccccagaggagccccggctgggcgtgctgactgtgacagacaccaccccagacagcatgaggctgtcctggagcgtggcccagggcccctttgacagctttgtggtgcagtatgaggacaccaacggccagccccaggccctgctggtggatggagaccagagcaagatcctgatcagcggcctggagcccagcaccccctaccgcttcctgctgtatggcctgcacgagggcaagaggctgggccccctgtctgctgagggcaccaccggcctggccccagctggccagaccagcgaggagagccggccccggctgagccagctgtctgtgacagatgtgaccaccagcagcctgcggctgaactgggaggcccctcctggggcctttgacagcttcctgctgcgctttggagtgcccagccccagcaccctggagccccacccccggcccctgctgcagcgggagctgatggtgcccggcaccaggcacagcgctgtgctgcgggacctgcggagcggcaccctgtacagcctgaccctgtatggcctgcggggcccccacaaggctgacagcatccagggcacagcccggaccctgagccctgtgctggagagcccccgggacctgcagttcagcgagatccgggagaccagcgccaaggtgaactggatgcccccacccagcagagctgacagcttcaaggtgtcctaccagctggctgatggaggagagccccagagcgtgcaggtggatggccaggcccggacccagaagctgcagggcctcatccctggggcccgctatgaggtgacagtggtgtctgtgcggggctttgaggagagcgagcccctgaccggcttcctgaccaccgtgcctgatggccccacccagctgcgggccctgaacctgacagagggctttgctgtgctgcactggaagccaccccagaaccctgtggacacctatgatgtgcaggtgacagcccctggggccccacccctgcaggccgagaccccaggcagcgctgtggactaccccctgcatgacctggtgctgcacaccaactacacagccaccgtgcggggcctgcggggccccaacctgaccagccctgccagcatcaccttcaccaccggcctggaggccccccgggacctggaggccaaggaggtgacccccaggacagccctgctgacctggacagagccccctgtgcggcctgctggctacctgctgtccttccacacccctgggggccagaaccaggagatcctgctgcccggcggcatcaccagccaccagctgctgggcctcttccccagcaccagctacaatgcccggctgcaggccatgtggggccagagcctgctgccccctgtgtccaccagcttcaccactggaggcctgcgcatccccttcccccgggactgtggggaggagatgcagaatggagctggggccagcaggaccagcaccatcttcctgaatggaaaccgggagcggcccctgaatgtgttctgtgacatggagacagatggcggcggctggctggtgttccagaggaggatggatggccagacagacttctggagggactgggaggactatgcccacggctttggaaacatctctggagagttctggctgggcaatgaggccctgcacagcctgacccaggccggggactacagcatgagggtggacctgcgggctggagatgaggccgtgtttgcccagtatgacagcttccacgtggacagcgctgctgagtactaccgcctgcacctggagggctaccatggaacagctggggacagcatgagctaccacagcggcagcgtcttcagcgcccgggaccgggaccccaacagcctgctgatcagctgtgctgtgtcctacagaggagcctggtggtacagaaactgccactacgccaacctgaatggcctgtatggcagcacagtggaccaccagggcgtgtcctggtaccactggaagggctttgagttctctgtgcccttcacagagatgaagctgcggcccaggaacttccgcagccctgctgggggcggctag

SEQ ID NO: 201456 - DNA, 12729 bp, Artificial Sequence
  derived and/or modified sequence
atgatgcctgcccagtatgccctgaccagcagcctggtgctgctggtgctgctgagcacagcccgggccggccccttcagcagccgcagcaatgtgaccctgcctgccccccggcccccaccccagcccggcggccacacagtgggcgctggggtgggcagccccagcagccagctgtatgagcacacagtggagggcggggagaagcaggtggtgttcacccaccgcatcaacctgccccccagcacaggctgcggctgccccccaggcacagagccccctgtgctggccagcgaggtgcaggccctgcgggtgcggctggagatcctggaggagctggtgaagggcctgaaggagcagtgcaccggcggctgctgcccagccagcgcccaggccggcaccggccagacagatgtgaggaccctgtgcagcctgcacggcgtgtttgacctgagccgctgcacctgcagctgtgagcccggctggggcggccccacctgcagcgaccccacagatgctgagatcccccccagcagcccccccagcgccagcggcagctgcccagatgactgcaatgaccagggccgctgtgtgcggggccgctgtgtgtgcttccctggctacacaggccccagctgtggctggcccagctgccctggggactgccagggccggggccgctgtgtgcagggcgtgtgtgtgtgcagagctggcttcagcggccctgactgcagccagaggagctgcccccggggctgcagccagaggggccgctgtgagggcggccgctgtgtgtgtgaccccggctacacaggagatgactgtggcatgaggagctgcccccggggctgcagccagaggggccgctgtgaaaatggccgctgtgtgtgcaaccctggctacaccggggaggactgtggggtgcgcagctgcccccggggctgcagccagaggggccgctgcaaggatggccgctgtgtgtgtgaccccggctacacaggagaggactgtggcaccaggagctgcccctgggactgtggggagggcggccgctgtgtggatggccgctgtgtgtgctggccaggctacaccggggaggactgcagcaccaggacctgcccccgggactgccggggccggggccgctgtgaagatggagagtgcatctgtgacaccggctacagcggagatgactgtggggtgcgcagctgccctggggactgcaaccagaggggccgctgtgaagatggccgctgtgtgtgctggccaggctacacaggaacagactgtggcagccgggcctgcccccgggactgccggggccggggccgctgtgaaaatggagtgtgtgtgtgcaatgccggctacagcggggaggactgtggggtgcgcagctgccctggggactgccggggccggggccgctgtgagagcggccgctgcatgtgctggccaggctacacaggccgggactgtggcacccgggcctgccctggggactgccggggccggggccgctgtgtggatggccgctgtgtgtgcaaccctggcttcaccggggaggactgtggcagccgccgctgccctggggactgccggggccacggcctgtgtgaagatggagtgtgtgtgtgtgatgctggctacagcggggaggactgcagcaccaggagctgccctgggggctgccggggccggggccagtgcctggatggccgctgtgtgtgtgaagatggctacagcggggaggactgtggggtgcggcagtgccccaatgactgcagccagcacggcgtgtgccaggatggagtgtgcatctgctgggagggctacgtgtctgaggactgcagcatccgcacctgccccagcaactgccacggccggggccgctgtgaggagggccgctgcctgtgtgaccccggctacacaggccccacctgtgccaccaggatgtgcccagctgactgccggggccggggccgctgtgtgcagggcgtgtgcctgtgccacgtgggctatggaggagaggactgtggccaggaggagcccccagccagcgcctgccctgggggctgcggcccccgggagctgtgccgggccggccagtgtgtgtgtgtggagggcttccggggccctgactgtgccatccagacctgccctggggactgccggggccgcggggagtgccatgatggcagctgtgtgtgcaaggatggctatgctggggaggactgtggggaggaggtgcccaccatcgagggcatgaggatgcacctgctggaggagaccaccgtgaggacagagtggaccccagcccctggccctgtggatgcctatgagatccagttcatccccaccacagaaggagccagcccccccttcaccgcccgggtgcccagcagcgccagcgcctatgaccagaggggcctggcccctggccaggagtaccaggtgacagtgcgggccctgcggggcacctcctggggcctgcctgccagcaagaccatcaccaccatgattgatggcccccaggacctgcgggtggtggccgtgacccccaccaccctggagctgggctggctgcggccccaggccgaggtggacagatttgtggtgtcctatgtgtctgctggcaaccagagggtgcggctggaggtgcccccagaggctgatggcaccctgctgacagacctgatgcctggggtggagtatgtggtgacagtgacagctgagcggggccgggctgtgtcctacccagcctctgtgcgggccaacacaggcagcagccccctgggcctgctgggcaccacagatgagcccccaccttctggccccagcaccacccagggcgcccaggcccccctgctgcagcagaggccccaggagctgggggagctgcgggtgctgggcagagatgagaccggccgcctgcgggtggtgtggacagcccagcctgacacctttgcctacttccagctgaggatgagggtgcctgagggccctggggcccacgaggaggtgctgcctggagatgtgcggcaggccctggtgcccccacctcctcctggcaccccctatgagctgagcctgcatggagtgcccccaggcggcaagcccagcgaccccatcatctaccagggcatcatggacaaggatgaggagaagccaggcaagagcagcggccccccccggctgggggagctgactgtgacagacaggaccagtgacagcctgctgctgcgctggacagtgcctgagggggagtttgacagctttgtgatccagtacaaggacagagatggccagccccaggtggtgcctgtggagggcccccagaggtctgctgtgatcaccagcctggaccccggcaggaagtacaagtttgtgctgtatggctttgtgggcaagaagagacatggccccctggtggccgaggccaagatcctgccccagagcgaccccagccctggcaccccaccccacctgggcaacctgtgggtgacagaccccaccccagacagcctgcacctgtcctggacagtgcctgagggccagtttgacaccttcatggtgcagtacagagacagagatggccggccccaggtggtgcctgtggagggccctgagaggagctttgtggtgagcagcctggaccctgaccacaagtaccgcttcaccctgtttggcatcgccaacaagaagagatatggccccctgacagcagatggcaccacagcccctgagaggaaggaggagccccccaggcctgagttcctggagcagcccctgctgggggagctgactgtgactggagtgaccccagacagcctgcggctgtcctggacagtggcccagggcccctttgacagcttcatggtgcagtacaaggatgcccagggccagccccaggccgtgcctgtggccggagatgaaaatgaggtgacagtgcccggcctggaccctgacaggaagtacaagatgaacctgtatggcctgcggggccggcagagggtgggccctgagagcgtggtggccaagacagccccccaggaggatgtggatgagacccccagccccacagagctgggcacagaggcccctgagagccctgaggagcccctgctgggggagctgactgtgacaggcagcagcccagacagcctgagcctcttctggacagtgccccagggcagctttgacagcttcaccgtgcagtacaaggacagagatggccggcccagggctgtgcgggtgggcggcaaggagagcgaggtgacagtgggcggcctggagcccggccacaagtacaagatgcacctgtatggcctgcacgagggccagagggtgggccctgtgtctgctgtgggcgtgacagccccccagcaggaggagaccccaccagccacagagagccccctggagccccggctgggggagctgactgtgacagatgtgacccccaacagcgtgggcctgtcctggacagtgcctgagggccagtttgacagcttcatcgtgcagtacaaggacaaggatggccagccccaggtggtgcctgtggccgctgaccagcgggaggtgacagtgtacaacctggagcctgagaggaagtacaagatgaacatgtatggcctgcatgatggccagaggatgggccccctgtctgtggtgattgtgacagcccccctgcccccagccccagccacagaggccagcaagccacccctggagccccggctgggggagctgactgtgacagacatcaccccagacagcgtgggcctgtcctggacagtgcctgagggggagtttgacagctttgtggtgcagtacaaggacagagatggccagccccaggtggtgcctgtggccgctgaccagcgggaggtgaccatcccagacctggagcccagcaggaagtacaagttcctgctgtttggcatccaggacggcaagagaagaagccctgtgtctgtggaggccaagacagtggcccggggagatgccagccctggggccccaccccggctgggggagctgtgggtgacagaccccaccccagacagcctgcggctgtcctggacagtgcctgagggccagtttgacagctttgtggtgcagttcaaggacaaggatggcccccaggtggtgcctgtggagggccacgagaggtctgtgacagtgacccccctggatgctggcaggaagtaccgcttcctgctgtatggcctgctgggcaagaagagacatggccccctgacagcagatggcaccacagaggcccggagcgccatggatgacaccggcaccaagaggcctcccaagccccggctgggggaggagctgcaggtgaccaccgtgacccagaacagcgtgggcctgtcctggacagtgcctgagggccagtttgacagctttgtggtgcagtacaaggacagagatggccagccccaggtggtgcctgtggagggcagcctgcgggaggtgtctgtgcccggcctggaccctgcccaccgctacaagctgctgctgtatggcctgcaccacggcaagagggtgggccccatctctgctgtggccatcacagctggccgggaggagacagaaacagagaccacagcccccaccccaccagcccctgagccccacctgggggagctgactgtggaggaggccaccagccacaccctgcacctgtcctggatggtgacagaaggagaatttgacagctttgagatccagtacacagacagagatggccagctgcagatggtgagaattggaggagacagaaatgacatcaccctgagcggcctggagagtgaccaccgctacctggtgaccctgtatggcttcagtgatggcaagcacgtgggccctgtgcacgtggaggccctgactgtgcctgaggaggagaagcccagcgagcccccaacagccaccccagagccccccatcaagccccggctgggggagctgactgtgacagatgccaccccagacagcctgagcctgtcctggacagtgcctgagggccagtttgaccacttcctggtgcagtacagaaatggagatggccagcccaaggctgtgcgggtgcccggccacgaggagggcgtgaccatcagcggcctggagccagaccacaagtacaagatgaacctgtatggcttccatggaggccagaggatgggccctgtgtctgtggtgggcgtgacagctgctgaggaggagacccccagccccacagagcccagcatggaggcccctgagcctgctgaggagcccctgctgggggagctgactgtgacaggcagcagcccagacagcctgagcctgtcctggacagtgccccagggccgctttgacagcttcaccgtgcagtacaaggacagagatggccggccccaggtggtgcgggtgggcggggaggagagcgaggtgacagtgggcggcctggagcccggcaggaagtacaagatgcacctgtatggcctgcacgagggccggcgggtgggccctgtgtctgctgtgggcgtgacagcccctgaggaggagagcccagatgcccccctggccaagctgcggctgggccagatgacagtgcgggacatcaccagtgacagcctgagcctgtcctggacagtgcctgagggccagtttgaccacttcctggtgcagttcaagaatggagatggccagcccaaggctgtgcgggtgcccggccatgaagatggagtgaccatcagcggcctggagccagaccacaagtacaagatgaacctgtatggcttccacggcggccagagggtgggccctgtgtctgctgtgggcctgacagcccctgggaaggatgaggagatggccccagccagcacagagccccccaccccagagccccccatcaagccccggctggaggagctgactgtgacagatgccaccccagacagcctgagcctgtcctggacagtgcctgagggccagtttgaccacttcctggtgcagtacaagaatggagatggccagcccaaggccaccagggtgcccggccatgaagatagagtgaccatcagcggcctggagccagacaacaagtacaagatgaacctgtatggcttccatggaggccagagggtgggccctgtgtctgccatcggcgtgacagctgctgaggaggagacccccagccccacagagcccagcatggaggcccctgagcccccagaggagcccctgctgggggagctgactgtgacaggcagcagcccagacagcctgagcctgtcctggacagtgccccagggccgctttgacagcttcaccgtgcagtacaaggacagagatggccggccccaggtggtgcgggtgggcggggaggagagcgaggtgacagtgggcggcctggagcccggcaggaagtacaagatgcacctgtatggcctgcacgagggccggcgggtgggccctgtgtccacagtgggcgtgacagccccccaggaggatgtggatgagacccccagccccacagagcccggcacagaggcccctggccccccagaggagcccctgctgggggagctgactgtgacaggcagcagcccagacagcctgagcctgtcctggacagtgccccagggccgctttgacagcttcaccgtgcagtacaaggacagagatggccggccccaggccgtgcgggtgggcggccaggagagcaaggtgacagtgcggggcctggagcccggcaggaagtacaagatgcacctgtatggcctgcacgagggccgccgcctgggccctgtgtctgctgtgggcgtgacagaagatgaggccgagaccacccaggccgtgcccaccatgaccccagagccccccatcaagccccggctgggggagctgaccatgacagatgccaccccagacagcctgagcctgtcctggacagtgcctgagggccagtttgaccacttcctggtgcagtacagaaatggagatggccagcccaaggctgtgcgggtgcccggccatgaagatggagtgaccatcagcggcctggagccagaccacaagtacaagatgaacctgtatggcttccacggcggccagagggtgggccccatctctgtgattggagtgacagctgctgaggaggagacccccagccccacagagctgagcacagaggcccctgagcccccagaggagcccctgctgggggagctgactgtgacaggcagcagcccagacagcctgagcctgtcctggaccatcccccagggccactttgacagcttcaccgtgcagtacaaggacagagatggccggccccaggtgatgagggtgcggggggaggagagcgaggtgacagtgggcggcctggagcccggcaggaagtacaagatgcacctgtatggcctgcacgagggcagaagagtgggccctgtgtccacagtgggcgtgacagaagatgaggccgagaccacccaggccgtgcccaccaccaccccagagccccccaacaagccccggctgggggagctgactgtgacagatgccaccccagacagcctgagcctgtcctggatggtgcctgagggccagtttgaccacttcctggtgcagtacagaaatggagatggccagcccaaggtggtgcgggtgcccggccatgaagatggagtgaccatcagcggcctggagccagaccacaagtacaagatgaacctgtatggcttccacggcggccagagggtgggccccatctctgtgattggagtgacagctgctgaggaggagaccccagcccccacagagcccagcacagaggcccctgagcccccagaggagcccctgctgggggagctgactgtgacaggcagcagcccagacagcctgagcctgtcctggaccatcccccagggccgctttgacagcttcaccgtgcagtacaaggacagagatggccggccccaggtggtgcgggtgcggggggaggagagcgaggtgacagtgggcggcctggagcccggctgcaagtacaagatgcacctgtatggcctgcacgagggccagagggtgggccctgtgtctgctgtgggcgtgacagcccccaaggatgaggccgagaccacccaggccgtgcccaccatgaccccagagccccccatcaagccccggctgggggagctgactgtgacagatgccaccccagacagcctgagcctgtcctggatggtgcctgagggccagtttgaccacttcctggtgcagtacagaaatggagatggccagcccaaggctgtgcgggtgcccggccatgaagatggagtgaccatcagcggcctggagccagaccacaagtacaagatgaacctgtatggcttccacggcggccagagggtgggccctgtgtctgccatcggcgtgacagaggaggagacccccagccccacagagcccagcacagaggcccctgaggcccctgaggagcccctgctgggggagctgactgtgacaggcagcagcccagacagcctgagcctgtcctggacagtgccccagggccgctttgacagcttcaccgtgcagtacaaggacagagatggccagccccaggtggtgcgggtgcggggggaggagagcgaggtgacagtgggcggcctggagcccggcaggaagtacaagatgcacctgtatggcctgcacgagggccagagggtgggccctgtgtccacagtgggcatcacagcccccctgcccacccccctgcctgtggagccccggctgggggagctggccgtggccgctgtgaccagtgacagcgtgggcctgtcctggacagtggcccagggcccctttgacagcttcctggtgcagtacagagatgcccagggccagccccaggccgtgcctgtgtctggggacctgcgggctgtggccgtgtctggcctggaccctgccaggaagtacaagttcctgctgtttggcctgcagaatggcaagagacatggccctgtgcctgtggaggccaggacagccccagacaccaagcccagcccccggctgggggagctgactgtgacagatgccaccccagacagcgtgggcctgtcctggacagtgcctgagggggagtttgacagctttgtggtgcagtacaaggacaaggatggccgcctgcaggtggtgcctgtggccgccaaccagcgggaggtgacagtgcagggcctggagcccagcaggaagtaccgcttcctgctgtatggcctgagcggcaggaagaggctgggccccatctctgctgacagcaccacagcccccctggagaaggagctgcccccccacctgggggagctgactgtggccgaggagaccagcagcagcctgcggctgtcctggacagtggcccagggcccctttgacagctttgtggtgcagtacagagacacagatggccagcccagggctgtgcctgtggccgctgaccagaggacagtgacagtggaggacctggagcccgggaagaagtacaagttcctgctgtatggcctgctgggcggcaagaggctgggccctgtgtctgccctgggcatgacagcccctgaggaggacaccccagcccctgagctggcccctgaggcccctgagcccccagaggagccccggctgggcgtgctgactgtgacagacaccaccccagacagcatgaggctgtcctggagcgtggcccagggcccctttgacagctttgtggtgcagtatgaggacaccaacggccagccccaggccctgctggtggatggagaccagagcaagatcctgatcagcggcctggagcccagcaccccctaccgcttcctgctgtatggcctgcacgagggcaagaggctgggccccctgtctgctgagggcaccaccggcctggccccagctggccagaccagcgaggagagccggccccggctgagccagctgtctgtgacagatgtgaccaccagcagcctgcggctgaactgggaggcccctcctggggcctttgacagcttcctgctgcgctttggagtgcccagccccagcaccctggagccccacccccggcccctgctgcagcgggagctgatggtgcccggcaccaggcacagcgctgtgctgcgggacctgcggagcggcaccctgtacagcctgaccctgtatggcctgcggggcccccacaaggctgacagcatccagggcacagcccggaccctgagccctgtgctggagagcccccgggacctgcagttcagcgagatccgggagaccagcgccaaggtgaactggatgcccccacccagcagagctgacagcttcaaggtgtcctaccagctggctgatggaggagagccccagagcgtgcaggtggatggccaggcccggacccagaagctgcagggcctcatccctggggcccgctatgaggtgacagtggtgtctgtgcggggctttgaggagagcgagcccctgaccggcttcctgaccaccgtgcctgatggccccacccagctgcgggccctgaacctgacagagggctttgctgtgctgcactggaagccaccccagaaccctgtggacacctatgatgtgcaggtgacagcccctggggccccacccctgcaggccgagaccccaggcagcgctgtggactaccccctgcatgacctggtgctgcacaccaactacacagccaccgtgcggggcctgcggggccccaacctgaccagccctgccagcatcaccttcaccaccggcctggaggccccccgggacctggaggccaaggaggtgacccccaggacagccctgctgacctggacagagccccctgtgcggcctgctggctacctgctgtccttccacacccctgggggccagaaccaggagatcctgctgcccggcggcatcaccagccaccagctgctgggcctcttccccagcaccagctacaatgcccggctgcaggccatgtggggccagagcctgctgccccctgtgtccaccagcttcaccactggaggcctgcgcatccccttcccccgggactgtggggaggagatgcagaatggagctggggccagcaggaccagcaccatcttcctgaatggaaaccgggagcggcccctgaatgtgttctgtgacatggagacagatggcggcggctggctggtgttccagaggaggatggatggccagacagacttctggagggactgggaggactatgcccacggctttggaaacatctctggagagttctggctgggcaatgaggccctgcacagcctgacccaggccggggactacagcatgagggtggacctgcgggctggagatgaggccgtgtttgcccagtatgacagcttccacgtggacagcgctgctgagtactaccgcctgcacctggagggctaccatggaacagctggggacagcatgagctaccacagcggcagcgtcttcagcgcccgggaccgggaccccaacagcctgctgatcagctgtgctgtgtcctacagaggagcctggtggtacagaaactgccactacgccaacctgaatggcctgtatggcagcacagtggaccaccagggcgtgtcctggtaccactggaagggctttgagttctctgtgcccttcacagagatgaagctgcggcccaggaacttccgcagccctgctgggggcggctag

SEQ ID NO: 201457 - DNA, 12735 bp, Artificial Sequence
  derived and/or modified sequence
atgatgcccgcccagtacgccctgaccagcagcctggtgctgctggtgctcctttctacagcccgcgcaggccccttttccagccgcagcaatgtgactctgccagctcccagacctccccctcaaccaggaggacataccgttggggcaggggtcggctcccccagttcgcagttgtatgaacacaccgtggagggtggagagaagcaggtggtcttcactcacagaattaacctgccacctagcaccgggtgcggttgcccaccgggtacggagcctcctgtcctcgcgagtgaggtgcaagccctacgtgtgagattagagatccttgaggaactcgtcaagggcctgaaagagcagtgcacaggcggctgttgcccagcttctgcgcaggccggaaccggccagacagatgtgcggactctctgcagcctgcatggcgtgttcgacctatcaagatgcacctgctcttgcgaaccaggctggggtggacctacatgttcagaccctactgatgcagaaatccccccaagttctccaccttccgcgtcaggtagctgtcccgacgactgcaacgaccagggcagatgcgtgcgcggtaggtgtgtgtgtttccccgggtatacgggtccttcatgtgggtggccatcgtgccccggggattgtcagggacggggtcgttgcgtccagggtgtctgtgtgtgcagggcggggttttccgggcccgattgcagccagcggtcatgccccaggggatgtagccagaggggccgatgtgaaggcgggcgatgtgtttgcgatcctggctacaccggggatgactgtggtatgcggtcttgccccaggggctgtagccaaagaggcaggtgtgagaatggaagatgcgtgtgtaatcctggatacactggagaggattgtggcgtacggtcttgtccccgcggctgcagccagcgcgggcggtgcaaggatggcaggtgcgtatgtgaccctgggtacacaggcgaagactgtggcacccgatcatgtccgtgggattgtggcgagggcgggcgatgtgtggacgggcgatgcgtttgctggcccggttacacaggcgaggattgtagcacccgcacttgtcctcgcgactgtaggggtagggggagatgtgaagatggtgaatgcatttgcgatactggctactctggagatgattgcggcgtgcggtcctgccctggcgattgtaatcagaggggcagatgcgaggacggcaggtgtgtgtgttggcctggttatactggaactgattgtggctcaagagcgtgtcctagggattgtagaggtcggggtagatgcgagaatggggtatgcgtttgcaacgcaggatactcgggggaagactgtggcgttagaagctgtcctggcgactgcaggggccggggtcggtgtgaatctggacggtgtatgtgctggccaggatacaccggacgggactgtgggactagagcctgccccggggactgccgcggccgtggaaggtgtgtggatggacggtgcgtgtgcaatccaggcttcactggggaagactgcggaagccggcgttgccctggggactgccgaggtcatgggttgtgcgaggatggcgtttgcgtttgtgacgccggctattcaggggaggattgtagtacacggtcttgccctggtggatgtcgaggcaggggtcaatgtctcgacggtcggtgcgtttgtgaggacgggtactcgggcgaagattgtggtgtgcggcagtgccccaatgactgctcgcagcatggagtgtgtcaggacggcgtgtgtatttgttgggaaggatacgtttccgaggactgttcaatcagaacgtgtccaagtaactgtcatgggaggggtaggtgtgaggaaggcaggtgtctctgcgacccagggtacactgggcctacatgcgcgacccgaatgtgccccgcagactgcagagggcggggtcgatgtgtccaaggcgtgtgtttatgccacgtgggatatggaggagaggattgcggccaggaagagccgcctgctagtgcatgcccaggcggctgcggacctcgagaattgtgcagagcaggccaatgcgtttgcgtcgaaggatttcgcggacccgactgcgccattcaaacctgtccgggcgattgtcgaggccgaggtgaatgtcacgatggcagctgtgtctgtaaagatgggtacgccggggaagattgcggcgaagaggttccaaccatcgagggcatgaggatgcatctgctggaagaaaccacagtacgcacagagtggacacctgcccccggcccggtcgatgcttacgagatccagttcattccaaccacagagggtgcttctccaccattcacagcgagagtaccctcctctgcatccgcctatgatcagcggggcctggctcccggacaggaatatcaggtaacagtcagagctctcaggggcacctcttgggggctacctgctagcaaaactatcaccaccatgatcgacggtccgcaggatctcagagttgttgcagtgactcctactacgctagagctggggtggctgcgcccgcaggccgaagtggacagattcgtggtgtcttacgtgtcagcaggcaaccagagggtgcgattagaggtgccacccgaagctgatggcaccctgctgacggatctgatgcccggcgtggagtacgtggtgacagtcaccgccgaacgggggagggcagtttcttatcccgccagcgtgcgtgcgaacacgggcagcagccccctcggactgctcggcactacagacgaacctcctccatccggtccctccactacacaaggggcacaggcaccgttactccaacagaggcctcaggagctcggcgaactgagggttttggggcgcgatgaaaccggtcgtctgcgcgtggtttggaccgcccagcccgacactttcgcatattttcagctgcgcatgagagtccctgagggccccggcgcccatgaagaagtgctgcccggagatgttcgtcaggctctagtgcccccccctccccccggcacaccctacgaactgtcgctacacggagttcccccaggggggaagccatctgacccgatcatttatcagggtataatggataaggacgaagaaaagccgggcaaatcaagcggacctccccggctaggcgagttgaccgtgacagataggacctccgattctttactcttgagatggacagtgccagaaggtgaatttgatagcttcgtgatacaatacaaggacagggacggccagcctcaggtggtgccggtcgagggcccccaacggagcgcggtgatcactagtttggaccccggcaggaagtacaaatttgttttgtacggtttcgtcggaaaaaagcggcacggcccactggtagccgaggccaagattctcccacagagcgacccatcaccagggactcctccccaccttggaaatctgtgggtgaccgatccaacaccagatagccttcacctctcctggaccgtgcccgagggtcagttcgatacctttatggtgcaataccgggacagagatggacgcccacaggtggtcccggtggaggggcccgaacgcagtttcgtggtttcaagtctggatcctgaccacaagtatcgatttaccctctttgggatagctaataagaaacgctatggcccacttactgctgatggcaccacagctcccgagcggaaggaagaacccccgcgccctgagttcctggagcagccccttctgggcgagttgaccgtcactggcgtgactccagattctctgcgtctcagttggacagttgcacagggccccttcgattcctttatggttcagtataaggacgcccaaggccagccccaagccgtgccggtagccggcgacgaaaatgaggttacagtgcccgggcttgatcccgatagaaagtataagatgaacttgtatggacttcgcgggcggcagagagtgggcccagaaagtgtagtagcgaagacagctcctcaggaggacgtggatgagacgccgtctcctactgagctggggacagaggcaccggagtctcccgaggaacctctcttgggtgagctgaccgtcaccgggtcctccccggacagtctatccttattctggacggtgccccagggatcttttgacagcttcacagtgcaatataaagaccgagatgggaggccgcgtgccgtgcgggttggaggcaaggaatccgaagttaccgttggggggctggagcctggacacaagtataagatgcacctgtatggcctgcacgagggtcaaagggtggggccagtttctgccgttggagtgacagcaccccagcaggaggagacacctcccgcaactgaatcaccactggaaccacggctcggtgagctgacggtcacagacgtaacccctaactccgttggattatcctggacagtacccgaaggacagttcgacagcttcattgtccagtacaaggataaagacgggcaacctcaggtagtccccgtagccgcggatcagcgggaagtgactgtgtacaacctggaaccagaaaggaagtataaaatgaatatgtacggattgcacgatggacagcgcatgggtcccctgtcggtagtaattgtgactgccccactccctcctgctcccgccaccgaagcttctaaaccgcctttggaacccagactaggcgaattgaccgttactgacatcacaccagattcggttggattgtcttggaccgtgccagagggagaatttgatagtttcgtagtgcagtacaaggaccgcgacggccaaccacaggtggtgccagtcgccgctgatcagcgcgaggtgaccatccccgacctggaaccgtctagaaaatacaagtttctcctctttgggattcaggatggcaagcgtagaagcccagtgtccgtggaggcaaaaacagttgccagaggggacgcctcacccggggccccacctcggttgggtgaactctgggtcactgaccctacacccgattcgctgaggctgtcctggacagttccggaagggcagttcgattctttcgtggtccagtttaaggataaagacggccctcaggttgtcccggttgagggacacgaaaggtcagttactgttaccccactcgatgcaggcagaaagtatcgattcctcctgtacggactgctcgggaagaaacgacatggccccttgaccgccgacggcacaactgaggcaaggtccgccatggatgacaccggtactaaaaggcctccgaagccgcgtcttggcgaagagctgcaggtgaccactgtgacacagaactctgtcgggctgtcctggacggtgcctgaggggcaattcgatagttttgttgtgcaatataaggaccgggacggccagcctcaggttgtaccggtagagggaagcctacgtgaggtttcagtgcccggcctggaccccgctcatcggtacaagctcctgttgtacggtttgcaccatggaaagcgcgtgggaccgatctccgcagtggcaattaccgcgggccgggaagagaccgagacggaaacgacagctccaacgccacccgctcctgaaccccacctgggtgaactcaccgtagaagaagccactagccacaccttacatctgtcttggatggtcaccgagggggagttcgatagtttcgagattcagtatacggaccgcgacggtcagctgcagatggtacgaattggtggtgaccgcaatgacatcacactgtccgggctggagagcgaccacaggtatttagtgaccctgtacgggttctctgatggcaagcacgttggccccgttcacgtagaggccctcaccgtgcccgaggaagagaagccctctgaaccccctacagctacgccggagccaccaattaagcccagactgggggaattgaccgtgaccgacgccactccggacagcctctctctgtcttggaccgtcccggagggacagtttgaccatttcctggtgcagtacaggaacggtgacggtcagcctaaagccgtgagagtacccggccacgaggagggcgtgactatcagcggtctggagcccgaccacaagtataaaatgaacttgtatgggttccacggcggtcagagaatggggcctgtcagtgtggtcggtgtaactgctgcagaggaagaaacaccaagccctacagaacctagcatggaggctccggagcccgctgaggagcctctgctcggggagcttacggtgactggtagttcccctgattccctgtctctgtcatggaccgtacctcaggggagattcgattcattcactgtgcaatacaaggatagggatggtaggccgcaggtcgtgagagttggcggcgaagaaagtgaggttacagttgggggacttgaaccaggccgcaagtataaaatgcacttgtacgggctgcacgaaggacgtagggtcggcccagtgagtgccgtgggggttaccgcgcccgaggaagagagccccgacgctcctctggctaagcttcggctcggacagatgacagtccgagatattactagcgacagtctatcactgtcttggaccgtgccagaaggccagttcgatcactttctggtacagttcaagaatggcgatgggcaacccaaagcggttcgggtgcctgggcatgaggatggggttactatatcaggactggaacctgaccacaagtacaagatgaatctgtacgggttccacgggggccaacgggtgggcccagttagcgccgtgggcttaaccgcccccggcaaggatgaggaaatggcgcccgcctccactgagcctcctaccccagagcctcccattaagccccggctcgaggagctgaccgtaacagacgctactccggattccctgtctttgtcctggacagttcccgagggccagttcgaccatttcttggttcagtacaaaaacggcgatggacagccaaaggccactcgcgtcccaggacatgaggacagagttactatttcgggactcgaacccgacaacaaatataagatgaacctttacggctttcatggtggacaacgggttggtccagtgtccgccattggggtcacggctgcagaagaggagaccccttccccaaccgagcccagtatggaagccccagagcctccagaggaaccccttctgggagagttgactgtgaccggatctagcccagactcactgtccctgtcctggaccgtaccccaagggcggttcgattcattcaccgtgcagtataaagacagagacggaaggccgcaagtggtgcgcgtgggtggagaagagtctgaagtcaccgtgggtggactggagccgggccgcaagtataaaatgcatctatatggacttcatgagggcaggcgagtgggacctgtgtctacagtcggagtgacagcccctcaggaagacgtagatgagaccccctctccgactgagcccggaacagaagcacccgggcctccggaagaaccacttctgggcgaactcaccgtgacagggtcctcaccggactcacttagcctgagttggacagtgccgcaagggcgatttgattcctttacagtacagtataaagatagggacgggcgcccccaggcagttagggtgggagggcaggagtccaaagtaacggtacgcgggctggaacccggcaggaaatacaaaatgcacttatacggcttgcatgaagggcggcgtttaggacccgtctcagctgtcggcgtgaccgaggacgaggctgagacgacccaggccgtgcccactatgacgccggaaccccccattaaaccacggctgggggaactcacgatgacagacgccacacccgattccctgtcgttgtcttggactgtaccggaaggacaatttgaccatttcctggtgcaatataggaacggagatggacagccaaaggcggtccgagtgcctggccatgaggatggtgttacgatctccgggctcgagcctgatcataagtataaaatgaatctgtacggtttccatggtgggcagcgcgtcgggcctataagcgtgatcggtgtgaccgccgccgaggaagagactcctagtcctaccgaactgtccaccgaggcgccagagcctcctgaagaaccactactgggcgagcttaccgtaacagggtcatcaccagattcactctcactttcttggactatccctcaggggcacttcgattctttcacggtgcagtacaaggacagggacgggcgtccacaagttatgcgagtccgtggagaggaaagtgaagttactgtgggaggactggaacctggcagaaagtataaaatgcacctgtacggcctgcatgagggtagacgagttggacctgtgagtacagtgggtgttacagcaccggaagacgaggccgagaccacgcaggcggttccaacaaccacgccagagcctccgaataagcctcgactgggagagctgactgtgacagatgcgactccagacagtctctctctgagttggatggtgcccgaggggcaattcgaccactttctggtccagtacaggaatggggacggccagcccaaagtggtgcgtgtgcctggtcacgaggacggagtcacgatctcagggctggaaccagaccataagtataagatgaacctttatggattccatgggggccagcgcgtcgggcctatcagcgtaatcggtgtgactgctgcggaggaggagacccccgcccccacggagccctctaccgaagctcctgagccccccgaggagcctctgctcggcgaacttactgtgacagggagcagtcccgactcactgtctctgtcgtggacaattccacagggcaggttcgactcattcacagtgcaatacaaggatcgggacgggcgccctcaagtggtcagagtccgaggggaagaatcagaggtcaccgtgggcggactggagcctgggtgtaagtataaaatgcacctgtatggactgcatgagggacaacgggtgggaccagtttcagcagtcggcgtgaccgccccaaaggatgaggctgaaaccactcaggccgtgccgaccatgactcccgaaccgcccattaagcccaggctgggggaactgacagtaaccgacgctaccccagatagcctctcactgagctggatggtccccgaaggacagtttgaccactttctggtacagtatcgcaacggagatggacagccaaaggcagtgagagttccgggccatgaagacggcgtgaccatctcaggcctggagcccgaccacaagtacaagatgaacctgtatggatttcacggggggcagagagtggggcccgtttcggctattggagtgactgaagaggaaactccctccccaaccgaaccttccacagaagcccccgaagcccctgaagaacccttgctcggagaactgaccgtcaccgggtcctctccagactcactgtccctttcgtggaccgtaccacagggtcggttcgatagtttcacagtacagtacaaagatcgggatgggcagcctcaggtcgtgcgggtgaggggcgaggagtcggaggtgacagtggggggactcgaacccgggcggaaatacaaaatgcacctctacggcctccatgagggccagcgtgtgggtccggtctcgacggtgggcatcaccgccccattgccaacacctctccctgtcgaaccaaggctgggcgagctggcagtggccgcagtgacaagcgatagcgtaggactgtcttggactgtagctcagggtcctttcgattcatttctggtccagtacagggatgcacaagggcagccgcaggctgtgcccgtcagcggcgatctgagagccgtggccgtgagtggcctggatcctgcccgtaagtataagttcttattattcggcctacagaacggtaagcgccatggtcccgttcctgttgaggccagaacagcgccggacaccaagcctagccctcgcctgggagagctgaccgttaccgatgcaactccggactctgtcggcctgtcctggaccgttccggaaggcgaattcgacagctttgttgtacagtacaaagataaggacggccggctgcaggtggtgccagtagctgctaaccagagggaggtgaccgtacagggccttgagccttcgagaaagtacagatttctgttatacggcttgagcggcagaaaacgcttgggccctatctctgcggactccacgactgctcctctagagaaggagctgcctccccatttgggcgaattgaccgttgccgaagaaacttcctctagcctgcgtctgtcatggactgttgctcaagggccctttgatagcttcgtcgtgcagtacagggacaccgatgggcagccgagggccgtacctgttgcggccgatcagcgaaccgttactgtcgaggacctggaaccaggcaaaaagtacaagttcttgctctatgggctattaggaggcaagagactaggtcctgtgtctgcgttaggcatgacggctccagaggaggacactcccgccccggagctggcgcctgaagcccctgagccccccgaagagcctcgccttggtgtactcaccgtcactgatacaacacccgactctatgagactgtcttggtcagtggcccagggcccatttgacagtttcgtagtgcaatacgaggacaccaacggacagccccaggccttactggtggacggggaccagagcaagatcctgatctctggactcgagcctagcacaccctataggttcctgttgtacgggttgcatgagggcaagcgcctcggtccactgtcagcagaaggtacgacggggctggctccagcaggtcagacatcggaggaaagtcgtccacggctttcacaactttcagtgacagacgtaaccactagtagcctccggctgaactgggaggcccccccgggcgccttcgattcctttctactcaggtttggagttccctccccatccactctcgagccacaccctcggccgctcctgcagcgtgagttgatggtgccaggtacgagacactccgctgtgctgagggatctcagatctgggacactatattcattgacattatacggactcagagggccacacaaagcagacagtatccaaggaaccgctaggacactatcccctgtgcttgaaagtcccagagacctgcagttctctgaaattagggagacatctgctaaggtgaactggatgccccctccaagccgggccgacagtttcaaggtttcataccagttggctgacggcggcgagccccagtctgtccaagtggacggccaggcccgcactcagaagctgcagggtctcataccaggcgcaagatacgaagtgacagtcgtatccgtgaggggctttgaagagtctgaaccattgacaggatttctcactaccgtccccgacgggccaactcagctgagggcacttaatctgaccgaagggttcgccgtcctgcactggaaacccccacagaatccggttgatacctacgacgtgcaggtgacagccccaggggcacctccccttcaggcggaaacaccaggtagcgccgtggactatccattgcacgaccttgtgctgcacacaaattacactgctacagtcagaggcctccggggacctaacctgactagccccgccagtatcacattcactaccggcctcgaggcacctcgagaccttgaggctaaggaggtcacgccgaggacggcactcttgacgtggactgagccccccgtccgacctgctggttatttattatcattccataccccagggggccagaaccaggagatccttttgcctggaggaataacatctcatcagctattaggactcttcccctcaacttcatataacgcaaggctgcaggcgatgtggggtcaatcgcttctgccacccgtgtcaacaagttttacaactggcggcctcaggatcccctttcccagggactgcggtgaggagatgcagaacggggctggtgcgtcgcggacatccactatttttctgaatggcaaccgggaacgcccactcaatgtgttctgcgacatggaaaccgatggggggggctggcttgtgttccagcgccgcatggatggccagactgatttttggcgcgattgggaggactatgcacatgggttcggtaatattagtggcgagttttggttagggaatgaggcactgcattcactgactcaggccggagactacagtatgagagttgacctgcgcgccggcgatgaggccgtgttcgcccaatacgatagctttcacgtggacagcgcagccgagtattaccgactccatcttgaaggttatcacggaactgcaggggacagcatgtcctatcatagcggctcggtattcagcgcccgcgatagggatccaaactctctactcattagctgcgcagtgtcttacaggggggcgtggtggtaccgcaactgtcactacgccaaccttaacggcctttatggttccaccgtcgaccaccagggagttagctggtatcattggaagggattcgagttctccgtaccatttacagaaatgaagctgagaccaagaaatttccgatctcctgccggcggcggttag

SEQ ID NO: 201458 - DNA, 12729 bp, Artificial Sequence
  derived and/or modified sequence
atgatgcccgcccagtacgccctgaccagcagcctggtgctgctggtgttgctgtccaccgccagggcaggaccattttcttcacgcagcaacgtgacccttccggccccacggccgcccccccaacctggaggtcacaccgtcggagcgggggtaggctctccttcctcccagctatacgagcacaccgtggagggcggcgaaaagcaggtcgttttcacccaccgtataaatctgcccccatccacgggctgtggctgtcctcccggcaccgagccacctgtactagctagcgaggtgcaggcattgagggtgaggctggaaatccttgaagaactcgtgaaggggttgaaggagcaatgcaccggtggctgttgccctgcgagcgcccaggcaggaacgggccagaccgacgtgaggaccctgtgcagcctgcacggagtgttcgacctttcccgctgcacatgttcctgtgagccaggctggggcggaccaacatgttctgatcccacagacgcagagatcccaccaagtagccctccatctgcctccgggtcttgcccagatgattgtaacgatcaggggcgctgtgtgagggggagatgcgtttgttttccgggatacactgggcccagctgcggatggccttcttgccccggggactgccagggccggggtcggtgcgtacagggcgtctgcgtgtgtcgggccggcttctcagggccagactgcagtcaaaggagctgtcctcgcggctgttctcaaagaggaaggtgcgagggggggcgatgcgtatgtgatcctggttataccggcgatgattgtggcatgcgcagttgccctagaggttgctctcaaagaggccggtgcgaaaatggcagatgtgtatgcaaccctggctataccggagaggattgcggggtcaggtcgtgccctaggggatgcagccagcgtggcagatgtaaagatgggaggtgcgtctgcgaccccggctatacaggcgaggactgcgggacccggtcatgcccttgggattgcggcgaggggggtcgctgtgtggatggtcgttgtgtgtgctggccaggatacaccggtgaggattgctcaacgcgaacctgcccgagggactgtagaggccggggccgctgtgaagatggcgagtgtatttgcgacacaggttattcgggagacgattgcggggttcgatcttgccccggagattgtaaccagcgcgggcgctgtgaggacgggagatgcgtgtgctggcccggctatactgggacggactgcgggagcagagcatgtccgcgggactgtagaggaaggggccgctgcgagaacggagtctgcgtgtgcaacgctggctactctggagaagactgcggcgtgagaagctgtccaggggactgtcgcggaagaggacgatgtgagtccgggcgatgcatgtgttggccaggctatactggtcgagattgtggtactcgcgcctgtccaggtgattgcagaggtaggggacgctgtgtggatggaaggtgcgtatgtaacccaggtttcacaggagaggattgcgggtcgcgccggtgccccggcgattgtagagggcacggcctgtgtgaagatggggtgtgtgtctgcgacgctggatactctggtgaggactgcagcacacgctcttgcccagggggttgtaggggaagaggccaatgcctcgacggccgatgcgtctgcgaggacggctactctggagaagattgtggcgttcggcaatgccccaacgattgtagccaacatggcgtttgccaagacggcgtgtgtatctgttgggagggttatgtcagtgaggactgcagcatccgtacgtgccctagtaactgtcatggacgggggcgctgcgaggaagggcggtgcctatgtgatccaggctatactgggcctacttgtgccacgagaatgtgtcccgctgattgtcggggccgcggccgctgcgtccaaggcgtgtgtctgtgccatgtcggctatggaggtgaggactgtggtcaggaagaacccccagccagcgcatgtccaggtggatgtggcccaagggagctgtgccgtgctggccagtgcgtgtgcgttgagggattccggggcccagactgtgccattcagacatgccctggagactgtagggggagaggcgagtgccacgatggcagctgcgtgtgtaaggatggatacgccggtgaggattgcggagaggaggtccctactatcgaaggcatgcgtatgcacttactggaggagaccactgtgagaacagagtggaccccagccccaggccctgtcgacgcatatgaaatccagtttattccaactacagaaggcgcttctcccccattcacggccagggttccaagtagcgcctctgcctatgatcaaaggggacttgcacccgggcaagaatatcaggtgaccgtgagagctctaagaggaacgtcctggggtctccccgcttccaagaccatcaccaccatgattgacggtcctcaggacctgcgcgtggtggcagtgaccccgactaccctggagctgggctggctgcgaccccaagctgaagtggatagatttgtcgtgtcgtatgtgtccgccggcaatcaacgggttcgactggaagtccctcccgaagccgatgggacccttctaactgaccttatgccaggggtcgagtacgtggttacagtaacggccgaacgtggacgagccgtctcatacccagctagtgttcgagcaaatacaggctccagtcccctcggtctgctggggactactgacgaaccacctccctctggacccagtacgacgcaaggcgctcaggctcccttactgcagcaaaggccacaagaactaggggaacttagagtcttaggaagagatgagactggccgcctgcgcgtagtgtggactgcacaaccagacaccttcgcttacttccagcttcggatgagagtgccggaggggccgggcgcccacgaggaagtcctgccgggcgacgtacgccaggccctggtgcctcccccaccgccaggtaccccatatgagttgtccctgcatggcgtcccaccgggggggaagccctctgacccgatcatttaccaggggattatggacaaagatgaagagaagccaggcaaatcctcaggtcccccccgcctcggcgaactgaccgtcaccgaccgcacgtccgatagcctactactcaggtggaccgtcccagaaggcgagtttgactcctttgttatacagtataaggatagagacggccaaccccaggtagtacccgttgaggggcctcaacgcagtgccgtcatcacctctctggacccgggtagaaagtacaaattcgtgctatacggttttgtcgggaagaaacgacacggacctctggttgcggaagctaagattctgccccaatccgaccctagcccaggcacacctcctcacctcggcaatctctgggtgaccgacccaacacctgactctttgcacctgtcatggactgtccccgagggtcagtttgatacattcatggtgcagtaccgtgacagagatggccgcccccaagttgtaccggtcgaggggccagagagaagcttcgtagtatctagtctggatccagatcacaagtacaggttcaccttatttggcattgccaataagaaacggtacggcccccttaccgctgacggaaccactgcccctgaacggaaagaggagccccctcggccagagtttctcgaacaaccgctgttgggggaactgaccgtaacgggggtgacaccagatagccttagactgagttggacagtggcccagggcccattcgattcgtttatggttcaatacaaagacgctcaaggacagcctcaagccgtgcccgtagctggagacgaaaacgaggtcaccgtcccggggctggatccagaccgaaagtataaaatgaacctttacgggctgagagggcgccagcgggtcggccctgaaagcgtggtggcgaaaacagccccccaggaagatgtagatgaaactcccagccctactgaattagggaccgaggcacctgagtctcccgaggaaccacttcttggagagcttacggtcacagggtcttctcctgactcattatcccttttctggacggtgccacagggatcttttgacagtttcaccgtgcagtacaaagaccgggacgggcgtccaagagccgtcagggtcggggggaaggaatcagaggtgactgtgggcggcctggagcctggccacaagtacaaaatgcacctgtacggcttgcacgagggccaaagagtgggacctgtatccgcggtaggagtgacagcccctcagcaggaagaaacccccccagctacagagtcccctctggaaccccgtctcggagaactaaccgtgaccgatgttacccctaatagcgtggggctttcttggacagttccagagggacagtttgacagctttattgtgcaatacaaggataaggacggccaaccacaggtcgtgcccgttgccgccgatcagcgggaagttaccgtgtacaacttagaaccagaacggaaatacaaaatgaacatgtacgggctgcacgatgggcagagaatgggccctctttcagtcgtgatcgttacagcgcctctacctcctgctccagccactgaagcttccaagccccccctcgaacctcgactgggggaactgacagtgaccgacattactcctgattccgtgggactatcttggaccgtgccggaaggtgaattcgacagcttcgtcgtccagtataaggaccgcgatggccagccacaggtggtccctgtggctgccgatcaacgggaagtgactatcccggacctggaaccctcacgtaagtataaattcctcctgtttggcatccaagacggtaagcgacgaagccccgtcagtgtggaggcaaagaccgtggctcgcggcgatgcatcgccaggggcccccccaagactcggcgagctgtgggtaacagatccgaccccggactccttacggttgagttggaccgttcctgaaggccagtttgactcctttgtcgtgcagttcaaggataaagacggaccacaggtcgttcctgtggagggacacgagagaagtgtgactgttactccactggatgctggtcgcaaataccggttcttgctgtacggtttgctgggtaagaaaagacacggcccactgacggcagatgggacgaccgaggcaagatcggctatggacgacactggcactaaacggccacccaaaccaagacttggagaagaattacaggtaacaacagtaacccagaactcagttggcctgtcttggacagttccagaagggcagttcgattcattcgtcgttcagtataaggatcgtgacgggcagcctcaggtagttcccgtggaaggaagcctgcgtgaagtctctgtgcccggcctggatccggcccaccgatataagctgctgctgtacgggttacatcacggaaaacgggtgggccccatcagcgctgtggctattaccgccggcagggaggaaacagagactgagacgacggcaccaacccctccggctcccgagccccacctgggggagctgaccgtagaagaagctacgtctcacactctgcatctgtcctggatggtcaccgagggcgaattcgattcttttgaaattcagtataccgatagagatgggcagctgcagatggtgcgcattgggggagacaggaatgacattaccctctctgggttagagtccgaccaccgatatctggtgaccctgtacggcttttctgatggaaaacacgtggggccagtccatgtcgaagcactcaccgtgcccgaagaggaaaagccgtcagagcctcctacagcaaccccagaaccgccaatcaaacctaggctcggggaactcaccgtaaccgatgctaccccggatagcctgtcgttgagttggacagttcccgagggtcagttcgaccacttcctagtccagtaccgaaatggagacgggcagcccaaggcagttagggtaccaggtcacgaggagggcgtgacaatttctgggctcgagccagatcataagtacaagatgaatttatatgggtttcatggaggtcagagaatgggccccgtaagcgtggtgggggtcactgcagctgaggaggagaccccatccccaaccgaacctagcatggaagcccccgagccagctgaggagcccctcctcggcgaattaaccgtcacaggctccagcccagactccttaagcctaagctggaccgtaccccaggggcgttttgatagtttcacagtccagtacaaagatcgggatggccgcccccaggtagttcgcgtcggtggtgaggagtcagaagtgaccgtaggcggcctggagcccgggaggaagtacaagatgcatctttacggactccacgagggtcgaagagtcgggcccgtgagcgcagtgggcgtgaccgcccctgaagaagaaagccctgatgcccctcttgcgaaactgcgcctgggccaaatgacagtgcgcgatatcactagcgactctctcagtctgtcttggactgtacccgagggccagtttgaccatttcctggtgcagttcaagaacggggatggccaacctaaggcagtcagggtgccagggcatgaagacggggtcacaatatcaggattagagccagaccacaaatataagatgaacctgtacgggttccatggcggtcagagggtcggcccagtgtccgccgtgggcctaacggctccaggtaaggacgaggagatggctccagcctctacagagccacccactccagagccccccattaagcctcggctcgaggagctgactgttactgatgccactccagactccctgtcattgagctggactgttcctgagggccaatttgaccatttcctcgtgcagtataaaaatggcgacggacagccaaaggccacccgcgttcctgggcacgaggacagagttacaatatctgggctcgagccagataacaaatataagatgaatttgtatggctttcatgggggtcaaagggttgggcccgtttcagctatcggcgttaccgccgccgaagaggagactccatcccccactgagccttcaatggaggctcctgagcctccggaggaaccactgctcggggagctcacggtgaccggttcatcacctgactcactaagcctgtcgtggaccgtgccccagggtcgctttgatagctttacggtgcagtacaaagacagagacggtcgccctcaggttgtgagagtggggggggaagagtccgaagtcacggtaggtgggttagagccaggcaggaaatacaaaatgcacctctacgggttacacgagggcaggagggttggcccagtgtccacagtgggcgtgacggctcctcaggaggatgtggatgagaccccgtcacccactgaacccggcacagaagctcccggaccgccagaggagcctcttctgggagagcttactgtaactggaagtagcccagacagcctatctctttcctggacagtgccacagggccgcttcgatagtttcacagtgcagtacaaagacagggatggaagaccccaggccgtgcgcgtgggcggccaagaaagcaaagttactgtgaggggactggaacccggcagaaagtacaaaatgcacctctatggcctgcacgaggggcgaaggcttggcccggtgtccgccgttggggtcacagaggacgaagctgagacgacccaggccgtacccacaatgactcctgagccaccgatcaagccacgactgggcgaactgacaatgaccgacgcgacaccggactctctgagcctcagttggacggtgcccgagggccagttcgaccacttcttggtgcaataccggaatggcgatggtcagcctaaagcggtgagggtcccaggacacgaggatggcgtgacaattagtggactggaaccagaccataaatacaagatgaacttgtacggctttcatggggggcagcgagtggggccaattagtgttataggcgtgacggcggccgaggaggagacaccatctccaaccgagctgtcaacagaggcaccagagcccccagaagagcctctccttggcgagctgaccgttaccggaagcagccccgactcactgtctttgtcttggacgattccccagggtcacttcgattccttcacggtgcagtacaaagacagagacggccgcccacaagtcatgcgggtccggggagaagaatctgaagtgactgtggggggcctcgaacctgggcggaagtacaagatgcacttatacggcctacatgaaggccgaagagtcggaccagttagtacagtcggggtcacggaggacgaagctgaaactacacaggccgtgcccactactaccccagagccgccgaacaaaccccgtctgggggagctgactgttaccgacgctacacccgattcgttgtctttatcatggatggtccccgagggccagttcgatcatttcctggtgcagtacaggaacggtgacgggcaaccaaaggtggtgagggtccctggccatgaagatggcgtgaccattagcgggcttgaacctgaccataagtataagatgaacctgtatggctttcatggggggcagcgagtcggaccgatatctgtgattggagtgactgcagctgaggaggagactccggcgcccacagagccctcgacggaggcccccgaacccccagaagagcctctactgggcgaactgactgtaacagggtctagccccgacagtctgagcttgtcctggactatcccgcagggtcggttcgacagctttacagttcagtataaagaccgcgacggcagaccccaggtggtgagggttcgcggggaagaatctgaggtgactgttggcggtcttgaacctgggtgtaaatataagatgcacctctacgggctacacgaagggcagcgagtgggtcccgtgtctgcagtcggagttactgcccccaaagatgaagccgaaacaactcaggccgtccccacaatgactcctgaaccaccaataaaacccaggctgggtgagctgactgttaccgacgccacacccgacagtctcagtctgagttggatggttcctgagggacagttcgatcacttcctggttcagtacaggaacggcgatggccagcccaaggccgttcgcgtgccaggccacgaggatggcgtcaccatttccggtctcgagcctgaccataagtataaaatgaacctttatggctttcatgggggacagcgggtcgggccagtttcagccatcggagttactgaggaggaaactccttcccccactgagccgtccaccgaggctcctgaagctcccgaagaacctctgttgggcgagttgacagtcaccggtagttcccccgatagcctcagcctgagctggacggtaccccaaggcagattcgacagctttaccgtccagtacaaagatcgtgatggccagccacaggtagttcgagtgcgaggagaggagagcgaggtcaccgtgggcggactggagcccggtaggaagtacaagatgcatctgtatggactacatgaaggacaacgtgtcggcccagtgagcactgtcggcataaccgcacctcttcctacgccactgcccgtggagcctcgcctgggggaacttgccgtggccgcggttaccagcgacagcgtcggtctgtcttggacagtcgcacagggaccatttgactctttcctggtgcagtacagagacgcacagggccagccacaggccgttcctgtttccggcgacctcagagccgtggcggtgtctggactcgatcccgcacgaaaatataagttcctgctttttggcctgcagaacggaaagaggcatggacctgtccctgttgaggctaggacagcccctgatacaaagccatcgccccggctcggtgaattaaccgtgaccgacgccacccccgacagtgtaggccttagttggactgttccagagggagaattcgactcctttgttgtacaatataaagataaggatggacgcctccaggtagtacccgttgcagctaaccagcgcgaagtcaccgtgcagggcctggaaccatcacgcaagtatcggttccttctgtatgggctaagcgggcgcaaacggctgggccccataagcgctgactctaccaccgcacccctggagaaggagctgccccctcacctgggcgaacttacagtagctgaagagacatccagcagtctaaggttatcctggacggtggcccagggtccctttgattccttcgtagtgcaatatagagacaccgatggccaacccagagctgtgcccgtggctgcggaccagaggactgtgactgtggaagacctcgagcccggaaagaagtataagtttctgctttacgggcttctcggtggtaaaagattgggtcccgtgagcgcactggggatgaccgcacctgaggaggatacccccgcacctgagttagcgcccgaggcccctgagccaccagaggaaccaagactaggggtgctgaccgtcacagatacgaccccagacagcatgcgattgtcatggtcagtagcgcagggtccctttgactcatttgtggtgcaatatgaagacaccaacggtcagccacaggctttgttggtggacggagaccaatctaaaattctcatctccggacttgaacctagtaccccatacagattcttgctctatggactgcacgaagggaagcgactcggacctctgtccgctgaggggaccactggcctggcacccgccggccagacatcagaggagtcacgtcctcggctctcgcagctgagcgtgaccgacgtgactacctcttcacttaggctgaactgggaggcacctcccggcgctttcgatagcttcctgcttcgatttggagtgcctagccctagcaccctcgagcctcaccctcgcccacttctgcagcgcgagctgatggtgccaggaaccagacactctgctgtgttgcgggacctgaggtcaggaactctgtactctctcacactatacggacttcgcggacctcacaaggctgactctattcaaggcaccgcccggacgttgagccccgtcctggagtcaccacgcgatctgcagtttagcgagatccgcgaaactagcgccaaagtcaactggatgcccccccctagtagagcggatagttttaaagttagctaccagctagccgatggaggcgaacctcagtcagttcaggttgacggacaggccaggacccagaaattgcagggtttgataccgggtgcacgctacgaagtaacagtggtttccgttagggggtttgaagaaagtgagcctctcacaggtttcctgacaacagtgcccgacggaccaacccagctgagagccttgaatctgacagaggggttcgcggttctgcattggaaaccccctcagaacccggtggacacctatgacgtgcaagtcacagccccaggcgctccccctctgcaggcagaaacaccaggtagtgcagttgattacccactgcacgatctggtgctgcacaccaactatacagccacggttagaggcctgagggggcctaatcttacaagccccgccagtatcacctttactacagggcttgaggctccacgagacttagaagccaaggaggtgacacccagaacagcactgctcacttggacagaacccccagttcgaccggccggctacctgctgagttttcacaccccaggcggacaaaatcaagaaattttgctgccaggcggcatcacctcacaccagctgctgggactctttccttccacttcatacaacgcccgactccaggctatgtggggccagtctttgctgcctccagtgtctactagtttcaccaccggaggcctccgtatcccttttccacgcgactgcggagaggaaatgcagaacggcgccggtgcttccaggacttccaccatcttccttaatggaaaccgcgagaggccactcaatgtgttttgcgatatggaaacggatggcgggggatggctggtcttccagagacggatggatggccaaaccgacttttggcgagattgggaagactatgcacatggattcgggaatatcagcggcgaattctggctcggcaatgaggccttacactcccttactcaagcgggcgactactcaatgcgggtagatcttagagcaggggacgaggccgtgttcgcccagtatgactcctttcacgttgactcagctgccgaatactaccgcttgcatttggaggggtaccatggaaccgcaggcgatagtatgagctatcatagtggctcagtcttttcagcaagagacagggatccaaattctttgctgatatcatgcgcggtgtcttaccgcggggcctggtggtaccgtaactgccactacgccaacctcaacggtttgtacgggtcaacagtggaccaccagggcgtttcctggtaccattggaaggggtttgagttctccgtgccattcacagagatgaagctgagaccgcgcaatttccgctcacctgctggcggaggctag

SEQ ID NO: 201459 - DNA, 12735 bp, Artificial Sequence
  derived and/or modified sequence
atgatgccagcgcaatacgctctgacctcttccctggtgcttctggtgttgctctctactgccagggcaggtccgttcagctcgagaagcaatgtaaccttgcccgctccacgaccgcctcctcagccaggtggccacaccgttggggctggggtggggtcacctagctcccagctatatgagcatacagtggagggaggtgaaaagcaggtcgtgtttacccatcggataaacctgccaccttccaccggctgtggctgtcccccaggaacggagccccctgttttggcctcagaagtgcaggccctcagggttcggctcgagatcctcgaggaacttgtgaaaggcctgaaagagcagtgcaccggcggttgctgtcccgcaagcgctcaagcaggaaccggtcagaccgacgtcaggaccctgtgtagtctgcatggggtatttgatctctcccggtgtacttgttcttgcgaaccaggttgggggggtcccacatgctctgaccccaccgacgcagagattcccccttctagcccaccctctgccagcggtagctgtcccgacgactgtaatgatcagggaaggtgcgtgaggggcagatgtgtgtgctttccagggtacacaggaccatcctgcgggtggcccagttgccctggcgattgccagggtaggggtcgttgcgtccagggagtttgtgtatgccgagcgggattttctggtccagactgctcccaacggagctgccctagagggtgctctcagagagggaggtgcgagggaggaaggtgcgtttgtgaccccggatatactggcgacgattgcggaatgagatcatgcccacgcggatgctcccagagaggtagatgcgagaacggacgatgcgtttgtaaccccggttatacaggcgaggactgtggcgttaggtcctgccccaggggctgctcccagcggggtaggtgcaaggacggcaggtgtgtgtgcgatccaggttacacaggcgaggactgcggcactaggtcctgtccctgggactgtggagaaggaggcagatgtgtcgacgggaggtgcgtgtgctggccaggctacaccggcgaggactgctccacacggacatgcccccgagactgtagaggtcgcggacgatgcgaagacggagagtgcatctgcgacacagggtactctggggatgattgtggcgtcaggtcctgtcccggagattgcaatcagaggggaagatgtgaagatggcaggtgcgtgtgttggcctggatacactggaacggattgcgggtcaagggcctgtccgagggactgccgcggaagggggcgatgtgaaaacggggtgtgtgtttgtaatgccggatacagcggagaagattgcggcgtccggagctgcccaggtgactgccgaggtagggggagatgtgagagcgggcgatgtatgtgctggcctgggtataccgggagagattgcggtacgcgagcctgcccaggagactgcagaggtagaggtagatgtgtggacgggcgttgtgtctgcaacccaggatttacgggcgaggactgtggcagtagaaggtgtccgggtgattgccggggacacgggctgtgtgaagatggggtttgcgtctgtgacgcaggttactccggtgaggattgttccacccgcagttgcccaggcggatgtcgaggacgaggccaatgccttgacggacgctgcgtgtgcgaagacggctatagtggggaggattgcggcgtgcgtcagtgcccaaatgattgttcgcaacacggggtttgccaggacggtgtttgtatctgctgggaaggttatgtatccgaggactgtagcatccggacgtgtccgagcaactgccatgggagaggcaggtgtgaagagggccgttgtctgtgcgaccccggatatactggccctacctgcgcaactcgaatgtgtccggctgattgcaggggcaggggtcgctgtgtgcagggggtgtgcctctgtcacgtaggctacggcggagaggattgtgggcaggaggagccacccgcttccgcgtgccccggaggctgcggtcccagggaactctgccgcgcaggacaatgtgtgtgtgtcgaaggttttagaggacctgactgcgccatccagacctgccctggcgattgcagggggcgaggggaatgtcacgatggttcctgcgtttgcaaagacgggtatgccggtgaagattgcggcgaagaagttcccacaatagaagggatgaggatgcatttgctggaggaaaccacagttcgtacggagtggacccctgcacctggtccagtggatgcctacgagatccagttcatccctacaactgagggcgctagtcctccattcactgctcgggtcccttcatctgcttccgcttatgatcagcgcggactggctcccggtcaggaataccaggtgaccgtgagggctctgaggggcacgagttggggattgcccgcatcaaagactatcaccacaatgattgatggtccccaggatctgagagtggtggccgtgacccctaccaccctcgagctgggctggcttcggcctcaagccgaggtggaccgcttcgtagtgagctatgtgagtgcaggaaatcagcgcgtgcgcctggaggtgccacctgaagccgacggtacccttttaacggatctcatgcctggggtcgaatacgtagtgaccgttacagctgagcgcggacgtgcagtgtcataccccgctagcgtgcgtgcgaataccggatctagcccgctcggcctcctaggcaccacagatgaacctcccccaagtggaccaagtaccacacagggcgctcaggcacctctactccagcagaggcctcaggagcttggagagctgagggtgctgggcagagacgaaacaggaagattacgagttgtatggaccgcacagcctgatacctttgcttacttccagctcagaatgagggtgccagaagggccaggagcacatgaggaagtgcttcccggagacgtccggcaggccttggtcccacccccaccgccaggcacgccctacgagctatcattgcatggcgtccctccgggtggaaaaccatccgaccccattatataccaaggcataatggataaagacgaggagaagcccggaaagtctagtggtccacccagacttggagagctgacagtaactgaccggaccagcgatagtctactgctgcggtggactgtccccgaaggggagttcgacagtttcgtcatccagtacaaagatagggatgggcagccacaggttgtccccgtcgaagggcctcagaggtctgccgtgatcacctctctcgatccgggacgcaagtataaattcgtgctgtacggcttcgtgggaaaaaagcgacacggtccattagtagcagaagccaaaatactgcctcagagtgacccttcgcctggaacaccaccccacctaggaaatttgtgggtgactgacccgactcctgattccctgcatctctcttggaccgtaccggaggggcagttcgacacttttatggttcagtatcgggacagagatggaagacctcaggttgtccccgttgaaggtcctgaaagatcgttcgttgtcagtagcctggatcctgatcataaataccgtttcacattattcggtatagcgaataaaaagcgctatggtcctttgaccgccgatggcactacggccccagagaggaaagaggaacctccgcgacccgaattcctcgagcagcccctgctcggcgagctgactgtgacaggagttactcctgattcactgagactgagctggacagtggctcaaggccctttcgatagttttatggttcaatacaaagacgcgcagggtcaaccacaggccgtgcccgtggccggtgatgaaaatgaagtgacagtgcctggtcttgatcccgatcggaagtataaaatgaatctttacgggctacggggaaggcagcgggttggacctgagagcgttgttgcgaagacagctccacaggaggatgttgacgagacaccttcccccacagagctcggcaccgaagcccctgagagcccagaggagcctctgctcggcgagctgaccgttacaggatcatcccctgactctctctctttattttggactgttccacaggggagcttcgacagttttactgtccagtacaaggacagagatgggagacctagggctgtgcgcgtggggggaaaggaatcagaggtgacagtaggcggtctcgaacccggacataagtataaaatgcacttgtatggcctgcacgaggggcagcgcgtcggtcccgtctccgcagttggagtgacagctccacaacaagaagaaacaccacctgccactgagtcacccttggaacctcggctcggggagcttactgtcacagatgtcaccccaaattccgtcggcttgagttggaccgttcctgaagggcagtttgattctttcatcgtgcagtataaggacaaggacgggcagccgcaagtggtgcccgtagctgcagaccagcgggaggtgactgtgtacaatctggagcctgagcggaagtacaaaatgaacatgtatgggctccacgatggtcaacgtatgggcccactaagcgtagtcatcgtcacagccccattgcctcccgcacctgcaaccgaggcctccaaacctccactggagccaagactgggggagttgactgtaacggacataacacctgattccgtgggactaagttggacagttccagagggagagtttgattcctttgttgtgcagtacaaggatcgggatgggcagccccaggtggtgccagtagcagcagatcagagagaggtgaccattccagatctggagccgtcccgcaagtataagtttctgctctttggcattcaggacggcaagagaagatcccctgtgagcgttgaagccaaaaccgtggctagaggggatgcctcccccggagctcccccaagactcggcgaattgtgggtcaccgatccaactcctgactctttacggctctcttggaccgtcccggaaggacagtttgattcatttgtagtacaattcaaggacaaagatggaccgcaggtggtaccggtggagggccacgaaagaagcgtaacagtcactcccctcgacgcgggtcgcaagtacaggtttcttctctatggcctgttgggtaagaaacgccatgggcctctcaccgctgatggaactacagaggcacggtctgcaatggacgatacaggtactaagcggccaccaaagccccgattgggcgaggaacttcaggtgactacagtcacgcagaactccgttggcctgtcctggacagttccagagggacagtttgactcattcgtggtgcaatataaagatagagatggtcagcctcaggttgttcccgtggagggaagcttgcgcgaagtcagcgtacccggactcgatcccgcacatagatataagctactgttgtatggattgcaccacgggaagagagtgggcccaatcagcgcggtcgccattacggccggacgtgaggaaaccgagacagaaaccacggctcctaccccacctgctccagagccccacttaggagagttgacggtcgaggaggctacgagccacaccctgcacctctcttggatggtcacggagggtgaatttgacagttttgagatccaatatactgatcgcgatggccagttgcagatggttagaattggaggggatcggaacgatattaccctaagcggcctggagagtgaccacagatatctggtgacactgtatggcttctcagatgggaagcatgtgggccctgtgcacgtcgaagccctaaccgtgccagaagaagagaagcctagcgagccaccgacggccacacccgagcccccaattaaaccccgtctgggcgaattgaccgttactgatgctacccccgactcattgagtctgtcatggacagttcccgagggccaattcgatcactttctagtgcagtatcggaacggtgatggacagcctaaggctgtcagagtccctggtcacgaagaaggagtgaccattagcgggttggagcctgatcacaaatataagatgaacctctacggattccacgggggtcagagaatggggccagtaagtgtcgtgggagtcactgcagctgaggaggaaactccatcccccacagagccttcaatggaagccccagaaccggctgaagagcccctgctgggtgagctgacagtaactggcagctctcctgactccctcagtctgtcatggaccgtgcctcaagggagatttgatagcttcactgtgcagtacaaggatagagatgggaggcctcaagtagtgagagtgggaggcgaagagtcagaggtcacggttggtggtctcgaacctgggaggaagtacaagatgcacttgtacggcttgcacgaagggagacgggtcggccctgtttctgcagtgggcgtgaccgcccctgaggaggagtcccccgatgcacctctggcgaaactaagattgggacaaatgactgtgagagatataacttccgacagtttgtcactctcgtggacggtgcctgagggtcagtttgaccacttcctggtccagtttaagaacggagacggacaaccaaaggctgtgcgcgtgccaggccacgaagatggagttactatatcgggactggagcccgaccataagtacaaaatgaacttatatggtttccacggtggacagcgggttggccctgtgtcagctgtcggtctgactgccccaggcaaagatgaagaaatggcccctgccagtaccgagccaccaacgcccgaaccgcctatcaaaccccgtctcgaggagttaacggtaacagatgccactcctgactccctgtcactgagctggacagtccccgagggacagttcgatcatttccttgtgcaatacaagaacggggacgggcagccgaaagctacacgcgtcccaggccatgaggaccgcgtcacaatttcaggactagagcccgataataagtacaaaatgaacctgtatggttttcatgggggacaacgagtcgggcctgtgtccgctatcggtgtcacagctgctgaggaggagactccttcaccgacagaaccatccatggaagcacctgaacccccagaggagccactgttaggtgagttaactgtaacggggtctagtcccgacagcttgtccctatcctggactgtaccacaagggcgatttgatagcttcaccgtccagtataaggacagggatggtagaccccaggtggtgcgcgtcggaggcgaagagtccgaggtgaccgtgggcggactagagcctggacgcaagtacaaaatgcatctgtacggcctgcacgaaggacgacgcgtgggccctgtgagcactgtgggtgtgaccgcgcctcaggaagatgtggacgagacaccctccccaactgaacctgggaccgaagcccctgggccaccagaagagccgctgctgggggaactcacagtgactggatcctctcccgattcactgagccttagctggactgtgccacagggcaggtttgattcctttacagtgcagtacaaagacagggatgggagaccacaagctgtcagggttggtggccaagagagcaaggtcaccgtccgagggctggagccagggcgaaagtacaagatgcacctgtacggactgcacgagggaaggagactggggccagtgtctgccgttggagtgacggaggatgaagcagaaactacacaggccgtccctactatgacaccagagcctccaatcaaacctcgcctcggggaactgacaatgaccgacgcgactcctgactcactatcactctcttggactgtccctgaggggcagttcgaccactttctagtgcagtataggaatggcgatggacagccaaaggcagttagggtgcccggacacgaggacggggtgacaatctccggactggagccagaccataaatataaaatgaatctgtatgggtttcatggtggccagcgcgtgggccctatctccgtgataggcgtaacagcagctgaggaggagacccccagtcctacagaactgagcactgaagcccctgaaccgcctgaagagcccctgttaggcgagctgaccgttaccggcagcagtcctgatagcctttctctgtcctggaccatcccacagggacacttcgactcatttaccgtccagtacaaagatagggatggtcgtccccaagtaatgagagtgagaggtgaagagtccgaagtgacagttggcggattggagcctggtaggaaatacaagatgcacctttacggccttcatgagggtcggagagtgggcccagtgtctacagtcggagttaccgcccctgaggatgaggcagagacaacacaggcagtgccgactacaacccccgaaccacccaataaacctagattgggggagctaaccgttaccgacgcaacccctgatagcctttcacttagttggatggtgcctgagggacagttcgatcattttctggtgcaatatcgcaatggcgatggccagcctaaggtggttcgggtgcccggtcacgaggacggcgtgacaatttctgggcttgaacccgaccacaagtataagatgaatctttacggtttccatggcggtcagcgagtgggacctatcagtgtgattggggtgactgctgctgaggaggaaacacccgcaccaactgaaccatccactgaagccccagaaccgccagaggagcctctgctcggagaactgaccgtgacgggatctagccctgactcattatccctttcctggacgatcccccagggcaggttcgacagctttacagtacagtacaaagatcgggatggcagaccccaagtggtgagggtccgtggagaggagtccgaagtcacagtcgggggactggagcccggttgtaaatataagatgcatctctacgggttgcacgaaggtcagcgggtggggccagtgtccgccgtgggagtcacagcccctaaagacgaagccgaaaccactcaggccgtgccgaccatgacccccgaacctcctattaagccacggctcggagaattgactgtgacagacgcgaccccagactcactctctctgtcatggatggtccctgaaggtcaattcgatcatttcctcgtgcagtatagaaacggggatggtcagcccaaggcggtgagggttcccggacacgaagatggtgtcaccattagcgggctcgaacctgaccacaaatataagatgaatctttacggcttccacgggggtcaacgcgtgggacccgtgtccgccatcggagtgacggaggaagaaacaccctcccctacagagcccagcacagaagccccagaggcaccagaggaaccgcttcttggcgagttgaccgtcactggatctagccccgactccctctctctgagctggaccgtaccccaggggaggtttgactcttttaccgtgcagtacaaggatcgcgatgggcagccacaggtggtacgggttaggggggaggagtccgaagttaccgtggggggtcttgagcccggaaggaaatacaagatgcatctgtatggcctccacgagggccaacgagtgggaccagtaagtaccgtgggaatcactgcccctctgcctaccccgctgccagtcgaaccacgcttaggcgaacttgctgtggctgcagtcactagcgattctgtgggactctcttggacagtggcccagggtcctttcgactccttcttggtccagtatagggatgcccagggacagccccaggctgtgcctgttagtggggacctccgcgcagtggcagtgtccgggctagatcccgcaagaaagtataagtttctgctcttcggtttgcagaacggcaaaaggcatggaccagtcccagtggaggccagaactgccccagacaccaagcccagtcccagattgggggagctgactgttaccgacgcaacccccgattccgtgggactgagttggactgttcccgaaggtgagttcgactcatttgtggtgcagtataaggataaagatggcaggctccaagtagtcccggtagccgcaaatcagcgagaagtcaccgtgcaggggttggagccgagccgaaagtatcggttcctgctttatggactcagcggccgaaagaggttaggcccaatatctgccgactctaccactgcccctctggagaaggagcttccccctcatctgggggagctcacagtggcagaggagacttcatctagcctgcgcctatcctggaccgtagcccagggccctttcgattcatttgttgttcagtaccgggatactgacgggcaacccagggcggtccctgtggccgctgaccagagaactgtcaccgtggaggatttggagcctggtaagaaatacaagttcctgttgtacggattgctgggcggaaagagactgggaccggtctcagccctgggcatgactgccccagaggaagatacaccagctccggagcttgctccggaggccccagaaccccctgaggagccgcgactaggagtgctcaccgtaaccgacactaccccagacagcatgaggctgtcgtggagcgtcgcacagggtccatttgatagtttcgtggtgcagtacgaagacacaaacggtcagccccaggcactccttgtggacggcgaccagtctaagatcctcatttccggattggaaccatcgactccatacagatttctgctttatggcctgcacgagggaaagagacttggtcccctctctgccgagggcaccaccggtctggcaccagccggtcagacctctgaagagtctaggccgcgactgagccaactgtccgtgactgatgtgactacctcaagcctgcggctgaactgggaggctcccccaggcgcattcgatagttttttactccgcttcggggtaccctccccatcaacacttgaaccgcacccacggccacttttgcagagggaactgatggtgccgggtacacgtcacagcgcggttctccgcgatcttagatccggtacactttattccttaaccctgtacgggctgcgcggaccgcacaaagcagattcgattcaaggaacagccagaacactaagccctgtactcgagagccctagggacctacagttctctgagattcgagagacatctgctaaggtgaactggatgccgcctccttcaagagcggactcctttaaggtgagctatcagctggctgatggtggagagccgcagtctgttcaggtcgatggccaggctcgtacacagaagctgcaggggctgatacccggtgctcgctatgaggtcacagtcgtctccgtgaggggcttcgaagagagtgagcctcttacaggctttctgaccaccgtgcccgacggacctacgcaacttagggccctgaacctgaccgaaggtttcgcggtcctgcattggaaacctcctcagaatcccgttgacacgtacgacgttcaggtgacagctcctggcgcaccacctctacaggccgagaccccaggttccgcggtggactaccctctccacgatttagttctacacactaactatacagccaccgttaggggcctcagagggccaaacctgaccagtccagcctcgattacattcactactggcctcgaagctcctagagatctcgaggcaaaggaggttacccccaggactgcactgttgacatggacagagcccccagtcaggcccgcaggctacctgctctcattccacacccccggaggacagaatcaggagatactgcttccaggaggcatcacttcccatcagctcctgggcctgtttccttcaacgtcatacaacgccagattgcaagccatgtggggacagtcacttctccctcctgtgagtactagcttcactactggagggcttagaatcccatttcctcgagattgtggagaagaaatgcagaatggtgctggcgcttcccgcacctcaactattttcctaaacgggaatagggagcggcctctgaacgtgttttgtgacatggaaaccgatggcggaggctggctcgtgttccaacgcaggatggatggccaaacggatttctggcgggattgggaagattatgctcacgggtttggaaacatttcaggtgagttttggctcgggaatgaagccctgcattcactcacacaggccggtgactatagcatgcgagtggacttaagagcgggtgacgaggccgtctttgcacaatacgatagttttcatgtcgacagcgccgctgaatattatcgccttcaccttgagggataccatggaaccgctggggattccatgtcctatcattctggttcagtattctccgccagggacagagacccgaatagcctcttgatcagctgtgccgtatcatacagaggcgcttggtggtaccgaaattgccactatgctaatcttaatggattatacggaagcacagtggaccatcagggcgtgtcctggtaccattggaaagggttcgagttcagcgtgccttttaccgagatgaagctgcggccaaggaatttccgcagccccgcagggggtggatat

SEQ ID NO: 201460 - DNA, 12729 bp, Artificial Sequence
  derived and/or modified sequence
atgatgcctgctcaatatgccctgacaagttctctcgttctattagtgctcctgagcaccgcgagagctgggccatttagtagcagatctaatgtcacgctgccagctccacgaccacccccacagcccggagggcacacggtaggcgctggggtaggctcacccagttcacagctttacgagcataccgttgaaggaggggaaaagcaggtggtgtttacgcaccgaatcaatctccccccaagcaccgggtgcggctgccctccgggaacagagccaccagtgctagcctcagaggtccaggctctacgagtgcgactcgagattcttgaggagctggtgaagggcctgaaagaacaatgcactggcggatgctgccctgcgtccgcgcaagccggaacaggccagaccgatgtcaggactctctgttcactccacggagtctttgatctgtctcgatgtacgtgtagctgcgaaccaggatggggcggacctacatgcagcgacccgacagacgctgaaattcccccttctagcccaccttccgcatccggttcgtgtccagacgactgcaatgaccagggtagatgtgttagaggccgttgtgtgtgctttccaggctacaccggtcccagttgcggctggccaagctgccccggagactgccaagggaggggccgttgcgtccagggcgtgtgtgtttgtcgcgctggattttcaggtcctgattgctcccagagatcatgcccccgaggttgcagccagaggggcaggtgcgagggcggaagatgtgtctgcgatccgggatataccggcgatgactgcggcatgcggtcatgcccgagagggtgctcacagaggggcaggtgtgagaacggacggtgcgtttgtaaccccggatatacgggcgaggattgtggggttcgaagctgcccaaggggatgctctcagaggggtaggtgtaaagacggacgctgtgtgtgcgaccccggatacaccggcgaagattgtggcacgagatcctgcccttgggattgcggtgaaggagggaggtgtgtcgatggccgttgtgtatgttggcccggttacacgggagaggattgttccacgcgcacctgcccgagagactgccggggaaggggcagatgcgaagatggcgaatgtatctgcgacaccggatactctggcgatgactgcggggttaggtcatgtccaggagattgtaaccagcgcggtagatgcgaggatgggaggtgcgtgtgttggcccggatacaccggtacagattgcggatctagagcatgtcccagagactgccggggaagaggacggtgcgagaacggggtgtgcgtgtgcaatgcgggatattccggggaagactgtggcgtgagatcttgcccaggcgactgtagagggaggggacggtgtgagagtgggcgttgtatgtgctggcccggatacacagggagggactgtggtactcgggcatgcccaggcgactgccgaggtcggggaaggtgtgtggatgggcgttgcgtgtgtaatccaggctttaccggagaggattgtggaagtaggcggtgccccggagattgcagagggcatggcctttgcgaagacggggtgtgcgtttgcgatgccggttattcaggagaggattgtagcacacgctcctgtcccggaggatgccgcggtcgcggtcagtgcttagacgggagatgcgtgtgcgaagacggctactctggagaggattgtggtgtgaggcagtgtcccaatgattgctctcagcacggcgtgtgccaggatggtgtttgcatttgctgggagggatatgtgtcagaagactgcagcattagaacatgccccagcaactgtcacggcagagggagatgtgaggaagggcgttgtctctgtgaccctggatacaccggaccaacttgtgctacacgcatgtgccccgcagattgcagaggtcggggaaggtgcgttcagggtgtgtgtctctgccacgttggctatggcggtgaagactgcggacaagaggagcctcccgctagcgcctgcccaggcggatgtggacctagggaactgtgtcgcgctgggcaatgtgtctgtgttgaaggcttccggggtcccgactgtgctattcagacctgcccgggagactgccgaggtagaggagaatgccatgacggatcctgcgtctgcaaggatggatacgcgggtgaagattgcggagaggaggtccctaccatagagggtatgagaatgcatctgcttgaggagaccacggtgcgcaccgagtggacacccgcacctggccctgtggacgcctacgaaatacagtttattcctacaactgagggagcaagccctccatttaccgccagagttccgagcagcgcctcggcttatgaccagcgcggactcgcacctgggcaggagtaccaagttacggtccgtgccttgagaggcactagctggggcctgcccgctagcaaaacgataacaacaatgattgacggccctcaggacctaagagttgtggctgtgacccctaccaccctagagctaggctggctgaggccccaggcagaggtggatcgcttcgtggtgtcatacgtcagtgcgggaaaccagagggtccgtctggaggtgcctccagaggccgacggcaccctgctgaccgatctcatgcccggtgtggaatatgtggtgaccgtgaccgctgaaagaggaagggccgttagctatcctgctagcgtaagggccaataccggtagctcgcccctgggattgctcggcacaacagacgagccacccccatctgggccttctacgactcagggtgcccaagctcccttattacagcagcggccacaggaactgggagaactaagggtgctaggccgagacgaaaccggcaggctgcgcgtcgtgtggacagcacagcctgacactttcgcctacttccagctcaggatgagggtgccggagggcccaggggcacatgaagaggtgctgccaggcgacgtaagacaagctttagtcccaccgccaccacctggcaccccttatgaactaagcctgcatggggtcccgcctgggggtaagccttccgacccaataatctatcagggcatcatggataaggacgaggagaaacctggtaagtccagcggcccacccagactgggagaattgacagtaacagatagaacgagtgacagcctactgctccgatggactgtgcctgagggagaattcgactcgttcgtgattcagtataaggatagagacggccagccccaggtggtgcctgtcgaaggccctcaaaggagcgcagtgataactagcctcgacccagggagaaaatataagtttgttctctatggattcgttggcaagaaacggcacggacctctggtggcggaggccaaaatcttacctcagtccgatccttcccctggaacgccgccacacttgggcaatctgtgggttactgatcccacccctgatagtctgcatctctcttggaccgtgcctgagggacaattcgacaccttcatggtgcaataccgggatcgcgatggaaggccacaggttgtgccagttgagggaccagagagaagttttgtagtgagcagcttagacccagatcacaagtacaggttcacactgttcggtattgccaacaaaaagcggtacggccctcttacagctgacggaacgaccgccccagagcgcaaagaggagccaccccgaccagagtttctggagcagccactcttgggtgagcttaccgtcactggggttacccccgactcacttcgcctgtcatggacagtggcccaaggccctttcgatagcttcatggtgcagtataaggatgcccaaggtcagccccaggccgtgcctgtcgccggagatgagaacgaggtaaccgtgccgggactcgaccctgacaggaagtacaagatgaatctgtatggcttgagaggtcgccagcgtgttggcccagagtctgtggtggccaagacagccccacaagaagacgtcgacgagaccccatcccccacggaattggggacagaggcacctgagagtccagaggaacctctgctgggagagctgaccgttacgggctcatctcctgatagcctctcacttttctggaccgtgccccaagggtcttttgatagctttacagtgcagtataaagatagggatggcaggccaagagccgtccgagtcgggggtaaagagtccgaggtgaccgtgggcggtctggagcctggtcacaagtacaaaatgcacctatatggcctacatgaagggcagcgagtcggcccagtttctgctgtgggagtgaccgctccacaacaggaggagactccgccagcaacggagtctcccctggagccaaggctgggagaactgacagtgactgatgtcactccaaacagtgtggggctgtcctggaccgtccctgaaggccaattcgatagcttcattgttcagtataaagataaagatggccagccacaggtagtacccgtcgctgcagaccaaagggaggttactgtgtataacctggaacctgagcggaagtacaagatgaacatgtacggcctgcacgatggtcagcggatgggcccactctcggttgtgatcgtgaccgctccactgccaccagccccagcaaccgaagccagcaagccccctctggaaccacgtttgggcgagctaaccgttaccgatataactcctgattcggtggggctgagttggactgtgcccgaaggcgagtttgactcatttgttgtgcagtacaaagatcgagatgggcaacctcaggttgtaccggttgctgcagaccagcgggaggttacaatccccgacctagagccctccaggaaatacaagtttctcctgtttgggatccaggacggaaaacgcaggtccccagtgagcgtagaggctaagacagtcgcacgtggagatgcctccccgggagctcccccacggctgggggagctgtgggtgactgacccaaccccagatagtctcagactatcatggacggtgcccgaggggcagttcgattcatttgtcgtccagtttaaggacaaagacgggcctcaggtggtcccggttgaagggcacgagaggtccgtgaccgtgacaccattagatgccggtaggaaatatcgatttctgctgtacggcctgctcggaaaaaaaagacacggcccactcaccgcagacggaactaccgaggctcggagcgcgatggatgatacaggcaccaagcggcctccaaaacccaggttgggagaggagctgcaggtgaccacggtgacacagaactctgttggactgtcatggaccgtacctgaaggtcagtttgactcctttgtcgttcagtacaaagatcgcgacgggcagccacaggtggtgcctgtggagggctccctgcgtgaggttagcgtcccaggcctggatcctgcgcacagatacaagctgctcctctatggtctgcatcatggcaaaagagtaggacccatttctgcggtagcgattacagcgggtcgcgaggagactgagactgagacaacggcccctactccccctgcaccggagcctcacttgggagaactgactgttgaggaggccacctctcacaccctgcatctgtcatggatggtgaccgaaggggagtttgatagcttcgaaattcagtataccgatcgagatggacagcttcagatggtcaggatcgggggtgataggaacgatattacgctgtccggactagagagtgatcataggtatttggtgactctgtatggattttcagatgggaaacacgtagggccagtacatgtcgaggctcttacagttccggaggaagagaagccctctgagcccccaacagctacacctgaacctccaataaagccaaggctgggtgagctgaccgttacagatgctacccctgatagccttagtttgagctggactgtgcctgaggggcaattcgaccacttcctggtccaataccggaacggcgatggtcagcccaaggcggtgagggttccaggccacgaagaaggcgtaaccatatcaggtctggagcccgatcacaagtacaagatgaacctatacgggtttcatggaggacagcgtatgggcccagtgtctgtggtgggcgtaaccgcggcagaagaggaaaccccctcaccgaccgaaccaagcatggaagccccagagcctgccgaagagcctctgctcggggagctgactgtgacgggatcctctcctgatagcctgagtctgtcatggaccgtgccccagggcagattcgatagtttcacagtgcagtacaaggaccgcgatggacgtcctcaagtggtcagagttggaggcgaggagagtgaagtgacggtcggcggtctcgaacctggcagaaaatacaaaatgcacctatatggactgcacgaggggcgaagagttggcccagtgagcgctgtgggagtgaccgctcctgaagaggagtcccccgacgcacccctcgccaagttgagactcggccagatgacggtccgggacattacgtccgattctttgtcccttagctggaccgttcccgagggccagtttgaccactttctcgtacagtttaaaaatggggacgggcagccaaaggccgtcagagtgccaggccatgaggacggcgtgacaatctctggcctggagcccgatcacaaatacaaaatgaatctgtacggcttccacggtggacagagggttggtcctgtgtccgcagtaggactgacagcgccaggcaaggacgaggagatggccccagcttccacagagccccctacaccagaacccccaattaaaccgaggttagaggagttaactgttactgatgctacccccgacagcctaagcctcagctggacagtgcctgaaggccaatttgatcacttcctggtacagtacaagaacggtgacggtcagcctaaagctaccagagtacctggtcatgaagacagggtgactataagtgggcttgagcctgacaacaagtataagatgaatctgtatggcttccacggcggacagcgggtgggtcccgtcagcgcaatcggagtaacagcagcagaggaagagacaccctctcccaccgagccgtccatggaagcccctgaacccccagaggaaccactgctgggcgaactcactgtgacaggcagtagtcccgactcgttaagtctgtcatggactgtgccccagggccgttttgactcattcacagtgcagtataaggatcgagacggcagaccccaagtggtgcgcgtaggaggcgaagaatccgaagtaaccgttggtggcttggaacctggtcgcaaatacaaaatgcatctgtacgggctgcatgaaggtcgcagagttgggcctgtgagcaccgtcggcgtaacggcccctcaggaggatgtcgacgagaccccttccccaaccgaacctgggacagaagcgcctggccctcctgaggagccccttcttggggaactaactgtcaccgggtcctctccagactcactcagcttgagttggactgtccctcaagggcgtttcgatagctttaccgttcagtacaaagacagagacgggagacctcaggctgtccgcgtagggggacaggagagcaaggtcactgtacgaggtctcgagcccggtcgaaagtacaagatgcatctatacgggcttcacgaaggacgacggcttgggccagtgtccgcagttggtgtcacagaggatgaagcagaaaccacccaggctgttccaaccatgaccccagagccaccaattaagccgcgtctgggcgaattaaccatgacagacgccacccctgacagcctgtcgctgtcctggaccgttcccgaggggcaatttgatcacttcttagttcagtaccggaacggcgatggccagcctaaagccgtgagggtcccagggcatgaggatggtgtgacaataagcgggctcgaacctgaccacaagtacaagatgaacctctatggatttcatggcggtcagcgcgtgggccctatctctgtgatcggcgtgactgcggctgaggaggagaccccgagcccaacagaattgtctacagaggctccggaacctcctgaggagccactgctcggcgagttaactgttactgggtcctcccccgatagcctcagcctttcctggaccatcccacagggccacttcgactcctttacggtgcagtacaaagatagggacggaaggccccaagtcatgagggtcaggggtgaggaatctgaggttaccgtaggcggtctcgaacctggacgcaagtacaaaatgcatctgtatggtctgcacgaagggcgtcgagtgggtcctgtatctaccgtgggcgtaaccgaagacgaagcggaaaccacacaggcagttcctaccacaactccagaacccccaaacaagcctcgcctgggggagctcactgttacagatgctacaccagattcgctgtctttgtcgtggatggttcccgaaggccagtttgaccactttctggtgcagtaccggaacggtgacggtcagcccaaggttgtacgcgtccctgggcatgaagacggagtgacgatttcaggacttgagcctgatcataagtacaaaatgaatctatatggttttcatggcggacagcgagtcgggcctatttcagtcattggggtgaccgctgccgaagaagagacgcccgcacccaccgagccatcaactgaggctcctgaacccccagaggagcccctactcggcgagctgactgtcacaggaagcagccccgactcgttaagtttgagttggaccattcctcaaggcagatttgactccttcaccgttcagtacaaggatcgcgatggcagaccacaggtggtccgcgtccggggagaggagagtgaagtcactgttggcggactcgagcctgggtgcaaatacaagatgcatctgtatggtttgcacgaggggcagagagtcgggcctgtgtccgccgtgggcgtcacagcgccaaaagacgaagcagaaaccacccaggccgtacctaccatgacccccgagccaccaattaagcccagactcggcgaactgacagttactgacgctacccctgactctctcagcctttcttggatggtcccagagggccaatttgatcactttttggtccagtatcgcaatggagatgggcagcccaaggcagtgcgagtgccgggacatgaggacggtgttacaataagcggactggaacccgatcacaagtataaaatgaatctctatggcttccatggtggtcagcgcgtgggacccgtgagtgctatcggcgtgacagaggaagaaactcccagtcctactgaaccgtccactgaagcgcctgaagcacccgaggagcccctgctcggagagctgacagttaccggctcatctccagacagccttagcttgagctggaccgtacctcagggaagattcgactcattcacagtgcaatacaaggatagggatggacagcctcaggtggtgagagtgagaggcgaagagagcgaggtcaccgtcggcggactggagcccggacgcaagtataagatgcatctctatggcctgcatgagggccagcgcgttgggcctgtctctacggtgggtattaccgctcctctgcctacaccattgcctgtggaaccacggcttggcgagttggccgtggctgctgtgacctctgattccgtgggcctgtcttggactgtggcccagggcccattcgatagtttccttgttcagtacagggatgctcaggggcagcctcaggccgttcccgtctcaggggaccttagagccgtcgcagtctcaggactggatccagccagaaagtacaagtttctcctctttggtctgcagaacggaaaacgccacggcccagtacctgtcgaggcgaggaccgccccagacaccaagccctcacccagactgggcgaactaacggttactgatgcaacacctgattcagtcggattatcttggaccgtccccgagggtgaattcgactcctttgtggtacagtataaagacaaggacggaaggctccaggtggtaccagtggccgcaaaccaaagagaagttacagtgcaggggcttgagccaagtagaaagtaccgctttctcctctacgggctgtccggaaggaaacgactcgggccaattagtgcggattcaacaaccgctcccttagagaaggagttgcctcctcacctaggcgaactgacggttgccgaggagaccagttcatcgttacgcctgagttggaccgtcgctcagggcccttttgactcgttcgtggtgcaatatcgtgatacggacggccagcctcgcgctgtgcccgtggcggcagaccaacggactgtcacagtggaggacctggagccagggaagaaatacaagttcctgctgtacgggctgttaggtgggaagaggctggggcctgtttccgccctgggcatgactgctcccgaggaggatactccggcaccggagctggcccctgaggcccctgaacctcctgaggaaccgcgactgggggtgcttacagtgacggacactactcctgattccatgaggttgtcatggagtgtcgctcaggggccattcgactccttcgtggtgcagtacgaagatactaacggacagccacaggcactgcttgtagacggggaccaatcaaaaatactgatcagcgggctggagcctagcactccctaccggttcctgctctacggcctgcacgagggaaagcgtttgggtcctctttctgccgagggaacgacagggttggcacctgccggtcagacatccgaagaaagccgcccaaggctatcacagttaagcgtcaccgacgtgaccacaagctccctcaggttgaactgggaagcaccaccaggagcattcgacagttttctgctcagattcggtgtcccgtcaccttccaccctcgagcctcatccacgcccactactccaaagggaactcatggtgcctggcacacgacattctgccgtgctacgcgacctacgtagcggcacactgtacagcttgactctgtacggtctgaggggaccacataaggcggatagtattcagggtactgcgaggactctctccccggtgttagagtctccacgtgacttacagttctccgagatcagggagacttccgcaaaggttaactggatgccgcctccatcacgggcagattccttcaaagtctcgtaccaactggccgacgggggagagcctcagtcagtgcaggtggacggacaggctagaacccagaagcttcagggcctgattcccggagcacgttatgaggtgactgtggtgtctgtcaggggctttgaagagtccgaaccactaacagggttcctgaccaccgtgccagacggcccaacacagcttagggctctgaatctcaccgaggggttcgcggttctccactggaagcctccacagaaccccgtagacacatacgatgtccaagtgaccgctccgggagctcctcccttgcaggcagagacccctgggtccgcagttgattatccactgcacgatctggtgttgcatactaattacaccgctaccgtaagagggttgcgtggacctaacctaaccagccctgcatcaattaccttcactaccggactcgaggcccctcgtgatctggaagctaaggaggttacacccagaactgcgctcctaacttggaccgagccacctgtgcggccagccggatacttactgtctttccacactcccggaggacagaatcaggagattctactccctggaggtattacctctcaccagctcctggggttgttccccagcacaagctacaatgctcgattgcaagccatgtggggccagagcctgctgccaccagtgagcacctcttttaccacaggcggactgaggatcccttttccgagagattgtggcgaagagatgcagaacggagcaggggcttcacgcacgtcgacaatcttcttaaatggaaacagagaacgccctctaaatgtattttgtgacatggagacagatgggggaggctggcttgtatttcagaggcggatggacggccagacagatttctggagagactgggaagattatgctcatggcttcggcaacatttctggtgaattctggctcggaaacgaagcgcttcacagtctcacacaagccggtgattactccatgcgagtggatctgcgcgctggcgacgaggccgtatttgcccagtacgatagttttcatgtggacagcgcagccgagtactaccgtttacatctggaggggtatcacggcaccgcaggggacagcatgtcctaccacagcgggtctgtattctccgccagggacagggaccctaattctctcttaatatcttgtgccgtgtcatatcgtggcgcttggtggtatcggaactgccattatgccaatttgaacggactgtacggcagtaccgttgaccaccagggcgtgtcctggtaccactggaaaggctttgagtttagtgtgcccttcaccgaaatgaagctgcggccaagaaattttaggagccccgcagggggtgggtag

SEQ ID NO: 201461 - DNA, 12735 bp, Artificial Sequence
  derived and/or modified sequence
atgatgcccgcccagtatgctttaactagctctcttgttctgctggtcctgctgagtacagcccgagccggcccatttagctctaggtccaacgttactcttcctgcccctaggccaccaccccaacctggcggtcacacagtaggggctggcgtgggaagcccctcttctcagctgtacgagcacacagtggaaggcggcgagaaacaggtagtatttacccacaggattaacctgcctcctagtaccggttgtggctgtccccctggaaccgaaccaccggttctggcaagtgaggttcaggccctccgagtgaggttggagatcttagaggagcttgtgaagggtctcaaagaacagtgtacaggcggttgctgtcctgcatctgctcaggccggtaccggccagacagacgtgagaaccctctgttccctgcatggcgtgttcgacctttcgcgctgcacctgctcctgcgagcccgggtgggggggaccaacttgcagtgacccgaccgatgctgaaattcccccatcaagccccccatccgcttctggctcttgccctgatgattgcaacgatcagggtcgttgtgtgcggggaaggtgtgtgtgtttccctggatataccggccctagttgcggatggccttcttgtcccggcgactgccagggccggggaagatgcgtccagggagtgtgtgtctgccgagctgggttttctggacccgattgttcccagagatcctgtcctcgaggatgtagccagagaggcaggtgcgaaggagggcggtgcgtttgtgaccccggctacaccggcgatgattgcggtatgagatcatgtccacggggctgttcacagcggggcagatgtgaaaatggcaggtgcgtgtgcaatcccggctatactggcgaggattgtggcgtccgctcatgtccccgtggctgtagtcaacgggggcgttgtaaggacggaaggtgcgtttgtgaccctggatataccggagaggattgtggaaccaggagctgcccctgggattgtggtgaggggggccggtgcgtcgatgggcggtgtgtgtgctggccgggctataccggcgaagattgttccacaaggacttgcccccgcgactgccgaggccgtggacgctgcgaggatggggaatgcatctgcgacacaggatactcgggcgacgactgcggcgtacgttcctgtccgggtgattgtaatcagagagggagatgcgaggacggaaggtgcgtttgctggccaggatacaccggaactgattgcggctccagagcttgcccaagagactgtcgtggacgaggtcggtgtgaaaacggagtgtgcgtctgcaatgccgggtattcaggggaagactgcggagtgagatcgtgccccggcgactgcagagggcgtgggagatgtgagagtggcagatgcatgtgttggcccggctacacaggtcgggattgtggaaccagagcttgcccgggtgactgccgcggtagggggcgctgtgttgacggcagatgtgtttgtaaccctgggtttacaggggaagattgcggttcacgaagatgccctggggattgtagggggcacggcctgtgtgaggatggcgtgtgcgtctgtgatgctggctattcaggtgaggactgctctacccgaagctgtcccgggggatgccgagggagggggcagtgtttggacggtaggtgcgtctgcgaagatgggtactcaggcgaggactgcggggtccgccaatgcccaaatgattgctcccaacacggggtgtgccaggacggtgtatgtatttgctgggaagggtacgtctcggaagactgttcaattagaacttgtccaagtaactgccatggccgcgggcggtgtgaagaggggcgttgcctatgcgaccctgggtataccggacccacatgtgcgacacgtatgtgtcccgccgattgtaggggtcgtgggagatgcgtgcagggagtgtgcttatgtcatgtcggctacggcggcgaggattgcggacaggaggagccgccagctagcgcctgtccgggcgggtgcgggccaagagaactgtgcagagccgggcagtgcgtctgtgtggagggattcagggggccagattgtgccatccaaacctgccccggggactgtaggggacgcggggaatgccacgatggctcctgtgtctgcaaagatggttacgccggcgaagactgtggggaagaagtccccactattgaaggaatgagaatgcatctcctggaggaaaccaccgttaggactgagtggacaccagccccaggaccagtagacgcgtacgaaattcagttcatccccactactgagggcgcctccccccccttcactgccagagtgcctagcagcgctagtgcctatgaccaacgtggcttagcacccgggcaagaatatcaggtgaccgtgcgagcgttacggggaacatcttggggcctcccagcatccaaaactattacaacaatgattgatgggccacaagacctcagagtggtcgctgtcaccccaacaacattagaactcggatggctacgaccgcaggcagaagttgaccgctttgttgtgtcatacgtttctgctggcaatcagcgcgttcgattagaagttcctcctgaggctgatgggacactcttaacagacctgatgcccggcgttgagtatgtagttaccgtgacagctgaaagggggagagcagtctcatatccagcatccgttagggctaatacaggttcctctccgttgggtttgttggggactactgacgaaccacctccgtccgggccatctacaactcagggagcgcaagcacccttgcttcagcaaagaccccaggaacttggggaactgcgcgttctgggccgagacgaaactggcaggttgagggtggtgtggacggcccagcctgatacgtttgcttactttcagctgcgaatgagggttcctgaaggacccggcgctcacgaagaagtgcttccaggcgatgttcggcaggcgctggtgccaccaccacccccagggaccccctacgagctgagtttacacggggttcctcccggtggaaagccctcagatccaattatttaccaggggatcatggataaagacgaggaaaaaccgggaaaaagcagcggaccacccaggctcggagagctgactgtaacagatcggacatctgactctctgctcttaaggtggaccgtcccagaaggagagtttgatagttttgtgatccaatataaagacagagatggacaaccacaggttgtcccagtcgaggggccccagcgctctgccgtgattaccagtctggaccctggtcgcaaatataagttcgttctgtatgggttcgtagggaagaagaggcatggcccattagtggcggaagctaaaatccttccacaatccgacccttccccagggactcctccccacctgggtaatctttgggtaactgatcccacacccgatagcctccacctgagctggaccgtgcctgaaggacagtttgacacattcatggtgcagtatcgagacagagatggacggccccaggttgtgccagtagaaggacccgagcgtagttttgtcgtttcctctctcgacccagatcataagtatcgcttcaccctgttcggcatcgcaaataagaagcggtacggtcccctcactgccgacggcacaaccgcaccagaacggaaagaagaaccaccgcgacctgagtttctggagcagcccctcctcggtgagctcacggtaaccggcgtgacccctgatagtctgcggctgagttggactgttgcacaggggccttttgatagctttatggtccagtacaaagatgctcagggacagccccaagctgtccccgtggccggcgacgagaatgaagtgactgtgcctgggctggatcccgacaggaagtacaagatgaacctctatggtctgcgcggccgacaacgcgtggggcccgaatcagtggtagcaaaaaccgcaccccaagaggatgtcgatgaaaccccgtcgcctacagaattaggaacggaggctcccgagtcccctgaagagccactgctcggtgaactgacagtcactggctcctcacctgattctctgtctctgttttggaccgtgccacagggatcctttgactccttcactgtccagtataaggacagagacggacggccccgggcggtccgggttgggggcaaggaaagcgaagtcacggtgggaggactggagcccggacacaagtacaaaatgcacttatatggtctccatgaaggccagcgagtgggccctgttagtgcagtgggggttactgccccccagcaggaagaaacaccccccgcgacggaatctccactcgaacctaggctgggagagcttactgtgacagacgtgacaccaaatagcgtgggcctgtcctggacagtccccgagggccagtttgactctttcattgtccaatacaaggataaagacggccagccacaggtggtgcctgtagccgccgaccaacgtgaggtcactgtctataatttagagcctgagagaaaatacaagatgaatatgtatggcctgcatgatggtcagcgcatggggcctttatctgtcgtcatcgtgacggccccactccctccagctcctgcaactgaggcttcaaagccacccctcgagccaaggcttggcgagctgacggtgaccgacatcacccccgatagtgtgggtctaagctggacagtgcccgaaggtgagttcgattcctttgtcgtgcaatataaagaccgcgatggacagccacaagtggttcccgtggccgcagatcagagagaggtgacaatacctgatctggagccttcgcgcaaatataagtttctgctcttcggcatacaggatggaaaacgcagatctcctgtatctgtagaggcaaaaaccgtggccagaggcgacgcctcccccggagcaccccccaggctgggagagctatgggtaaccgaccctacacccgactcgttgcgcttaagttggaccgttccagagggccagttcgacagctttgttgtgcagttcaaagacaaagacggtccccaagtcgttccggttgaaggtcacgaaagaagtgtgaccgtcactccactggacgccggccgaaagtatcggttcttattgtacggtctgcttgggaagaaacggcacggacccttgaccgctgacggcaccaccgaagcgaggtcagctatggatgacaccggcactaaaaggccgcctaagccccgccttggggaggaattacaggtaactacagtgacccagaactcagtgggcttgtcctggaccgtgcccgaaggacagttcgattcctttgtcgttcagtacaaagatcgcgacggacaaccccaagtcgtcccagtggagggctctctaagggaggtgagtgtgccgggcctggatcccgcgcacagatataaactcttactgtacggccttcaccatgggaaacgtgtcggccctatttccgccgtggcgataacagcggggcgcgaagagacagaaacagagaccacagccccaacaccgcccgctccggaacctcacctgggagagttaacggtagaggaggcaacttctcacaccctgcacctatcctggatggtgactgaaggcgaattcgacagcttcgagatccagtatacagatagagacgggcagctccagatggtccggattggtggggacaggaatgacatcacattaagcggcctggagtccgatcaccggtatcttgtaaccttgtacggcttcagtgacggaaagcacgtgggtccagtacacgtggaggctctcacagtgccggaggaggaaaagccttccgaacctcctaccgctacccccgaacctcctatcaaacctagactgggagagctcaccgtgaccgacgccacacccgattccctttctctctcctggactgtacccgaaggccagttcgatcactttctggtccagtatagaaatggtgacggacagcctaaggcagtaagggtcccaggccacgaggaaggcgtcactatctcaggccttgaacctgaccataagtataaaatgaatctctatggtttccacggtggtcagcgaatggggcctgtctcagtagtcggtgtgacagcagccgaggaggaaactcctagtccaacggaaccaagcatggaggcgccggaaccagctgaggagcccctgctgggcgaactcaccgtaacaggttcctccccggactcactgtcactgtcctggactgtgcctcaaggacgattcgatagctttaccgtacagtacaaggaccgtgatgggcgcccccaggtggtcagggtgggtggcgaagagtcagaagtgactgttggcggactggagcccggccgtaaatacaagatgcatctctatggtctgcacgaggggaggagagttggccctgtttccgcagtcggcgtcacagctcctgaggaggaaagcccagacgccccgctcgctaagctgagactgggccagatgaccgtgcgcgacatcacaagtgactccctgagcttgtcctggacggtcccagaagggcagttcgatcacttcctggtgcagtttaagaatggagatggacagccaaaagccgttcgtgtgcccgggcacgaggacggagttacaatctctggcctggagccggatcataagtacaaaatgaacctgtacggatttcatgggggccagcgggttggccctgtttccgccgttggactgacagcacctggcaaggacgaggagatggctcccgccagcacggagcctcccacccccgagccccccataaagcctcgtctagaggagttaacagtgacagacgcaacaccagactccctttcactgagttggacagtgcccgagggccagtttgatcattttctggtgcagtataaaaacggagacgggcagcctaaagctacccgagtacctgggcacgaggatagggttacgatttcaggcttagagcccgacaacaaatacaagatgaatttgtatgggtttcacgggggccagagggtggggcccgtgtccgctatcggcgtcacggccgcggaagaagagacccctagcccaaccgagccaagtatggaggcccctgaaccccccgaggagccactgctgggcgagctgaccgtgactggctcatcccccgatagtctgagtctgagttggacggtcccacagggaagatttgacagcttcacagtccagtacaaggatagagacggaaggccccaagtggttagagtgggaggcgaggagagcgaggttacagtcggagggctcgagcctgggagaaaatataaaatgcacttgtacggtcttcatgagggaagacgagtcggtccagtttccacagtgggagtgacagctccgcaggaggatgtggatgagaccccctcacctacagaaccgggaaccgaagcgccgggccccccagaggaacctcttctgggagaattgaccgtaaccgggagctccccagactctcttagtctatcttggactgtcccccagggtcgtttcgattcatttacagtacaatataaggatcgggatggtaggccccaggccgtgcgggttgggggccaagagtccaaggtaaccgtgcgcggcctggaaccaggtcgaaagtacaaaatgcacctgtatgggctgcatgaaggtcgccgcctcggccctgtgagtgcggtcggtgtaaccgaagacgaggccgaaacaacacaggccgtcccaactatgaccccagaaccccctatcaagccgcggctcggggaactgacaatgacagatgcaacccccgatagtctgagcctcagctggaccgtcccggagggacaatttgaccactttttggttcagtaccggaacggcgacgggcagcccaaggcagtgagagtgccaggccacgaagacggggtgaccatctccggactggaacccgaccataaatacaaaatgaacctgtatggcttccatggagggcagagagtgggacctatttccgtgattggtgtgacggccgccgaagaggagactccctcacccacagagttaagcactgaggcccccgaaccccccgaggagcccctgttgggtgaactgaccgtgaccggctcatctccagattcactgagtctgtcatggactataccgcaggggcactttgacagttttacagtacagtacaaagatcgcgacggacgaccgcaggtgatgcgcgttcgcggtgaagaatctgaggtgacggtggggggtctggaacccggacgaaaatacaaaatgcacctttacgggttacatgaagggcgacgagtaggacctgtaagcactgtgggcgtgacggccccagaagacgaggcagaaacgacccaggctgttcctaccaccactcctgagcctccaaataaacctagactgggtgaattaacggtaactgatgctacccccgacagtttatccttgtcttggatggttcctgagggtcagtttgaccacttcctggtgcaatatagaaatggggatggtcagcccaaggtcgtcagagttccaggtcacgaagacggcgtgactatttccggtctagagcccgatcacaaatacaagatgaatctttatggcttccacggaggacagcgggtcgggcctatctcagtgataggcgtgacagcggccgaggaagagaccccagctcctaccgaacccagcactgaggcacccgagccccctgaagagccactgcttggcgagctcacagtgacgggttcatcaccagactctctctccctcagttggacaataccgcaggggagatttgactccttcaccgtacagtataaggaccgagatggtagaccccaggttgtcagagttagaggcgaggaatccgaggttaccgtcggaggccttgagccagggtgtaaatataaaatgcatctctacggtctccacgaaggacagcgcgtagggcctgtgagcgcagtgggcgtcacagcacctaaggatgaggccgaaactacccaagcagttcccaccatgacaccagaaccgccgattaagcctcgtctgggagagctgacagtaactgacgcaaccccagattccctgagtctcagctggatggtccctgaggggcaattcgaccactttttagtccagtatcgaaacggggatggacagccaaaggctgtcagagtacctggacatgaagatggagtgacaatcagcggactggaacctgatcacaaatacaaaatgaacctctacggatttcatggcgggcagcgagtcggtcccgtcagtgctatcggcgtcacagaagaagagacgccgtctcctactgagccatcaaccgaggccccagaggcccccgaggagcccctgcttggcgagctgaccgtcacaggatcctctccggactccttgtctttaagttggacagttccacaaggcagattcgactcattcaccgttcagtacaaagatcgcgacggacagccgcaggtggtgcgcgtacgcggtgaggagagcgaggtgactgtgggtggcctggaaccggggaggaagtacaagatgcacttgtacggtctccacgaaggacagagagtcgggccagtttccactgtagggataacagcacccctgcctacacccttgccagtcgaacccaggctgggtgaactggccgtagctgcagtcacgtcagatagtgttggactcagttggacagtcgcacaaggaccatttgacagtttcctagttcagtacagggatgcgcaaggccagccccaagcggtacccgtatccggtgatctgcgcgctgtggctgtctccggtcttgatcccgcgagaaaatacaagtttttgctatttgggcttcagaacgggaagaggcatgggcccgtgccagtggaagcacgcacagcgccggatactaagccatctcctagactgggggaactgacggttactgatgctacgccggactcagtgggactctcatggaccgtccctgaaggcgaattcgattctttcgttgttcagtataaggacaaagacggccggctccaagtggttcctgttgccgccaaccagcgagaggtgactgtgcagggcctggagcctagtcggaagtatcgcttccttctgtatggcctgagcggacggaagcggctcggtccaatcagcgccgatagtactacagcgcctcttgaaaaagagttgcccccgcatctaggggagctcacagtagccgaggaaactagctcgagcctgcgtctgtcctggaccgtcgcgcagggcccctttgattcgttcgtcgttcaatacagagatactgacggccagcccagagctgtccccgtcgcagctgaccagcgaacggtgactgtggaggatcttgaacctggcaaaaaatataaatttctattgtatggactgttggggggaaaaaggctcgggcccgtgtcagcgctgggcatgacagctcctgaggaagatacgcctgcacctgaactggcaccagaggctccagaaccccctgaagagcccaggctgggggttctgaccgtgactgacacaacccctgatagcatgcgtctcagctggtctgtggctcagggtccctttgatagttttgtcgtgcagtatgaagacacgaacggacagcctcaggcattactcgttgatggggaccagtccaagattctcatttctgggctggaaccctctacgccttatagattcctcctatacggtctgcacgaggggaaacgcctcggccctctgtcagctgaaggtaccaccgggttggcaccagctggacagaccagcgaagaatcaaggcctaggctgtcccagctgtcagtgaccgacgtgactacatctagcctgcggctgaattgggaggccccccccggagcctttgattccttcctgttgcgattcggggtgccttctccttctaccttagagccacatccaagacctttgctacagcgggagctcatggtgcccgggactcggcactccgctgtgcttagagacctgcggtccggcacgctctattccctgactctgtacggtttgcgtggcccacacaaggctgacagcatccagggcaccgctcgcactctaagtcccgtgctagagagtcctcgagacttgcaattctcggagattcgtgaaacctccgcaaaggttaactggatgccacctcctagcagggctgattcgtttaaagtatcttatcagctcgcggatggaggagagcctcagtcggtgcaggtcgatgggcaggccaggacgcagaaacttcaggggcttatcccgggagccagatatgaggtaacagtggtgagcgtccggggatttgaggagtcagagcccctgacagggtttctcacaaccgttcctgacggaccaacgcagttacgcgcactgaatttgaccgaagggttcgcagtacttcattggaaaccgccacagaaccctgttgacacatatgatgtgcaggtaactgctcccggtgcacctccgttgcaggccgagacaccagggagcgctgtggattaccccctacacgatctagtgttacatactaactatacagctacagtgagaggccttcggggtcccaacctcacctcccccgcctcaatcacatttaccaccgggctcgaagccccaagggaccttgaggccaaggaagtcacacctagaactgccctgctgacatggacggaacctccagtaagacctgccgggtatttattgtcctttcatacccctggaggccagaatcaggagatcttactgccaggcggcattacgagtcatcagctcctggggcttttcccaagcacaagttataatgccagacttcaggcaatgtggggtcagtctctcctcccacctgttagcaccagctttactactggtggcctgcgcatcccctttccacgggactgtggggaggagatgcagaacggggcaggggccagccgcacttcaacaattttcttaaatgggaatcgggaacggccacttaatgttttttgtgacatggaaacagatgggggcggctggctcgtctttcagcgtcgcatggacgggcagactgacttctggagagattgggaagattacgcccatggctttgggaatatcagtggggagttctggctcggcaacgaggctttgcatagtcttactcaggctggtgattacagcatgagagtggacctacgggctggggacgaggccgtgtttgcccagtatgactccttccatgtggattcagcagcggaatactatcggctccatctggagggctatcacggaacagcaggcgacagcatgtcttatcatagcggaagtgtatttagtgctagggacagagatccaaatagcctgcttattagctgtgccgtatcttatcgcggggcatggtggtaccggaattgccattacgctaacctgaatggattatacggctccactgtggatcaccaaggtgtttcgtggtatcattggaaaggctttgaattctccgtccccttcacagaaatgaaactgcgccccaggaacttccgaagcccagcaggcggaggctag

SEQ ID NO: 201462 - DNA, 12729 bp, Artificial Sequence
  derived and/or modified sequence
atgatgcccgcacagtacgcccttacaagttcactggtgctcctggtgctgctttcgacagcccgcgccggacccttctcaagccgatctaacgtgaccctgccggctcctaggccaccaccccagcccggcggtcacaccgtcggtgcaggcgtcggcagtccctcctctcagctctacgagcataccgtcgaaggtggcgaaaaacaggtcgtgttcacacatcgcattaacctcccgccatccaccggctgcgggtgcccacctggcactgagccacccgtccttgcctccgaggtacaggcattgagggtccgcctggagattttggaggagctcgttaaaggattaaaggaacagtgcaccgggggttgttgtcccgcatcagcgcaggcaggaacaggccaaactgacgtccgaaccctttgctccttgcatggggtgttcgatctgtccaggtgtacctgttcctgtgaacctggctggggaggccctacatgttcagatcccactgatgcagagattcccccatccagccccccaagcgccagtggcagttgtccagacgactgtaatgaccagggacgctgcgtgcgaggtcggtgcgtgtgttttccaggatacacaggtccctcgtgtggctggcctagttgccctggggactgtcaggggcgcgggcgctgcgtgcagggtgtgtgcgtttgccgggccgggtttagcggacccgattgctcccagcgcagctgtcctagaggctgcagccagcgcggccggtgtgaaggaggccgttgcgtgtgcgacccaggatacactggcgatgattgtgggatgagatcctgcccgcgcggctgctcccaaagaggcagatgcgagaatggccgatgcgtatgcaatccaggatatactggagaggactgtggtgttcgcagctgcccacggggctgcagtcagcgaggacggtgcaaagacgggaggtgcgtttgtgatcctggctatacaggggaagactgtggaaccagatcatgtccgtgggattgtggtgagggcggccggtgcgtggatggacgctgtgtctgctggccaggctataccggggaggattgtagtacccggacgtgtccaagggactgccggggacgaggtcggtgtgaggatggtgagtgcatctgcgacactggatattcgggtgatgactgtggcgtaaggtcttgtcctggcgactgcaaccagcgggggagatgcgaggacggcagatgcgtgtgttggcccggctatactggcacggattgcggatcacgagcttgcccaagggattgccggggacgcgggcgctgtgaaaatggagtgtgtgtgtgcaatgcaggatattctggagaggactgtggagtacgtagctgtcctggcgactgcagaggcagaggaaggtgcgaatccggcagatgtatgtgttggccaggctacaccgggagggactgcgggaccagggcctgcccgggtgactgtcggggccgggggagatgtgttgatggcagatgtgtttgcaaccccggattcacaggagaggactgtgggtcgcggcgctgcccaggcgattgcagagggcacggactgtgcgaagatggcgtgtgtgtgtgcgatgcagggtacagcggggaggattgctctacgcgttcctgccccggtggttgccgcggaagagggcagtgcttggatggtagatgtgtgtgcgaggacggttatagtggcgaagattgcggcgtgcgacagtgccccaacgattgttcacagcacggagtatgccaggatggcgtgtgcatttgctgggaaggctacgtcagcgaggattgttccatcagaacctgcccaagtaactgccacggtagaggccggtgtgaggaagggcgctgcttgtgtgatccgggatatacaggacctacttgtgctacacgtatgtgtcccgctgactgtaggggccggggacgctgtgtacagggagtatgcctatgccacgtagggtacggaggcgaggattgcggtcaagaggaacctccagcctcagcctgtccgggggggtgtgggcctcgcgagttgtgtcgtgcaggccaatgcgtgtgtgtggaaggcttcaggggccctgattgcgccatccagacatgtcctggcgactgtaggggcagaggcgagtgccacgacggatcatgcgtgtgtaaagacggctatgccggggaggactgcggcgaggaagtccctaccatcgagggcatgagaatgcacctcctcgaggagaccacggtcaggactgaatggacgcctgcacccggtcctgtagacgcgtacgagatccagtttatccccacaaccgaaggtgcctcgccaccctttacagcacgagtcccctcatctgccagcgcctacgatcagaggggcctcgccccaggacaagagtatcaagttacagtgagggctctacggggcacatcctggggactcccagcatccaagactatcacgacgatgatcgacggaccacaggacctacgggttgtggcggtgaccccgacgactcttgaactgggctggctcagacctcaggccgaggtggaccgatttgtggtgtcttacgtttccgccggaaatcagcgtgtcagattagaggtcccccctgaggccgatgggaccctgctcacggatcttatgccgggcgtcgagtacgtggttactgttactgctgagaggggtagagccgtttcctacccagcaagcgtccgggcgaacaccggcagtagcccgttggggctgctcggtaccaccgacgagcccccgccttcgggcccttcaaccacccagggggcccaggcacccctacttcagcagagaccacaagagcttggagaattacgtgtgctgggcagggatgaaacaggcaggctccgagtcgtttggaccgcccagccagatactttcgcttactttcagcttcgaatgagggttcccgagggccctggagcccatgaggaggtactacccggagatgtgagacaagccctggtacccccccctccgcctggaacgccttatgagttatctttacatggagtaccccccggtggtaaaccttctgaccccattatttaccagggaattatggataaggacgaggagaagcccgggaaaagttcaggcccccctagactgggtgaacttaccgttacagatagaacctccgacagcttgctcctgcgatggacagtccctgagggggagtttgacagtttcgtgattcagtacaaggatagagatggacagcctcaagtcgtgcccgtggaaggaccacagcgcagcgcggtgatcaccagcctggacccaggtaggaagtataaattcgtgttatacggtttcgttggcaagaaaagacacggcccacttgtcgctgaggctaaaatcctgccccaatctgacccttcaccgggcacacccccgcatctagggaacctatgggtaacagatccgactcccgacagcctccacctgagctggaccgtccctgagggccagtttgacacatttatggtgcagtaccgcgaccgtgacgggcgtccccaggtggtgcccgtggaaggaccagagcgaagctttgttgtttcttccctggacccagaccacaaatatcgattcacactttttggaattgccaacaagaagagatacggacctcttaccgccgacggaaccaccgcccctgaaaggaaggaagagccgccgagacccgaatttcttgaacagcccttgttgggggaactgacagtaacaggagttactcctgactcccttaggctctcatggaccgtggcccaaggccccttcgattccttcatggtgcaatacaaggatgcacagggacagccacaggcagtcccagtcgccggggatgaaaacgaagtcaccgtccccggcctggatcctgaccgcaagtacaagatgaatctttatggcctaagaggaagacagcgtgtggggccagaaagtgttgtggcaaagacggcaccccaggaggacgtagacgaaacgcccagtcccacagagctcggcacggaagctccagagagccctgaggagcccctgctcggcgagctcacagttactgggtccagcccggattctctgtctttgttctggacggttccccaggggagcttcgatagcttcactgtacaatacaaggatagggacggaaggccccgcgctgtgagagtcggcgggaaggagtccgaagtcaccgtgggcggactggagcctggtcacaagtataaaatgcacctctacggcttacacgagggccaaagggtgggcccggtgtcagctgtcggagtgaccgccccgcaacaggaagagacccctcctgctactgagtcaccactggagccacggctaggggagctcaccgtcactgacgtgacccctaatagcgtcggactgtcttggaccgtgcctgagggccaatttgactccttcatcgtccaatataaggataaagatggccagccccaggtcgtgcctgtcgccgctgaccagcgggaggtaacagtgtacaatctggagccggaacggaaatataaaatgaacatgtacggcctgcatgacggccagcggatgggtcccctctccgtggtgatagtaacagctcctctgccgcccgctccagccacagaggcttctaaaccacctctggaacccagactaggcgagctgacggttacggatatcactcccgatagcgtgggtttatcctggacagtccccgagggtgaattcgacagttttgtcgtgcagtacaaggacagagatggccagccccaggtggttcctgttgccgccgatcaacgcgaggttactattccagatttggaaccgagccgaaaatacaagttcctactcttcggtatccaggatggaaagagacgctcccctgtcagtgtggaggccaaaacggtggcccggggtgacgcctctcctggcgccccacctcgcctgggcgaactctgggtgactgatcccacacctgattcccttcgtttaagctggaccgtgcctgagggtcagttcgatagcttcgtggttcaatttaaggataaagatgggccccaggtggtcccagtagaaggccacgaaaggtccgtcactgttacaccattagatgccggtcgaaagtaccgattcctgctgtatggcctgctggggaagaaacgacatggtccacttactgctgacggaactacggaggcccgcagcgcaatggatgatacaggcaccaaacggccccctaagccaaggctcggtgaggaactacaagtgacgacagtaacacagaattccgttgggttgtcttggactgtgccagaaggacaatttgactcctttgtggttcagtacaaggatagggacggccagccccaagtagtaccagtggagggctccctgagggaagtatccgtcccaggtctggatccggcacaccgctacaaattactattgtacggcctacaccatggtaaaagagtgggccccattagcgctgtcgcaatcaccgccggtagagaggagacagagacagaaacgacagcacccaccccccccgcgcccgaaccacatctcggcgagcttaccgttgaagaggccacttctcatacattacatctgtcttggatggtgaccgagggagagtttgattcttttgaaatccagtacacagatcgagatggacaactacaaatggtgcgaattgggggtgatcgtaatgatattaccctaagtgggctggaatcagatcaccggtatctagttacattgtatgggtttagcgacggcaagcacgtgggccctgtgcatgtcgaggctctgacggttccagaggaggagaaaccatctgaaccacccacagcgacaccggaaccaccgatcaagccgcggctgggggagctgacggtcacggacgcaacacccgattccctctccctgagttggactgtgcccgaagggcagttcgatcactttctagtccagtatcggaatggggatggccaaccaaaggcagtccgggtcccagggcacgaggagggcgtgactatttccggactcgaaccagaccacaaatacaaaatgaatttgtacggcttccatggggggcaaaggatggggccagtttccgtggtaggagtgaccgcagccgaggaggaaaccccaagtcccaccgagccttctatggaggccccagagcccgctgaggaacccctcctgggggagctcaccgtgaccgggtccagtccagacagtctgtctctttcttggacagttccacagggcagatttgacagctttacggtacagtacaaggatagagacggccggcctcaagtggtgcgcgtggggggggaagagagcgaggttaccgtcggaggtctggagccaggaaggaaatataaaatgcacctctacggactgcacgaagggaggcgggtgggacctgtgagcgccgttggcgtgaccgcacccgaggaggagtctccggacgccccattggctaagctccgcttagggcagatgactgtgcgcgacattaccagtgactccctgagcttgtcgtggacggttcccgaaggacagtttgatcatttcctcgtgcaatttaagaatggtgacgggcaacctaaggccgtaagagtgcccggccacgaggatggcgttactattagcgggctggagcccgaccataaatacaaaatgaacctctacggattccacgggggacagcgcgtcggacctgtgtcggccgttggacttacagccccaggcaaagacgaggagatggctccagcctcaactgagccacccactccggagccccctattaaacccagactggaggagctaactgtcacagacgccacgcctgactctctcagcctgtcttggacagtgccagaggggcaattcgaccattttctggttcaatataagaatggagacggacagcctaaagccacacgggtccccggacacgaggacagagttactatcagcggtctggagccagataataaatataagatgaacttatacggttttcacggaggccagcgcgtcggcccagtcagtgccattggagtcaccgctgccgaggaggaaacccctagccctactgagcccagtatggaagcgcccgagcctccagaagagcctctcctgggcgaacttactgtgaccggaagctcccctgacagcttaagcctgtcatggaccgttcctcaggggaggttcgactcattcaccgttcagtacaaagatagggatggtcggccacaggtggttcgagtggggggcgaagagagtgaagtcacggtgggcggactggaaccaggcaggaaatacaagatgcacctgtacggccttcatgagggcagacgagtcggacccgtcagtacagtaggcgtaaccgctcctcaggaggatgtggatgagacccctagcccaaccgaacccggcaccgaagcacctggtcctccggaggagccacttctcggggagctgactgtgacaggctcatccccggattctctgtccttgagttggacagtaccacagggacgatttgactcttttacggtacagtataaggatcgcgacggtagacctcaggctgtgcgggtgggggggcaggaaagtaaggtgaccgtgaggggtctggagcctgggcgcaaatacaaaatgcacttgtacggcctccacgagggccgcaggcttggaccagttagcgctgtgggggtgacggaggacgaagctgaaacgactcaggctgtacctactatgaccccagaacctccaatcaaaccccgactaggagaactgacaatgacagatgcaacacctgacagcctttcgctgtcttggactgtcccggagggtcagtttgatcactttctggtacagtaccgcaacggcgacggccagcccaaagcagtgagagtccctggccacgaggatggcgtgacaatctctggactggaacctgatcacaagtataagatgaatctctacggattccatggggggcagcgcgttggcccaatcagtgtgatcggcgtaaccgcagcagaggaggagacaccctccccaactgagctaagcaccgaggcccctgagccccctgaagaacccctcctcggtgaactaacagtgacaggcagctccccagactccctgagcctcagttggacaatcccccagggccacttcgactcgtttaccgttcaatacaaggatagggacggcaggccacaagtcatgagagttaggggtgaggaatcggaagtaactgtcgggggactcgagccgggccgtaaatacaagatgcatctctatgggttgcacgagggacgtagagtgggcccagtgagcaccgtgggcgttactgaggacgaagccgagaccacgcaggctgtaccaacaaccacccctgagcctccgaacaaacccagactgggggagctaactgtgaccgacgcaacacctgacagtctctcactctcttggatggtgcccgaggggcagttcgatcactttcttgttcaatacaggaacggcgatgggcagcccaaagtggtcagggtgcctggtcacgaagacggtgtaacaattagcggactcgagccagaccataaatacaagatgaacctgtacgggtttcacggcggtcagagggtgggccccataagcgtcatcggtgtgaccgccgcggaggaggagaccccagcacccacagagccctcaacagaagcccccgaaccccccgaggaacccctcctgggagagctgactgttacgggctcctcgcccgattcactgagcctatcctggacaattccccaaggacgtttcgactcgttcacagtccagtacaaggatagagatggacgtcctcaggttgttcgagtccgcggggaagaatcggaagtgacagttgggggtctggaacctggctgcaaatataaaatgcacttgtatggattgcacgagggacagagggttggacccgtctccgctgtgggggttacggcgcccaaagacgaagctgaaacgactcaggcagtaccgaccatgaccccagaaccccccatcaaaccacgcctcggcgaactgaccgtgacagatgccacgccagactctcttagcctgagctggatggtgcccgagggtcagttcgaccattttctagtgcaataccggaacggcgatggtcagccaaaagccgtgcgggtgcccggccatgaagacggagtaactatctcaggtttggaacccgatcataaatacaagatgaacctatacggctttcatggaggccagcgagtggggccagtgtcagcaataggcgtgaccgaagaggagacaccctcaccaactgaaccttctacggaagcaccagaggcccccgaggaacctcttctgggggaattgactgtaaccggctcgtcacccgacagcctttccctgagctggactgttcctcagggaaggtttgactctttcaccgtgcaatacaaagatagagacggccagcctcaggtggtacgcgttagaggggaagagtccgaggtgactgtaggtgggttggagcccggccggaagtacaagatgcatctatacggtcttcatgaaggacagagggtgggccccgtttctactgtcggaataaccgctcctttgcccactcccctccctgttgaacctaggctgggtgaattggcagtggccgctgtgacaagcgactcagtggggctctcctggacagtggctcagggcccctttgacagctttctggtccagtatcgggatgcccaggggcagccacaggctgtacctgttagtggcgacctccgggccgtcgctgtgtccggcttagatcctgcgcgcaagtataaatttctattatttggtctacagaatggcaaaaggcatggccccgtgccagtagaagctagaaccgctccagacacaaaaccttcacccagattaggagaattaaccgtgacagacgccaccccagactctgttggtctgagctggactgttccagagggcgaatttgatagtttcgtcgtgcagtataaggacaaggacggccggctccaggtggtgcccgttgcggccaaccaacgtgaggtgactgttcaagggctcgaaccaagccgaaagtataggtttttgctttatggactgagcggccgcaagcgcctaggtccaatttcagccgactctacaactgcgccactggagaaagaattgccccctcacctgggggaactcactgttgccgaggaaacctcctccagtttaaggttaagctggaccgttgcccagggccccttcgattcatttgttgtgcagtacagagatacagacgggcagccacgtgctgttcctgtcgcagcggatcagaggacggtgactgtggaggaccttgaacccggcaaaaagtacaaattcctgctgtacggactgctcggggggaagcgcttgggcccagtatctgccttaggcatgaccgcgcccgaggaagacacccctgcccctgaactggcaccagaggctcccgaacctcccgaggagcctagattaggcgtactgacggtaacagacactacacccgactctatgcgcctctcctggtcagtggcccagggcccgtttgattctttcgtggtccagtatgaagacacgaacggccagcctcaggcgctccttgtggacggtgaccaaagtaagatcttgattagcggcctggagcccagtacgccctacagatttcttctgtatggcctgcacgaaggaaaacgcttagggcccctgtcagcagaagggaccacagggctggcgcccgcagggcagaccagcgaagaatcccgccctcggttatcacaactctccgtcactgatgtgacaacaagcagtctgaggctgaactgggaagcgccgccaggtgcctttgacagcttcctacttagatttggggtcccctcgccctccactcttgagccgcatccccgtccactgctgcagcgggagcttatggtacccgggacacggcattccgccgtcctccgcgaccttcggtctggcactctttatagtctgactttatacggccttaggggcccgcacaaggctgatagtatacagggaactgcccggacattgtcgcccgtgttagagagtccgcgggacctccagttcagtgaaattagagagaccagcgccaaagtcaattggatgcccccgccctcacgggccgatagctttaaggtatcttatcagttggctgatggtggcgaaccccagtccgtgcaggtcgacggtcaagcccggacccaaaagttacagggcctgatccctggtgctcgatacgaggtgaccgtagtgagtgttcgagggtttgaagagagcgagccccttacagggttcctgactacggtcccggacggtcctactcagctgcgggctctaaatctcactgagggatttgccgtgcttcattggaagcctccccagaatccagtcgacacatatgacgtgcaggttacagcacccggcgcccctcccttacaggccgagacccccgggtcggctgtcgattacccccttcacgacctggtcttacacacaaactacaccgccacagtgcggggcctgcgaggcccaaatctcactagccccgcgtccattacatttacaaccggcctagaggctccacgcgatcttgaagctaaggaggtaactccacgcactgccttactgacgtggactgagccacctgttaggccagcaggctaccttctgtcttttcatacaccgggtggccaaaatcaggagatcctcctaccgggaggcataacctctcatcagctgctcggccttttccccagcacaagctataatgcaaggctgcaagcaatgtgggggcagtcattgctgcccccagtgagcaccagtttcaccaccggaggcttgcgtattccctttccaagagactgcggcgaagaaatgcaaaacggggccggggcatcgaggacatcaaccatcttcttgaatggaaatagagagcgcccactgaacgtcttctgcgacatggagactgatggcgggggttggttggtgttccagcgacgcatggacggccaaaccgacttctggagagactgggaggactacgctcacggatttggtaacatctctggggaattctggttgggaaatgaggctctgcactccctaacgcaggctggcgactacagtatgagagtggacttgcgggcaggagacgaagcggtgtttgcccagtacgattcatttcacgtagactccgccgccgagtactaccgtctacaccttgaagggtaccacggaactgccggggatagtatgagttatcactcaggatctgtcttttcagcacgggatcgagatcccaactcattgttaatttcttgcgccgtctcttataggggagcctggtggtaccggaactgtcactacgcgaacttgaacggtctgtacggctccaccgtggatcatcagggggtgtcatggtaccactggaaaggatttgaattttctgttccgttcaccgagatgaagctgaggccgcgtaatttccgctcccccgccggcggaggatag

SEQ ID NO: 201463 - DNA, 12735 bp, Artificial Sequence
  derived and/or modified sequence
atgatgcccgcccaatatgctctcacatcgagcctagtgctcctcgttctgttgtcaactgccagagctggacccttctcttcccgatccaatgtcactttgccagcgcctagaccccccccgcagccaggaggccacacagtcggcgccggcgtgggaagcccatcaagccaattgtacgaacatacggttgagggaggtgagaagcaggtagtgttcactcaccgcatcaatttacctccttccaccgggtgcgggtgccctcccggaactgagccaccagtcctcgcttcagaagttcaggctcttagagtccggctcgagattctggaggaactcgtaaaagggttaaaagaacaatgcacagggggttgctgtccagcctctgctcaagctggcacgggccaaaccgacgtgcggaccctctgttcacttcatggggtatttgatctgtctcgctgcacctgctcttgcgagcccggctggggcggccctacatgttccgatcctaccgatgctgagatccccccgtcctctcctcctagtgcttctggtagctgtccagatgattgcaacgatcaaggacgttgtgtgcggggacgttgcgtttgtttcccaggatatactggcccctcctgtggttggccttcctgccccggcgattgtcagggacgagggcgatgtgttcagggtgtgtgtgtctgcagggcagggttctctggacccgactgcagtcagagatcttgtccgaggggatgttcacagagagggaggtgtgagggcggtagatgcgtgtgcgatccaggctacactggcgatgattgtgggatgcgtagttgccctagaggctgctcacagagaggcaggtgtgagaatgggcgatgcgtgtgcaatcccgggtacactggcgaggattgcggcgtgagatcatgccccagaggttgctctcaaagggggagatgcaaggatggacgctgcgtgtgtgatcctggatataccggagaagattgcggtacgcggagttgcccatgggattgcggcgaggggggtcgatgtgttgatggacgatgtgtgtgctggcctggatatactggggaagactgtagcactaggacctgccctcgggattgccggggccggggccgatgtgaagatggcgaatgcatctgtgatactggttatagtggtgatgattgcggcgtacgttcctgtccgggtgattgtaatcagagagggagatgcgaggacggaaggtgcgtttgctggccaggatacaccggaactgattgcggctccagagcttgcccaagagactgtcgtggacgaggtcggtgtgaaaacggagtgtgcgtctgcaatgccgggtattcaggggaagactgcggagtgagatcgtgccccggcgactgcagagggcgtgggagatgtgagagtggcagatgcatgtgttggcccggctacacaggtcgggattgtggaaccagagcttgcccgggtgactgtcgggggcgcggccgctgtgtcgatggccgatgcgtatgtaatccgggatttacaggggaagattgtggcagtcggagatgcccaggtgattgcaggggtcatggactgtgcgaggatggcgtgtgtgtatgcgacgcagggtatagcggggaagattgtagtacaagatcgtgccctggcggttgtagagggagggggcagtgcctggatggcaggtgcgtgtgcgaggatggctacagtggcgaggactgcggagtacggcagtgtcccaacgattgcagtcaacatggggtctgccaggacggagtctgcatttgttgggaggggtacgtgtccgaggattgttctattagaacctgcccatcaaattgccacgggaggggccgttgcgaagaaggccgctgtttgtgcgaccccggatacacaggaccgacttgtgcaacacgtatgtgtcccgccgactgccggggccggggacgctgtgtgcaaggggtgtgtttgtgccacgtgggctacgggggagaggattgcggtcaggaagagcctcccgcctcagcatgtccaggtggatgcggtccacgggagttgtgccgcgcagggcagtgtgtctgcgtcgagggatttagggggcccgattgcgccatacaaacgtgtcccggggattgccgtggccgaggtgagtgccacgatgggtcctgcgtttgcaaggacggatacgctggagaggattgcggcgaagaggttccaacgatcgagggcatgagaatgcacctgttagaggaaacaacagtacgcacagagtggacccctgcacccggcccagtcgacgcttacgagatccaatttatccctacaacagaaggggcttctccaccatttaccgctcgggtgccatctagcgctagtgcctatgaccaacgtggcttagcacccgggcaagaatatcaggtgaccgtgcgagcgttacggggaacatcttggggcctcccagcatccaaaactattacaacaatgattgatgggccacaagacctcagagtggtcgctgtcaccccaacaacattagaactcggatggctacgaccgcaggcagaagttgaccgctttgttgtgtcatacgtttctgctggcaatcagcgcgttcgattagaagttcctcctgaggctgatgggacactcttaacagacctgatgcccggcgttgagtatgttgtgaccgtgactgcagaaagaggtcgagccgtatcatatccagcgagtgtgagagctaacacaggatcatcacctctgggcctgctcgggacaacagatgaacctcctccatccggccccagcaccacacagggtgcccaggctcccttactgcagcagagaccccaggagctaggtgaactcagagtcttaggcagggatgaaaccggtagattacgcgtggtttggactgctcagcctgatacgtttgcctactttcaattgcgaatgagagtgcctgagggccctggcgcccacgaggaggttcttccaggggacgttcgccaggctctggttccacccccaccaccaggcaccccgtatgagctttcactccatggcgtcccacccggaggcaagccatctgaccccatcatataccagggcattatggacaaagacgaagagaagccaggcaaatcctcaggccctccccgcctgggagaactgaccgttactgacagaactagcgattccctgctccttagatggaccgtgcccgagggagagtttgacagcttcgtaatccagtacaaggaccgtgacggacagccccaagtagtccccgtagagggaccccaaaggagtgctgttataacatcgctcgaccctggaaggaagtataagtttgtcctctatggctttgtgggaaagaagcgccacggccctctggtcgccgaagctaagatcctgccccagtccgacccttccccaggcacacctccccacctcggcaacctgtgggtgacagaccctacccccgactcactccacctctcctggactgtgccagagggacagtttgacaccttcatggttcagtacagagatagagacggcaggccccaggtggtgcccgttgaaggtccagaacggagcttcgtggtgtctagtctcgatccagaccacaagtacagattcaccctgttcggcattgccaacaagaagagatatggcccattaactgccgacggaacaaccgccccggaaaggaaggaggagcctcccagacctgagtttcttgaacaacccctgctcggcgagttaacagtgacaggagttaccccagattctttgcgcttgtcatggacagtagcacaaggccctttcgatagctttatggtacagtataaagacgctcaaggccagccccaggccgttcctgtcgctggggatgagaacgaggtaacagtgcccggactggaccctgatcggaaatacaaaatgaacctctatggtctgcgtgggaggcagcgcgtaggtccagaaagcgtcgtggctaaaaccgcacctcaggaagacgtagatgagactccttcccccactgaacttgggactgaggctccagaatcacctgaagaacctctgttgggagagttgacagtgaccggttcctccccggactcgctatctctgttctggacggtgccgcagggatcctttgattctttcacagtgcagtacaaggatcgagacggaagacctagggccgttagggtgggcggtaaggagtcagaagtgaccgtcggaggactggaacccggccacaaatataagatgcacctgtatggcctgcacgaaggacagagagttggtccagtgtccgcagttggagtcaccgccccgcagcaggaagaaaccccaccagccaccgaatcccccttggaaccaagactgggtgaactcaccgtaaccgatgtcacccccaacagcgtcgggttaagctggaccgtgcctgaaggccaatttgattcatttatcgtgcaatataaagacaaagacggacagccacaggtggtccccgtagcagcggaccagagggaagtaaccgtgtataacttagaaccagagcgaaaatacaagatgaacatgtacggactacatgacggccagaggatgggaccattaagtgtcgtaattgtgacagctcctctgcctccagcgccggccactgaggcaagtaaaccaccactggaaccacgactgggggagctcaccgtgacagacattacacccgatagcgtcggtctctcatggacggtacccgaaggggagttcgatagttttgtggtgcagtataaagatagggatggccaaccacaggtagtgccagttgccgccgaccagcgcgaagtgacaatcccagaccttgaacctagcaggaagtataagtttcttctgtttggaattcaggacggaaagagaagatcccctgtttccgtggaagctaagactgtggctcgcggcgatgcctcgccaggagcgcctccccggttgggggaattgtgggttacagatcctactcctgatagcctgagactatcctggacagtgcctgaaggccagttcgatagttttgtagtgcagttcaaagataaagatgggccccaagtggtccctgtagaagggcacgagagaagcgttaccgtcacaccactggacgctgggcggaaatacagattcctgttatatggacttcttgggaaaaaacggcacggacccctgacggcggatggcactactgaggcgagaagcgctatggacgataccggaaccaaaagaccccctaaacccagactcggagaggagctgcaagtgaccacggttacgcagaactcggtaggtctgtcctggacggtgccagagggacagttcgatagttttgtggtgcagtacaaagaccgagacggacagccccaggtcgtgcccgtcgaaggcagccttagggaagtgtctgtgccaggattggatccagcccatagatacaaactcctcctgtacgggctccaccatggcaagagggtaggccccatttctgccgtagcaatcactgcaggacgcgaagagacagaaaccgagaccacagcccctactccccccgcccccgagcctcatttaggagagttaactgtggaggaagctacaagccataccttacacttgtcatggatggtgacagagggtgaattcgattcctttgaaatccagtatacagatagggatgggcagctccagatggtacgcattgggggtgaccggaatgacatcacactctccggcttagagagtgaccacagatacctggtgacactatacggcttctcagatggcaaacacgtcggaccagtccacgtcgaagccctgacagttcccgaagaggagaaacctagtgagcctcctaccgccactccagaaccaccaatcaaacctagacttggcgagctgaccgtgacagatgcaactcctgactcactatcgctgagctggacggtacccgaaggacaatttgatcatttcttggtgcagtaccgaaatggtgatgggcagcctaaagccgtgcgtgtgcccggacacgaggagggggtgaccattagtggattggagccagaccataaatataaaatgaacctatacggatttcacgggggacagaggatgggaccagtgagtgtggtgggcgtcacggctgctgaagaagaaactcctagccctaccgaaccgtctatggaggcgcccgagcccgcagaagaaccactgctgggagaacttactgtgacagggagttcacccgattctctctcactctcctggaccgtgccacaaggaaggtttgattcttttacagtgcaatacaaagatcgagacggtaggcctcaggtcgtgagggttggtggggaagagtccgaggtgactgttggaggactagagcccggccgtaagtacaaaatgcatttatacggattgcacgagggacgtcgcgtgggacctgtgtccgccgttggggttacggcacccgaggaagaatctccggatgcaccactggccaaactgagactcggtcaaatgaccgtccgcgatataaccagcgactccctctcactgagctggacagtccccgagggccagttcgaccattttctggtgcaatttaagaacggtgacgggcagcccaaggccgtccgcgtgcccggccatgaagacggcgtgaccattagcggcttggagccggaccacaagtataaaatgaatctgtatggttttcacggcggccaaagagtcggacctgtatctgcagtggggttgacggcgcccggtaaagatgaggagatggcaccggctagcaccgaaccaccaacccccgagccccctataaaaccacggcttgaagaacttaccgtgacagacgctacacccgactctctcagtctgtcttggaccgtgcctgaaggacagtttgatcatttcctcgtgcaatacaagaatggtgacggacagcctaaggctacacgtgtaccaggtcacgaagatcgagttactatctccgggctagaaccagataacaaatacaaaatgaacctgtatgggttccacggaggacagagggttggaccagtttctgccatcggtgttacagctgcagaagaagaaacaccaagccctacagaaccctctatggaagcaccagagccaccagaggagccactcctgggagagctgactgtaaccggttcaagtcctgatagccttagtctttcctggaccgtgcctcagggcagattcgattccttcacagtacaatacaaggatagagatggcagacctcaggtcgtgagggtaggaggagaagaatcagaagtcacagtcggtggtctggaacccgggaggaaatataaaatgcatttatacggtctgcatgagggtaggagagttggtcccgtgagcactgtcggtgtgacagccccccaggaagatgtcgacgagacaccaagtcctacagaacccggtaccgaagcccccggaccccccgaagagcccttgttaggcgagcttacagtgaccggctcatctccggattctctcagcctgtcatggactgtgccgcagggaaggtttgactcgttcacagtgcaatataaggatcgggatggacgacctcaggctgtgcgggtggggggccaggagtctaaagtgaccgtgcgcggcctggaacccgggaggaaatataaaatgcatctttacggcctgcacgaaggcagacgcctgggacccgttagtgctgtgggagtaactgaagatgaagccgagactacacaggcggtgcccactatgactcctgaaccacccataaaacccaggctaggtgaacttaccatgaccgacgctacacccgactcactttctcttagctggaccgtgccagaagggcagtttgaccacttcctcgtgcagtaccggaacggcgacggacaacctaaggcagtaagagttcccgggcatgaggacggagtcacaatctcagggctcgagcccgaccacaaatataagatgaatctttatggcttccatgggggacagcgcgtgggacccataagcgtgatcggagtaactgctgccgaggaagagactccatctccgaccgagctttcaacagaagccccagagcctccagaggagcccttgctaggcgagcttactgtgactggtagcagccctgactctttaagtttgtcctggactattccacagggccacttcgactcttttaccgttcagtacaaggacagagatggcagaccacaggtgatgagagtgagaggggaggagagcgaagtcaccgttggagggttggagccgggaaggaaatataaaatgcatctctacggattgcacgaggggagacgcgtcggacctgtgtcaacagtgggagttaccgccccagaagacgaagcagagaccactcaagctgttcctactacaacccccgaaccacctaataaaccacgcctcggcgagctcacagtgacggacgccaccccagattctctatccctcagctggatggtcccagaaggccagttcgaccacttcctagttcaataccgtaatggagatggccagccgaaagtcgttcgcgttcctgggcatgaagatggtgtgaccattagtggactggaaccggatcacaagtataagatgaatttgtacggttttcatggaggccaacgagttggaccaattagtgtgatcggtgtgacagccgccgaagaggagacaccagccccaaccgaaccctcaaccgaggcccctgagccccccgaggaacctctgttaggcgagctcactgtgactgggagcagtcccgatagcttgagtctttcttggacaatacctcagggccggtttgacagctttaccgtgcaatacaaagacagagacggccggccccaggtggttagagttaggggggaggaatccgaggtgaccgtgggaggactcgaacctggttgcaagtataaaatgcacctctatggacttcatgagggacagcgcgtgggacctgtatcggcagtgggtgtcacagccccaaaagacgaggctgaaacgacacaggcagtcccaacaatgacaccagagccacccataaagcctcggctgggggagcttactgttacggacgctacacctgattcacttagtttatcctggatggtacctgaagggcaattcgaccacttcttagtccaatatcggaatggagacgggcagccaaaggctgtaagagtgccaggtcatgaagacggagttactatttccggcctggaacccgatcacaagtataaaatgaatctctacggatttcacggggggcaaagggttgggcctgtctccgccataggggttactgaggaagaaaccccatcacctactgaaccatccaccgaagcacctgaagctcctgaggaacccttattaggcgagctcacagtgaccggatcctctccagattctctctcactctcttggaccgtaccacagggacgattcgattcctttacggtgcaatacaaggatcgggacggtcagcctcaggtagtacgggtgcgtggcgaggaatctgaagtcaccgtgggaggcttggaacctggaagaaagtataagatgcacctttacggccttcacgaaggccagagggttgggcctgtgtccactgttggaataacagctccactgcccactccattgcccgtggagccaagactgggagaactggctgtagctgccgtgaccagcgattctgtgggtctgagctggactgtcgcccagggcccgtttgatagctttttagtacaataccgggatgctcaggggcagcctcaagcggtacccgtcagcggtgacctcagggccgtggcagtaagcggcctggatcctgcccgcaagtacaaatttctccttttcggactgcaaaatggaaagcggcatgggcccgttcctgtggaagccagaactgcacccgatacaaaaccctcccctcgcctcggagaactcacagtaactgacgcaacacccgattctgtgggcctcagctggaccgtccctgaaggggagtttgactcatttgtagtgcaatataaggataaggatggcagattgcaggtggtacccgtcgctgccaaccaaagagaggtcaccgtacagggcttagagcccagccgcaaataccggtttttgctttatggcttgtcgggacgtaagcgactcggacctatctctgctgatagcaccaccgcccccctagaaaaagagttgcctccccacctaggagagttgactgtagccgaagaaacctcatcatccctcagattatcctggacagtggctcaaggacctttcgactcgttcgttgttcagtaccgagacacggatggccaaccacgcgctgtgcctgttgcagcggaccagcgcaccgttaccgtggaagatcttgaacctggcaagaagtataaatttctgctctatggcctgctaggagggaagagattaggccctgtcagcgcactgggcatgactgctccagaggaagacacaccagcaccggaactggcccctgaggcaccggagccaccagaagaacccaggctgggcgtcctgaccgtgaccgatactactccagactctatgcggctttcttggtccgttgctcaaggaccatttgactccttcgtggtgcagtacgaggacacaaatgggcagcctcaagctctgctcgtggacggagatcagagcaagattctgataagcggcctagagccatcaactccatacaggttcctgttgtacggactgcatgaaggaaagcggctcggacccctgtccgcagagggtaccacaggactggctcctgctgggcagacatccgaagagagtcggccccgtctatctcagctgtctgttaccgacgtaaccacctcttccctcagactgaactgggaggccccacctggcgcttttgattcttttctcctcagattcggagttccgtctcctagcacccttgaaccccacccacgtcctctcctccagcgggaactgatggtccccgggacaagacatagcgccgtgctgagagacctgcgtagtggtacattatactctttgacactgtatggtcttcgcggtccacacaaggctgactctattcaaggcactgctcgaacattatcccctgttttggaaagtccccgagatctccaattctcagagattcgtgaaacctccgctaaagtcaattggatgcctccaccatctagagcagactccttcaaggtttcttatcagctcgccgacggaggtgaacctcaatcagtgcaggtcgatggacaggcaaggacccaaaagcttcaggggctgatcccaggagcgcgatacgaggtcaccgttgtcagcgtgcgtggatttgaggagtcagagcctcttactggatttcttacaacagtgccagatggccctactcagcttcgcgccctaaatcttaccgaaggctttgctgtattgcactggaagcccccacaaaacccagtcgacacctatgacgttcaggttaccgctcccggcgcaccacctcttcaggcagagacccctgggagcgccgtggactaccctctgcacgatctggttctgcacactaattatacggcgacagtgcgcggcctgcgcggacctaatctgacttctccagcttccattacttttaccaccgggcttgaagctccacgcgaccttgaggctaaggaagtcacacccagaaccgctcttttgacatggaccgaacccccagtccggcctgccggctaccttctatcattccacacccccggtggtcagaaccaagagattttactgcctggaggaatcacctcccatcaactgctgggcctctttccctcaacctcgtacaatgctcggcttcaggctatgtgggggcagagccttctcccacccgtgagtactagctttaccacaggcgggctaaggatcccatttccccgtgactgcggagaagaaatgcagaatggtgccggagcctctagaacctcaacaatttttttaaacggtaatcgcgaacggccccttaatgttttttgtgacatggaaacagacggcggaggttggcttgtattccaaagacggatggacgggcagactgatttttggagagactgggaagactacgcacatggctttggtaacatcagtggggagttttggttaggtaacgaagcgctgcactcactgactcaggcaggggactacagcatgagggtggatcttcgagccggtgatgaagccgtttttgcacagtatgactcattccacgtggactcggccgcagaatactacaggctgcatctggagggataccacgggactgccggcgactcaatgtcataccatagtggctctgtgtttagcgcccgggacagggatccgaactcgctgttaatttcgtgtgctgtaagttataggggcgcatggtggtaccggaattgtcactacgcgaacttaaacgggttgtacggatcaacagtggatcaccaaggagtcagttggtatcattggaagggattcgagttttcagttccgttcaccgagatgaaactgcggccccgtaattttaggagtccagcaggcggaggttag

SEQ ID NO: 201464 - DNA, 12729 bp, Artificial Sequence
  derived and/or modified sequence
atgatgccggctcagtatgcactcacctccagtttagtgttgttggttttattatctaccgctagagccggacctttctccagcagaagcaacgttaccctgcctgcacctcggcctcctcctcagccaggaggtcacaccgtgggggccggtgtgggttcaccctcatcacagctgtatgagcacaccgtggagggcggggaaaagcaggttgtgtttactcacaggattaacctcccaccaagcacggggtgtggatgccccccaggaaccgaaccgcccgtgttagctagcgaagttcaagctctgagggtgagactagaaattctagaggaactggtgaagggactcaaagaacaatgcaccggaggttgctgcccagctagcgcacaggctggtactggccaaactgacgttaggacgctctgctcactccacggggtttttgatctgtccagatgtacgtgttcgtgtgagcccggctggggtggacctacatgctctgaccccactgatgcggaaatcccaccttcgtccccaccatcggcttcaggctcttgtcctgacgattgcaacgatcagggaaggtgtgtgcgtggccgctgtgtttgttttccggggtatacgggcccttcatgtgggtggccttcctgcccaggtgattgccaaggccgcgggaggtgcgtgcagggggtgtgtgtgtgtagggccgggttctcgggacctgattgcagccagcgttcctgtccgcggggctgtagccagagaggtcggtgcgaaggaggaaggtgtgtgtgcgatcctggttataccggagatgattgtggtatgcggtcgtgccctcgaggatgtagccagcgagggagatgcgaaaatggtaggtgtgtgtgcaatccaggttatacaggcgaggattgtggggtgcggagttgtcctcgcgggtgcagccaacggggtaggtgtaaggatggaagatgtgtgtgcgatcccggctacactggagaggattgtgggactcgtagctgcccatgggattgcggcgaagggggcagatgtgtggacgggagatgtgtctgttggccgggctacacaggagaagactgcagcaccaggacgtgcccacgggactgtcgaggccgcggaagatgcgaggatggggagtgcatttgcgataccgggtactccggggacgattgcggcgttcgaagctgcccaggtgactgtaatcaaagagggcgctgcgaagacggaagatgcgtatgctggcctgggtatacaggaacagattgcgggagtcgagcatgccctcgcgattgtagaggccgtggaaggtgtgaaaatggggtctgtgtgtgtaatgcgggatattctggcgaggactgcggcgtccgaagttgccccggtgactgtcgagggagaggcaggtgcgaatcaggcaggtgtatgtgctggcccgggtatactggacgggactgtggcacaagggcgtgcccgggtgactgtcgaggacgtggtcgctgtgtagatgggagatgtgtatgtaacccaggtttcaccggcgaggattgtgggtctaggaggtgtcctggcgattgccggggacatggcctttgcgaggacggtgtgtgtgtgtgcgatgccggctactctggtgaggactgcagcacccgaagctgccccgggggttgcagaggaaggggtcagtgcctggatgggaggtgcgtatgtgaggacgggtattccggggaggattgcggggtcagacaatgccccaacgactgctcacagcatggggtttgccaggacggggtgtgtatctgttgggaaggttacgttagcgaggactgctcaattcgaacttgcccatctaactgtcatggtagaggtcgttgtgaagaaggccggtgcctgtgtgatcccggatatacaggtccgacttgcgcgactcgaatgtgtccagccgactgtcgggggcgaggccgttgtgtccagggggtgtgtctatgccacgtggggtacggcggagaggattgtggacaggaagaaccaccagctagcgcttgcccaggaggctgtggaccacgtgaactgtgtagagccggtcagtgtgtctgtgttgaaggtttccgagggccagattgcgctattcagacctgccctggggactgccggggccgaggcgaatgtcatgatgggagctgcgtgtgcaaggatggctacgccggggaagattgcggtgaggaagttcctacaattgaagggatgagaatgcacttactggaagaaacgacagttcgcacagagtggactcctgcacccggcccagtggatgcctacgagatccagtttatacccacgactgaaggagcatcgcctccatttacagcccgagtcccatcctctgcgtcagcctacgatcagcgaggtctggctcctggacaagaatatcaagtgaccgttcgggcgctgagggggacttcctggggactccccgcttctaaaactatcaccacgatgattgatgggccacaggatctgcgagtggtggctgtcacaccgacaaccttagaattagggtggctaagaccccaggcagaagtggaccgcttcgtagtttcttacgtatctgctggtaatcaaagagtacgtttggaggttcctccagaagctgacggaacccttttgaccgacttaatgccaggggttgagtatgttgtaaccgttactgctgaaagaggtagggcagtctcctacccagcatcagtacgcgctaatactggaagcagccccttaggcctcctaggtactaccgacgagccaccaccgagcggacccagcacgacccagggtgcacaggcgccactgttacaacagaggccacaggaactcggcgaactgagggtgctgggacgagacgagactggcagactgagagtcgtgtggacggcccagcctgatacatttgcatatttccagctgagaatgagggtcccagaaggccctggagcccatgaggaggtactacccggagatgtgagacaagccctggtacccccccctccgcctggaacgccttatgagttatctttacatggagtaccccccggtggtaaaccttctgaccccattatttaccagggaattatggataaggacgaggagaagcccgggaaaagttcaggcccccctagactgggtgaacttaccgttacagatagaacctccgacagcttgctcctgcgatggacagtccctgagggggagtttgacagtttcgtgattcagtacaaggatagagatggtcagccacaggtcgtgccagtggaaggccctcaacgtagcgctgtgattacttctctggacccaggacgaaaatataagttcgtactttatggtttcgtgggaaaaaaaaggcacgggcccctcgtcgcagaagcaaagatactaccgcaatctgaccctagtcccgggactccccctcacctcggtaacctgtgggtaactgatccaacccccgattcacttcacctgtcttggaccgttcccgagggacagttcgatacctttatggtgcagtacagggacagagatggccggccccaggtagtccccgtggagggaccagaacgatctttcgtggtaagtagcctggatcctgatcataaataccgtttcaccctgttcggaatcgccaataaaaagcgttacggccctttaactgctgacgggacaaccgcccccgagaggaaggaggagccacccagaccagagttcctggaacaaccactgcttggcgaactcactgtcacaggtgtcactcccgattctctgcggctttcctggactgtggcccaaggccctttcgactctttcatggtacagtataaagatgcacaaggccaaccgcaagcagttcctgtagcgggcgatgagaacgaggtgacagttcctggactagacccagatagaaagtacaagatgaacctatacggattgaggggacgtcagagagttggtccagaatccgttgtagcgaagaccgccccacaagaggacgtggacgaaacccccagtcctaccgaactggggacagaggccccagaaagtcccgaagagccgctcctaggagagcttaccgtgaccggtagcagcccagactccctttccttgttctggacagtgccccaaggtagttttgactctttcactgttcaatacaaggatagagacggaagaccacgcgctgtgagagtcggaggtaaggagtctgaagttactgttggaggtcttgaaccaggacataaatataagatgcatctgtatggcctccacgaaggtcagagggtggggcctgtctctgctgtaggagtaaccgctccacaacaagaggagactccccctgctacagaatctccgttggagccgaggctgggtgaactgactgtgaccgacgtgacccctaactcagtgggcctttcttggactgtgcctgagggccaatttgattctttcattgttcagtataaggacaaggacggtcaaccacaagtcgtgcctgtagcggctgaccagcgtgaagtgacagtttataacctagagccagagaggaaatacaagatgaacatgtacgggttgcatgacggccaacgaatgggccctctgtcagtcgttatagttactgccccgctgccacccgcccctgctactgaagcaagtaaacctccgctggagcctagacttggagaactaacagtaaccgatatcactcctgattcagtaggcttatcttggacagtacctgaaggcgagtttgatagttttgtcgtccagtataaagatagagacggacaacctcaagtcgtgcctgtagccgctgaccagagagaggtgacaataccggacctcgagccctcccgcaaatataagttcttactcttcggcatccaagacggcaagcgccggtcccccgtgtccgtggaagcaaagaccgtggcgagaggagacgcttcccctggggctccaccacgcctgggcgaactctgggttaccgatcccacccctgacagcctacggctgagctggactgtgccggaagggcaatttgactccttcgtagtacagtttaaagacaaagacggacctcaggtcgtgcccgtcgaaggtcacgagagatctgtgaccgtgactccacttgatgctggacggaagtacagatttttgttgtacgggctgctcgggaagaaaagacatggcccactgacggccgatggaaccacagaggccagatccgctatggatgacacagggacgaaacggccccctaaacctaggttaggagaagaactccaagttactactgtgacccagaacagtgttggcctatcatggacggtgccggagggacaatttgactcctttgtggttcagtacaaggatagggacggccagccccaagtagtaccagtggagggctccctgagggaagtatccgtcccaggtctggatccggcacaccgctacaaattactattgtacggcctacaccatggtaaaagagtgggccccattagcgctgtcgcaatcaccgccggtagagaggagacagagacagaaacgacagcacccaccccccccgcgcccgaaccacatctcggcgagcttaccgttgaagaggccacttctcatacattacatctgtcttggatggtaacagaaggagaatttgactcctttgagattcaatatactgaccgagatggacaattgcaaatggtgagaattggcggggatcgcaacgacattacactgagtggactggagtctgatcaccgctacctggtgactctctatgggttcagcgacggcaagcacgtgggccccgtacacgttgaggcactaaccgtccccgaagaagagaaaccatccgaacctcctacagctacgccggaacctcccattaaacctagactcggggagctcactgtgactgacgccactccagatagcctgtcactgtcgtggaccgtaccagagggacaatttgatcacttcctcgttcagtaccgcaacggtgacggccagcctaaggccgttcgcgtacccgggcacgaagaaggtgtcactatttctggactggagcctgatcataaatataagatgaatttgtatggatttcacggcggacaacgaatgggccctgtgagcgtggtcggcgtgactgctgctgaagaagagacaccctcgccaacggaaccgtcaatggaggcccctgagcccgccgaagaacctctattaggagaattaaccgttacaggtagctctcctgactcattaagtctctcttggacagtcccccagggaaggtttgatagtttcaccgtgcagtacaaggaccgtgacgggcgaccccaggtcgtcagggtgggaggcgaagagagtgaagttacggtcggaggattagagcccggaaggaaatacaaaatgcatctgtatgggttgcacgagggtaggcgggtgggaccagtcagcgctgtgggcgttacagcacccgaagaggaaagtccagacgctcccctggcaaagctcagacttggtcagatgactgtccgcgatatcaccagcgattctttatctctctcatggaccgtgcccgagggccaattcgatcactttctggtgcaatttaaaaacggcgacggccagcccaaagctgtgagagtgcccggccacgaggacggcgtgactatctctggcctggaaccagatcacaaatacaaaatgaacctgtacggtttccatggagggcagcgggttggaccagttagtgccgtgggcctgaccgcacccggaaaggacgaggagatggctccagcttctaccgaaccacctacccccgaacctcccatcaaaccccgactagaagaactgacagtaaccgacgccactccagacagcctgtctctcagctggacggtgcccgagggacaatttgatcactttctcgtgcagtacaaaaatggggacggccagcccaaagcaacccgggtccctggccacgaggaccgcgtgaccatttctgggttagagcccgataacaagtataaaatgaatctatacgggtttcacggtgggcagagagttggaccagtgtcagccatcggagtgacagccgcagaagaggaaacaccatcaccaactgaaccgtccatggaagcccctgagccccctgaagaacctctactcggggaactgacagtgaccgggagtagccctgactcactctctttgagttggacagtaccacaaggtcgtttcgacagcttcaccgtgcaatacaaggatagagacgggcgccctcaagtcgtacgggttgggggagaagaatccgaagtaacggtcgggggcctggaaccaggaagaaaatataagatgcatttatatgggctacacgaaggacgccgcgtcggcccggtgagtacagtgggagtgacggccccgcaagaagacgtggatgagacccccagccctacagaaccaggaactgaggccccaggacctccagaagaaccactgttaggtgaactgaccgtgaccggaagctcccctgatagcttgtctctatcatggactgtcccacaaggtcgctttgattcttttactgtacaatacaaagacagagatggaagaccccaggcggtgagagtggggggacaggagtccaaagtgaccgttcggggattggaaccaggaaggaaatataaaatgcacctgtacggattgcatgagggccgacgactcgggcccgttagcgcagtgggagtaacggaggacgaggccgagaccacccaagccgtccctaccatgactccagaacctccaattaagcctcgcttaggtgagctcacaatgacagacgcgacacctgactcactatcattgtcttggaccgtccctgaagggcaattcgaccattttttagtacaatatcgcaacggagatggccagccaaaagctgtacgagtccccggtcacgaagacggcgtaacaatttctggactggagcctgaccataaatacaaaatgaacctgtacggctttcatggaggtcaacgtgtcgggcccattagcgtaattggagttacagccgccgaagaggaaactccatccccgacggagctcagtactgaagcacccgaaccaccagaggagccccttctgggcgaactgactgtgacaggatctagtcccgactccctctcactgtcctggaccataccacagggtcatttcgattcattcacagttcaatataaagatagagacggccggcctcaggtgatgagagtgcgaggggaggagagcgaagtcaccgttgggggtctggaacctgggaggaagtataaaatgcatttatatgggcttcatgagggaaggagagttggcccggtgagcacagttggcgtgaccgaggacgaggccgagacaacccaggctgtgccaaccacgacccccgagccacccaacaaacctagactcggcgaactgacagtcacagatgctacgcctgattccctatcactgagctggatggtgcctgaaggacagttcgatcacttcctggtgcagtacagaaatggcgacggacagccaaaagtggttcgagttcctgggcacgaggacggtgtaaccatttctggactggagcccgatcataagtacaagatgaacctgtatggctttcacggtgggcagcgcgttggacctattagtgtgattggtgtcaccgcggccgaagaggaaaccccagcacctactgaaccatcgactgaggctcctgaacccccggaagaaccactgttaggtgaacttaccgttacgggctcatcccccgactcactatctctatcttggaccattccccagggacgctttgatagctttaccgtgcagtataaagatcgggacggacggccacaggttgtgcgcgtgaggggagaggagtcagaagtcaccgtaggtggactcgagcctggatgtaagtacaaaatgcacctgtatggcctacacgagggacagcgagtgggacccgtgtcagcggtcggcgtgaccgcgcctaaagatgaggccgaaacaacacaagctgtacccacaatgacccctgaacctcccattaaacccagactgggcgagctgacagttaccgacgcaacccctgactccctaagtctctcttggatggtgcctgaggggcagtttgatcactttttggtgcagtacaggaacggcgatgggcagccaaaggccgtaagagtccctggtcatgaagacggagtcaccatttccggactggagccagatcacaaatacaagatgaatctttatggattccacggtgggcagcgagttggccccgtcagtgccattggagtgacagaagaagaaaccccaagccctaccgaaccatccaccgaagccccagaagcacccgaggaacctctgctaggtgagctgactgttaccggttcctcccccgactctctgagtctgagctggacggttccgcagggccgttttgatagctttaccgtgcagtataaagatagagatggccagcctcaggttgtccgagttaggggggaagaatctgaagtgacagtgggcgggctggagcctggtcgaaagtacaagatgcatctgtatggactccatgagggccaaagggttgggccagtttctacagtcggaatcactgcaccgctgcctacaccattgcctgtagaacctcgtcttggcgagcttgccgttgcggctgtaactagtgactcagtcggcctgtcctggacagtggcccagggaccattcgactcttttctcgtgcagtaccgcgatgctcagggacagcctcaagcagttcctgtgtcaggggaccttcgcgccgtggccgtgtcaggattggatccggctagaaaatacaagttcttgctgtttgggctccagaatggaaagcggcacggacccgtccccgtagaagcccgcaccgcacccgataccaagccttcgcctcgacttggcgagctgacagtgacagatgccactccggattctgtgggtttgagctggactgttcccgaaggcgaatttgactctttcgtagtgcagtacaaggataaagacggtaggctccaagtagtgcctgtagccgcaaaccagagagaagttacagtgcagggactggaaccctcaagaaaatatcgtttcctgctctacggactctcgggtcggaagcgtctcggaccaatatcagctgattccacaacagctcctcttgagaaagaattacctccccaccttggagagctgaccgtagctgaggagacatcaagttccctgcgtctatcttggaccgtcgctcagggcccattcgatagttttgtggtgcagtatagagacacggacggccagccacgcgcagtaccggtggccgctgaccagagaacagtgaccgttgaagacctggaacctggcaaaaagtacaaatttttgctgtatggattgcttggaggaaagaggctgggtccagtcagcgccctgggtatgaccgcacctgaagaagatacaccggcgcctgaattagcaccagaagcccctgaaccgcctgaagagccaagactgggggtgctgaccgtaacggatacaaccccagattcaatgagactctcctggagcgtcgcccaaggacccttcgatagcttcgtcgttcaatatgaggacacaaacgggcagcctcaagcattgctcgtcgacggagaccagtcaaaaatactgatcagtggcttggaaccctcaactccgtacagatttctcttgtatgggttgcacgaaggaaaacgactcggtcccctcagcgccgaaggaacaacagggctggcccccgcaggacagacctcagaagaatcacgacccagactgtctcaactttctgttactgacgtcacgactagcagtcttcgactgaattgggaggccccacctggcgcatttgatagtttcctacttcggtttggagtcccttcaccttctactctcgagccccatcccaggcccttgttacaacgcgaacttatggtgcccggaactcgccattccgccgtgctacgtgacctaagatctggcactctatattccctcacactttatggtctgcgcggaccacacaaggcagactctatccaaggcaccgctagaacactgagtcccgtgctcgaatctcccagggatttgcagttttctgagattcgcgaaacttcggctaaagtgaattggatgcccccgccctcccgtgcagattcattcaaagtcagttaccagctcgccgatggaggcgagcctcagtccgtgcaagttgatggacaagcacgtactcagaagctccaaggcttgatccccggtgcccggtatgaggtgactgtggtctcagttcgtggtttcgaggagtcagaacctctgactggatttctgacaacagtgcccgacgggccaactcaattgagagctttgaaccttaccgaaggattcgccgtcctccactggaagccgcctcagaatccggtggatacttacgatgtgcaagtgacagctcctggcgcaccccccctgcaggcagaaacacctggctcagctgtggattaccctctccatgatctcgttttacataccaattacacagctactgtgcgcggcctgagggggccaaatcttacatcacccgcttctattactttcacaacagggctggaagctccgagggatctcgaggccaaggaggtcaccccccgaaccgccttgctcacttggaccgagcctccagtgaggcctgccggctacctgctatcttttcatacacctggcggacaaaaccaagagattctgctacccggagggattacaagccaccagctgctcggacttttccctagtacgtcctacaacgcccggctccaggcaatgtggggtcagagcctactgccacccgtctcgaccagctttacgaccggaggactcagaattccttttcctcgagactgcggcgaggagatgcagaatggcgctggggcaagtagaacaagtacgattttcttgaatggaaatcgggaaagacccttaaacgtcttttgcgacatggaaaccgacggaggaggatggttagtgttccagcgacgaatggacggacaaactgacttctggcgggactgggaagattatgcacacgggttcggaaacatcagcggcgagttttggctgggaaatgaagccctccatagtctcacccaagccggcgattacagcatgcgtgtggatttaagggctggagacgaggccgtatttgctcagtacgattcctttcacgttgattcagctgccgaatactatcgacttcacctggaaggttatcacggcactgcaggcgatagtatgagctaccactccggctccgtgttctccgctcgagatcgggaccctaattctctgcttatcagttgtgctgtcagttatcgtggagcttggtggtatcggaattgtcactacgctaacctgaacggcctgtacgggtcaacagtggaccatcagggtgtgtcttggtatcattggaaaggctttgagttcagtgtccccttcacagaaatgaaactgaggcctagaaatttcaggagtccagctggcggaggttag

SEQ ID NO: 201465 - DNA, 13132 bp, Artificial Sequence
  derived and/or modified sequence
tcctccccttctcctcccctgctcgctgcagactccctcctcactgtcgctgccgagatccacagtcggttgtggctcagcccctgttgcaggggacaagtgagggagacttccctgtcctgccctgagacgccgccctcccggggttggggacagagcaggtgcagaggcactgcagctgctcggttgcccagcctcctgaatgatgccagcccagtatgctctaacctccagcctggttctcctggtgctgctgagcacagccagagcaggccccttctcttcacggtccaatgtgacactgccagccccccggccccctccccagccagggggccacacagtgggggctggagtgggaagcccctcttctcagctttacgagcacacagtggaaggaggggagaagcaggtggtattcacccaccgcattaacctgcccccttccactggctgtggctgtcccccaggcaccgagcccccagtccttgcttcagaggtacaggccctgagggtccgtctagagatcctggaggagttggtgaaggggctcaaggaacagtgcactgggggatgttgtcctgcctctgcccaagctggcacaggtcagacagatgtgcggaccctctgcagtctccatggtgtgtttgatctgagccgctgcacctgttcctgtgagccaggctggggtgggcccacctgctcagaccccacagatgctgagatccctccctcttccccaccctcagcctcggggtcctgcccagatgactgcaatgatcagggtcgctgtgtccgtggtcgttgcgtgtgctttcccggctacactggccccagctgtggctggccatcctgtcccggggactgccaaggccgtgggcgctgcgtgcagggcgtgtgtgtgtgccgggcaggcttctcaggccccgactgcagccagcgctcctgccctcgaggttgcagccagaggggacgctgtgagggtgggcgctgcgtgtgtgacccaggctacactggtgacgactgtggcatgaggagctgccctcgcggttgcagtcagagggggcgctgtgagaatgggcgctgcgtgtgtaaccccggctacactggcgaggactgtggggtgaggagctgccctcggggctgcagccagcggggacgctgcaaggacgggcgctgcgtgtgtgaccccggctacactggcgaggactgtggtacgcggagctgcccctgggactgtggcgagggcgggcgctgcgtggacggccgctgcgtgtgctggcccgggtacacaggcgaggactgcagcacgcggacatgtccgagggactgccggggccgcgggcgctgcgaggacggcgaatgcatttgcgacacgggctacagcggggacgactgcggcgtgcgcagctgccctggcgactgcaaccaaaggggccgctgcgaggacggccgctgcgtgtgctggccggggtacactggaaccgattgcggctcgcgcgcctgcccacgcgactgtagaggtcgcgggcgctgcgagaacggcgtgtgtgtttgcaatgcgggctacagcggcgaggactgcggtgtgcgcagctgtcctggggactgtcgtggccggggccgctgtgagagtggccgctgcatgtgttggccggggtacacaggccgggactgcggcacgcgcgcctgtcctggcgactgtcgcgggcgcgggcgctgcgtggatggccgctgcgtgtgcaacccgggcttcaccggtgaggactgtgggagccgtcgctgtcccggggactgccgtgggcacggcctttgcgaggatggcgtgtgcgtgtgtgacgcaggctactcaggggaagactgcagcacgcgcagctgccccgggggctgccgaggccgcggccagtgcctagatgggcggtgtgtgtgcgaggacggctactctggcgaggattgcggtgtgaggcagtgcccgaatgactgcagccagcacggcgtgtgccaggacggtgtgtgcatctgttgggaaggctacgtgagtgaggactgcagcatccgcacctgcccctccaactgccacgggaggggccgctgtgaggaagggcgctgcctgtgcgacccaggctacaccggccctacctgtgccacccgcatgtgcccggctgactgccggggacgtgggcggtgtgtgcaaggagtgtgcctgtgccacgtgggctatggcggtgaggactgcgggcaggaagagcctccagccagcgcctgccctggaggctgcgggccccgggaactgtgccgggcaggccagtgtgtgtgtgtagagggcttccgaggccctgactgtgccatccagacatgcccaggggactgccgtggccgaggagagtgtcacgatggcagctgtgtctgcaaagatgggtatgctggcgaagactgcggagaagaggtgccaaccattgagggcatgaggatgcatctcttggaggagacaacagttcggacagagtggaccccggctcctggccccgtggatgcctatgaaattcagttcatccccacgacagagggggcgagccccccattcacagcacgggttccaagctctgcctcagcctatgaccagagaggactggcccctggacaggagtaccaggtcactgtccgagcccttcgagggaccagctggggccttcctgcctccaagaccatcaccaccatgatcgatgggccccaggacctccgagtggtggctgtgacaccgacaacactggagcttggctggctgcgtccccaggctgaggtggaccgatttgtggtgtcctacgtcagtgccggcaaccagagggtgaggctggaagtgccccctgaagcagacgggacgctgctgactgacctgatgccaggcgtagaatatgtggtgactgtcacagcggagcggggccgggcagtcagctacccagcttctgtcagggccaacacagggtcctcacccttgggcctcttggggactaccgatgagcctcctccctcaggcccctcgacgacgcaaggggcccaggctcctctcctgcagcagcgcccccaggagctgggagagttgagggtgctgggcagagatgagacagggcgcctccgtgtggtctggaccgcccagcctgacacctttgcctacttccaactgcgcatgcgggtgcccgaggggccgggggcacatgaggaagtgctgccaggggacgtccgccaggctctggtgcctccaccccctcctggaaccccgtatgagctgtcacttcatggggtccctcctgggggcaagccctctgaccccatcatctaccaaggcattatggacaaggatgaggagaagcctgggaagtcctcaggcccaccacgcctgggtgagctgacggtgacagacaggacctccgactccttgctcctgcgctggacggtccccgagggcgagtttgactccttcgtgatccagtacaaagacagggacgggcagccccaggtggtgcccgtggaaggaccccagcgctcggccgtcatcacctccctggatcctggccgcaagtacaaatttgtcctgtatgggtttgttggcaagaagaggcatggtccgctggtggctgaagccaagatcttgcctcagagtgacccaagtccagggactccaccccacctgggaaacctgtgggtgacagaccctaccccagattcactgcacctctcctggactgtccctgagggccagtttgacaccttcatggtccagtacagggacagggatggacggccccaggtggtacctgtggaagggcccgagcgttcatttgttgtctcctcactggaccctgaccacaagtacagattcactctgtttggaattgcgaacaagaagcggtatggccccctcacggccgatggcaccactgctccagagaggaaagaggagcccccccgccctgagttcctggagcagcccctcctgggggaactgacagtgaccggcgtgaccccagactccttgcgtctctcatggacagtggcccagggccccttcgactcattcatggtccagtacaaggatgcacaggggcagccccaggcagtgcctgttgcgggggatgagaatgaggttactgtccccggcctggatcccgaccggaagtataagatgaacctctacgggcttcgtggcaggcagcgtgtggggcccgagtctgtggtggccaagactgctcctcaggaggatgtggacgagacccccagccccacagaactgggcacggaggccccggagtcccccgaggagccgctcctgggggagctgacagtgacaggatcctcccctgattcgctgagcctcttctggaccgtcccccagggcagcttcgactctttcaccgtgcagtacaaggacagggatgggcggccccgggcggtgcgtgttgggggcaaggagagtgaggtcaccgtgggaggcctagagcccgggcacaagtacaagatgcacctgtacggcctccacgaggggcagcgcgtgggcccggtgtccgccgtgggcgtgacagccccacaacaagaagagacccctccagccactgagtccccgctggagccacgcctaggagagctgacagtgacagatgtgacccccaactctgtgggcctctcctggacagtccccgagggccagtttgactccttcatagtccagtacaaggacaaggacgggcagccccaggtggtgccggtggcggcagaccagcgagaggtcacagtctacaacctggagcctgagagaaaatataagatgaacatgtatggactacatgatgggcaacgcatgggccccctgtctgtggtcatcgtgacggctcccctcccaccagccccagccacagaggcctccaagcctcccctggagccacgcctaggggagctgacagtgacggatataacccctgactctgtgggcctctcatggacagtccctgagggtgaattcgactcctttgtggttcagtacaaggacagggacgggcagccccaggtggtgcccgtggctgcagatcagcgggaggtcactatccctgacctggaaccctcccgcaagtacaagttcctgctctttgggatccaggatgggaaacgacgcagcccagtctctgtggaggcaaagacggttgcccgaggtgacgccagcccaggggccccaccccgccttggggagctgtgggtgacagaccccaccccagactcactgcgcctctcctggacggttcctgagggccagttcgactcttttgtggtccagttcaaggacaaagacgggccccaggtggtgcccgtggagggccatgagcgctctgtcactgtcacccctctggatgccggccgcaagtacagattcctcctctatggcctcctgggcaagaagcgccatggccctctcactgccgacggcaccacggaagcccggagtgctatggatgatactggaacaaagcgtcccccaaaaccccgtctgggggaggagctgcaggtgaccaccgtgacccagaactccgtgggcctctcctggacagtccctgagggccagtttgactcctttgtggtccagtacaaagacagggacgggcagccccaggtggtgcccgtggagggcagcctcagggaggtcagcgtgccgggcctggaccctgcccacaggtacaagctgctgctctacgggctgcaccacggcaagcgtgtgggccccatctcggccgtcgccattactgccggcagggaagaaacggaaactgagaccacggccccgacccctccagcgcctgagccccacctcggggagttgacagtggaggaggccacgtcacacaccctgcatctctcctggatggtgactgagggagaatttgactccttcgaaatccagtacacagatagagacgggcaactccaaatggtccgcataggaggtgaccggaatgacatcaccctctctggcctggaatccgaccacagatacctggtgaccctgtatggtttcagtgatgggaagcatgtaggtcctgtccatgtcgaggccctgacagtcccggaggaggagaagccttcagaacctcccaccgcaacccccgagccccccatcaagcctcgcctgggggagctgaccgtgacagatgccacccctgactccctcagcctgtcctggacagttcccgagggacagtttgaccacttcctggtccagtacaggaatggagatgggcagcccaaggcagtgagggtgccagggcacgaggaaggggtcaccatctcgggcctggagccagaccataaatacaagatgaacctgtacggcttccacggtggccagcgcatgggccctgtgtctgtcgtcggggtgacagctgcagaggaagagacccccagccccacagaacccagcatggaggccccggagcccgctgaggagccgctcctgggggagctaacagtgacaggatcctcccctgactcgctgagcctctcctggaccgtcccccagggccgcttcgactccttcaccgtgcagtacaaggacagggacgggcggccccaggtggtgcgtgttgggggcgaggagagtgaagtcaccgtggggggcctggagcctgggcgcaagtacaagatgcacctgtacggcctccacgaggggcggcgcgtgggcccagtgtctgctgtgggcgtcacggcccccgaagaggagtcccctgatgctcctcttgcaaagctgcgcctagggcagatgacagtgagagacatcacctccgactccctcagcctctcctggacagtccccgagggccagtttgaccatttcttggtccagtttaagaatggggacgggcagcccaaggcggtgcgggtgccgggacacgaggatggggtcaccatctcgggcctggagccagaccacaagtacaagatgaacctgtacggcttccacggtggccagcgcgtgggccccgtgtctgctgttggtttaactgccccaggaaaggatgaagaaatggccccagcctcgacagaacctcccacccctgaaccccccatcaagcctcgcctggaggagctgaccgtgacagatgcgacccctgactccctcagcctgtcctggacggttcccgagggacagtttgaccacttcctggtccagtacaagaatggggatgggcagcccaaggcaacacgggtgccaggacatgaggacagggtcaccatctccggcctggagccagacaacaagtacaagatgaacctgtacggcttccacggtggccagcgtgtgggccccgtgtctgccatcggggtgacagctgcagaggaagagacccccagccccacagaacccagcatggaggccccggagccccctgaggagccgctcctgggggagctaacagtgacaggatcctcccctgactcgctgagcctctcctggaccgtcccccagggccgcttcgactccttcaccgtgcagtacaaggacagggacgggcggccccaggtggtgcgtgttgggggcgaggagagcgaggtcaccgtggggggcctggagcctgggcgcaaatacaagatgcacctgtatggcctccacgaggggcggcgcgtgggcccggtgtccaccgtgggcgtgactgccccacaagaggatgtggacgagacccccagccctacagaaccaggcacagaggccccagggccccccgaggagcctctcctgggggagctgacagtgacaggatcctcccctgactcgctgagcctttcctggaccgtcccccagggccgctttgactccttcaccgtgcagtacaaggacagggacgggcggccccaggcggtgcgtgttgggggccaggagagcaaggtcactgtgaggggcctggagcctgggcgcaagtacaagatgcacctgtacggcctccacgaggggcggcgcctgggcccggtgtctgccgtgggcgtcacagaggatgaagccgagaccacccaagcagtgcctaccatgacccctgagccccccatcaagcctcgcctgggggagctgaccatgacagatgccacccctgactccctcagcctgtcctggacggttcccgagggccagtttgaccacttcctggtccagtacaggaatggggatgggcagcccaaggcggtgcgggtgccggggcacgaggacggggtcaccatctcaggcctggagccagaccataaatacaagatgaacctgtacggcttccacggtggccagcgcgtgggccccatctctgtcattggggtgacggctgcagaggaagagacccccagccccacggaactcagcactgaggccccggagccccctgaggagccgctcctgggggagctgacagtgacaggatcctcccctgactcgctgagcctctcctggaccatcccccagggccacttcgactccttcaccgtgcagtacaaggacagggacgggcggccccaggtgatgcgtgtcaggggcgaggagagcgaggtcaccgtggggggcctggagcccgggcgcaaatacaagatgcacctgtacggcctccacgaggggcggcgtgtgggcccggtgtccaccgtgggtgtgacagctccagaggatgaagcagagaccacccaagcagtgcccaccacaacccctgagccccccaacaagcctcgcctcggggagctgaccgtgacagatgccacccctgactccctcagcctgtcctggatggtccccgagggccagtttgaccacttcctggtccagtacaggaatggggatgggcagcccaaggtggtgcgggtgccggggcacgaggacggggtcaccatctcaggcctggagccagaccacaagtacaagatgaacctgtacggcttccacggtggccagcgcgtgggccccatctctgtcattggggtgacagctgcagaggaagaaactcccgcccccacagaacccagcacggaggccccggagccccctgaggagccgctcctgggggagctgacagtgacaggatcctcccctgactcgctgagcctctcctggaccatcccccagggccgcttcgactccttcactgtgcagtacaaggacagggacgggcggccccaggtggtgcgtgtcaggggcgaggagagcgaggtcaccgtggggggcctggagcccgggtgcaaatacaagatgcacctgtacggcctccacgaggggcagcgcgtgggcccagtgtccgctgtgggtgtgacagctccaaaggatgaagccgagaccacccaagcagtgcctaccatgacccctgagccccccatcaagcctcgcctgggggagctgaccgtgacagatgccacccccgactccctcagcctgtcctggatggttcccgagggccagtttgaccacttcctggtccagtacaggaatggggatgggcagcccaaggcggtgcgggtgccggggcacgaggacggggtcaccatctcaggcctggagccagaccataaatacaagatgaacctgtacggcttccacggtggccagcgcgtaggccctgtgtctgccattggggtgacggaggaagagacccccagccccacagaacccagcactgaggccccggaggcccctgaggagccgctcctgggggagttgacagtgacaggatcctcccctgactcgctgagcctctcctggaccgtcccccagggccgcttcgactccttcaccgtgcagtacaaggacagggacgggcagccccaggtggtgcgtgtcaggggcgaggagagcgaggtcaccgtggggggcctggagcccgggcgcaaatacaagatgcatctgtacggcctccacgaggggcagcgcgtgggcccagtgtccaccgtgggcatcacggcgcccctgcccacaccactgccggtggagccccgcctgggggagctggcggtggcggccgtgacctcggactcagtgggcctctcatggacggtggcccagggcccctttgactccttcctggtacagtacagggacgcgcaggggcagccccaggcagtgcctgtgagcggagacctccgagcggtcgccgtctcggggctggacccggcccgcaagtacaagttcctgctctttggactccagaatgggaaacgccacggcccagtccctgtggaggccaggaccgccccagacaccaaaccgtctccccgcctgggggagctgactgtgacagatgcgacccctgactccgtgggcctctcgtggacggtccctgagggcgaattcgactccttcgtggtccagtacaaggataaggatggtcggctccaggtggtgccggtggcagccaaccagcgggaggtcacagtccagggcctggagcccagtaggaaatacaggttcctgctctatggtctgtcaggcaggaaacgactgggccccatctctgctgacagcaccacagctcccctggagaaggagctacctccccacctgggggaactgaccgtggctgaggagacctccagctctctgcgcctgtcctggacggtagcccagggcccctttgactccttcgtggtccagtacagggacacggacgggcagcccagggcagtgcctgtggccgcagaccagcgcacagtcaccgtagaggacctggagcctggcaagaaatacaagtttctgctctacgggctccttgggggaaagcgcctgggcccggtctctgccctgggaatgacagccccagaagaggacacaccagccccagagttagccccagaggcccctgagcctcctgaagagccccgcctaggagtgctgaccgtgaccgacacaaccccagactccatgcgcctctcgtggagcgtggcccagggcccctttgattccttcgtggtccagtatgaggacacgaacgggcagccccaggccttgctcgtggacggcgaccagagcaagatcctcatctcaggcctggagcccagcaccccctacaggttcctcctctatggcctccatgaagggaagcgcctggggcccctctcagctgagggcaccacagggctggctcctgctggtcagacctcagaggagtcaaggccccgcctgtcccagctgtctgtgactgacgtgaccaccagttcactgaggctcaactgggaggccccaccgggggccttcgactccttcctgctccgctttggggttccatcaccaagcactctggagccgcatccgcgtccactgctgcagcgcgagctgatggtgccggggacgcggcactcggccgtgctccgggacctgcgttccgggactctgtacagcctgacactgtatgggctgcgaggaccccacaaggccgacagcatccagggaaccgcccgcaccctcagcccagttctggagagcccccgtgacctccaattcagtgaaatcagggagacctcagccaaggtcaactggatgcccccaccatcccgggcggacagcttcaaagtctcctaccagctggcggacggaggggagcctcagagtgtgcaggtggatggccaggcccggacccagaaactccaggggctgatcccaggcgctcgctatgaggtgaccgtggtctcggtccgaggctttgaggagagtgagcctctcacaggcttcctcaccacggttcctgacggtcccacacagttgcgtgcactgaacttgaccgagggattcgccgtgctgcactggaagcccccccagaatcctgtggacacctatgacgtccaggtcacagcccctggggccccgcctctgcaggcggagaccccaggcagcgcggtggactaccccctgcatgaccttgtcctccacaccaactacaccgccacagtgcgtggcctgcggggccccaacctcacttccccagccagcatcaccttcaccacagggctagaggcccctcgggacttggaggccaaggaagtgaccccccgcaccgccctgctcacttggactgagcccccagtccggcccgcaggctacctgctcagcttccacacccctggtggacagaaccaggagatcctgctcccaggagggatcacatctcaccagctccttggcctctttccctccacctcctacaatgcacggctccaggccatgtggggccagagcctcctgccgcccgtgtccacctctttcaccacgggtgggctgcggatccccttccccagggactgcggggaggagatgcagaacggagccggtgcctccaggaccagcaccatcttcctcaacggcaaccgcgagcggcccctgaacgtgttttgcgacatggagactgatgggggcggctggctggtgttccagcgccgcatggatggacagacagacttctggagggactgggaggactatgcccatggttttgggaacatctctggagagttctggctgggcaatgaggccctgcacagcctgacacaggcaggtgactactccatgcgcgtggacctgcgggctggggacgaggctgtgttcgcccagtacgactccttccacgtagactcggctgcggagtactaccgcctccacttggagggctaccacggcaccgcaggggactccatgagctaccacagcggcagtgtcttctctgcccgtgatcgggaccccaacagcttgctcatctcctgcgctgtctcctaccgaggggcctggtggtacaggaactgccactacgccaacctcaacgggctctacgggagcacagtggaccatcagggagtgagctggtaccactggaagggcttcgagttctcggtgcccttcacggaaatgaagctgagaccaagaaactttcgctccccagcggggggaggctgagctgctgcccacctctctcgcaccccagtatgactgccgagcactgaggggtcgccccgagagaagagccagggtccttcaccacccagccgctggaggaagccttctctgccagcgatctcgcagcactgtgtttacaggggggaggggaggggttcgtacgggagcaataaaggagaaactgaggtacccggc

SEQ ID NO: 201466 - DNA, 13125 bp, Artificial Sequence
  derived and/or modified sequence
tcctccccttctcctcccctgctcgctgcagactccctcctcactgtcgctgccgagatccacagtcggttgtggctcagcccctgttgcaggggacaagtgagggagacttccctgtcctgccctgagacgccgccctcccggggttggggacagagcaggtgcagaggcactgcagctgctcggttgcccagcctcctgaatgatgccagcccagtatgctctaacctccagcctggttctcctggtgctgctgagcacagccagagcaggccccttctcttcacggtccaatgtgacactgccagccccccggccccctccccagccagggggccacacagtgggggctggagtgggaagcccctcttctcagctttacgagcacacagtggaaggaggggagaagcaggtggtattcacccaccgcattaacctgcccccttccactggctgtggctgtcccccaggcaccgagcccccagtccttgcttcagaggtacaggccctgagggtccgtctagagatcctggaggagttggtgaaggggctcaaggaacagtgcactgggggatgttgtcctgcctctgcccaagctggcacaggtcagacagatgtgcggaccctctgcagtctccatggtgtgtttgatctgagccgctgcacctgttcctgtgagccaggctggggtgggcccacctgctcagaccccacagatgctgagatccctccctcttccccaccctcagcctcggggtcctgcccagatgactgcaatgatcagggtcgctgtgtccgtggtcgttgcgtgtgctttcccggctacactggccccagctgtggctggccatcctgtcccggggactgccaaggccgtgggcgctgcgtgcagggcgtgtgtgtgtgccgggcaggcttctcaggccccgactgcagccagcgctcctgccctcgaggttgcagccagaggggacgctgtgagggtgggcgctgcgtgtgtgacccaggctacactggtgacgactgtggcatgaggagctgccctcgcggttgcagtcagagggggcgctgtgagaatgggcgctgcgtgtgtaaccccggctacactggcgaggactgtggggtgaggagctgccctcggggctgcagccagcggggacgctgcaaggacgggcgctgcgtgtgtgaccccggctacactggcgaggactgtggtacgcggagctgcccctgggactgtggcgagggcgggcgctgcgtggacggccgctgcgtgtgctggcccgggtacacaggcgaggactgcagcacgcggacatgtccgagggactgccggggccgcgggcgctgcgaggacggcgaatgcatttgcgacacgggctacagcggggacgactgcggcgtgcgcagctgccctggcgactgcaaccaaaggggccgctgcgaggacggccgctgcgtgtgctggccggggtacactggaaccgattgcggctcgcgcgcctgcccacgcgactgtagaggtcgcgggcgctgcgagaacggcgtgtgtgtttgcaatgcgggctacagcggcgaggactgcggtgtgcgcagctgtcctggggactgtcgtggccggggccgctgtgagagtggccgctgcatgtgttggccggggtacacaggccgggactgcggcacgcgcgcctgtcctggcgactgtcgcgggcgcgggcgctgcgtggatggccgctgcgtgtgcaacccgggcttcaccggtgaggactgtgggagccgtcgctgtcccggggactgccgtgggcacggcctttgcgaggatggcgtgtgcgtgtgtgacgcaggctactcaggggaagactgcagcacgcgcagctgccccgggggctgccgaggccgcggccagtgcctagatgggcggtgtgtgtgcgaggacggctactctggcgaggattgcggtgtgaggcagtgcccgaatgactgcagccagcacggcgtgtgccaggacggtgtgtgcatctgttgggaaggctacgtgagtgaggactgcagcatccgcacctgcccctccaactgccacgggaggggccgctgtgaggaagggcgctgcctgtgcgacccaggctacaccggccctacctgtgccacccgcatgtgcccggctgactgccggggacgtgggcggtgtgtgcaaggagtgtgcctgtgccacgtgggctatggcggtgaggactgcgggcaggaagagcctccagccagcgcctgccctggaggctgcgggccccgggaactgtgccgggcaggccagtgtgtgtgtgtagagggcttccgaggccctgactgtgccatccagacatgcccaggggactgccgtggccgaggagagtgtcacgatggcagctgtgtctgcaaagatgggtatgctggcgaagactgcggagaagaggtgccaaccattgagggcatgaggatgcatctcttggaggagacaacagttcggacagagtggaccccggctcctggccccgtggatgcctatgaaattcagttcatccccacgacagagggggcgagccccccattcacagcacgggttccaagctctgcctcagcctatgaccagagaggactggcccctggacaggagtaccaggtcactgtccgagcccttcgagggaccagctggggccttcctgcctccaagaccatcaccaccatgatcgatgggccccaggacctccgagtggtggctgtgacaccgacaacactggagcttggctggctgcgtccccaggctgaggtggaccgatttgtggtgtcctacgtcagtgccggcaaccagagggtgaggctggaagtgccccctgaagcagacgggacgctgctgactgacctgatgccaggcgtagaatatgtggtgactgtcacagcggagcggggccgggcagtcagctacccagcttctgtcagggccaacacagggtcctcacccttgggcctcttggggactaccgatgagcctcctccctcaggcccctcgacgacgcaaggggcccaggctcctctcctgcagcagcgcccccaggagctgggagagttgagggtgctgggcagagatgagacagggcgcctccgtgtggtctggaccgcccagcctgacacctttgcctacttccaactgcgcatgcgggtgcccgaggggccgggggcacatgaggaagtgctgccaggggacgtccgccaggctctggtgcctccaccccctcctggaaccccgtatgagctgtcacttcatggggtccctcctgggggcaagccctctgaccccatcatctaccaaggcattatggacaaggatgaggagaagcctgggaagtcctcaggcccaccacgcctgggtgagctgacggtgacagacaggacctccgactccttgctcctgcgctggacggtccccgagggcgagtttgactccttcgtgatccagtacaaagacagggacgggcagccccaggtggtgcccgtggaaggaccccagcgctcggccgtcatcacctccctggatcctggccgcaagtacaaatttgtcctgtatgggtttgttggcaagaagaggcatggtccgctggtggctgaagccaagatcttgcctcagagtgacccaagtccagggactccaccccacctgggaaacctgtgggtgacagaccctaccccagattcactgcacctctcctggactgtccctgagggccagtttgacaccttcatggtccagtacagggacagggatggacggccccaggtggtacctgtggaagggcccgagcgttcatttgttgtctcctcactggaccctgaccacaagtacagattcactctgtttggaattgcgaacaagaagcggtatggccccctcacggccgatggcaccactgctccagagaggaaagaggagcccccccgccctgagttcctggagcagcccctcctgggggaactgacagtgaccggcgtgaccccagactccttgcgtctctcatggacagtggcccagggccccttcgactcattcatggtccagtacaaggatgcacaggggcagccccaggcagtgcctgttgcgggggatgagaatgaggttactgtccccggcctggatcccgaccggaagtataagatgaacctctacgggcttcgtggcaggcagcgtgtggggcccgagtctgtggtggccaagactgctcctcaggaggatgtggacgagacccccagccccacagaactgggcacggaggccccggagtcccccgaggagccgctcctgggggagctgacagtgacaggatcctcccctgattcgctgagcctcttctggaccgtcccccagggcagcttcgactctttcaccgtgcagtacaaggacagggatgggcggccccgggcggtgcgtgttgggggcaaggagagtgaggtcaccgtgggaggcctagagcccgggcacaagtacaagatgcacctgtacggcctccacgaggggcagcgcgtgggcccggtgtccgccgtgggcgtgacagccccacaacaagaagagacccctccagccactgagtccccgctggagccacgcctaggagagctgacagtgacagatgtgacccccaactctgtgggcctctcctggacagtccccgagggccagtttgactccttcatagtccagtacaaggacaaggacgggcagccccaggtggtgccggtggcggcagaccagcgagaggtcacagtctacaacctggagcctgagagaaaatataagatgaacatgtatggactacatgatgggcaacgcatgggccccctgtctgtggtcatcgtgacggctcccctcccaccagccccagccacagaggcctccaagcctcccctggagccacgcctaggggagctgacagtgacggatataacccctgactctgtgggcctctcatggacagtccctgagggtgaattcgactcctttgtggttcagtacaaggacagggacgggcagccccaggtggtgcccgtggctgcagatcagcgggaggtcactatccctgacctggaaccctcccgcaagtacaagttcctgctctttgggatccaggatgggaaacgacgcagcccagtctctgtggaggcaaagacggttgcccgaggtgacgccagcccaggggccccaccccgccttggggagctgtgggtgacagaccccaccccagactcactgcgcctctcctggacggttcctgagggccagttcgactcttttgtggtccagttcaaggacaaagacgggccccaggtggtgcccgtggagggccatgagcgctctgtcactgtcacccctctggatgccggccgcaagtacagattcctcctctatggcctcctgggcaagaagcgccatggccctctcactgccgacggcaccacggaagcccggagtgctatggatgatactggaacaaagcgtcccccaaaaccccgtctgggggaggagctgcaggtgaccaccgtgacccagaactccgtgggcctctcctggacagtccctgagggccagtttgactcctttgtggtccagtacaaagacagggacgggcagccccaggtggtgcccgtggagggcagcctcagggaggtcagcgtgccgggcctggaccctgcccacaggtacaagctgctgctctacgggctgcaccacggcaagcgtgtgggccccatctcggccgtcgccattactgccggcagggaagaaacggaaactgagaccacggccccgacccctccagcgcctgagccccacctcggggagttgacagtggaggaggccacgtcacacaccctgcatctctcctggatggtgactgagggagaatttgactccttcgaaatccagtacacagatagagacgggcaactccaaatggtccgcataggaggtgaccggaatgacatcaccctctctggcctggaatccgaccacagatacctggtgaccctgtatggtttcagtgatgggaagcatgtaggtcctgtccatgtcgaggccctgacagtcccggaggaggagaagccttcagaacctcccaccgcaacccccgagccccccatcaagcctcgcctgggggagctgaccgtgacagatgccacccctgactccctcagcctgtcctggacagttcccgagggacagtttgaccacttcctggtccagtacaggaatggagatgggcagcccaaggcagtgagggtgccagggcacgaggaaggggtcaccatctcgggcctggagccagaccataaatacaagatgaacctgtacggcttccacggtggccagcgcatgggccctgtgtctgtcgtcggggtgacagctgcagaggaagagacccccagccccacagaacccagcatggaggccccggagcccgctgaggagccgctcctgggggagctaacagtgacaggatcctcccctgactcgctgagcctctcctggaccgtcccccagggccgcttcgactccttcaccgtgcagtacaaggacagggacgggcggccccaggtggtgcgtgttgggggcgaggagagtgaagtcaccgtggggggcctggagcctgggcgcaagtacaagatgcacctgtacggcctccacgaggggcggcgcgtgggcccagtgtctgctgtgggcgtcacggcccccgaagaggagtcccctgatgctcctcttgcaaagctgcgcctagggcagatgacagtgagagacatcacctccgactccctcagcctctcctggacagtccccgagggccagtttgaccatttcttggtccagtttaagaatggggacgggcagcccaaggcggtgcgggtgccgggacacgaggatggggtcaccatctcgggcctggagccagaccacaagtacaagatgaacctgtacggcttccacggtggccagcgcgtgggccccgtgtctgctgttggtttaactgccccaggaaaggatgaagaaatggccccagcctcgacagaacctcccacccctgaaccccccatcaagcctcgcctggaggagctgaccgtgacagatgcgacccctgactccctcagcctgtcctggacggttcccgagggacagtttgaccacttcctggtccagtacaagaatggggatgggcagcccaaggcaacacgggtgccaggacatgaggacagggtcaccatctccggcctggagccagacaacaagtacaagatgaacctgtacggcttccacggtggccagcgtgtgggccccgtgtctgccatcggggtgacagctgcagaggaagagacccccagccccacagaacccagcatggaggccccggagccccctgaggagccgctcctgggggagctaacagtgacaggatcctcccctgactcgctgagcctctcctggaccgtcccccagggccgcttcgactccttcaccgtgcagtacaaggacagggacgggcggccccaggtggtgcgtgttgggggcgaggagagcgaggtcaccgtggggggcctggagcctgggcgcaaatacaagatgcacctgtatggcctccacgaggggcggcgcgtgggcccggtgtccaccgtgggcgtgactgccccacaagaggatgtggacgagacccccagccctacagaaccaggcacagaggccccagggccccccgaggagcctctcctgggggagctgacagtgacaggatcctcccctgactcgctgagcctttcctggaccgtcccccagggccgctttgactccttcaccgtgcagtacaaggacagggacgggcggccccaggcggtgcgtgttgggggccaggagagcaaggtcactgtgaggggcctggagcctgggcgcaagtacaagatgcacctgtacggcctccacgaggggcggcgcctgggcccggtgtctgccgtgggcgtcacagaggatgaagccgagaccacccaagcagtgcctaccatgacccctgagccccccatcaagcctcgcctgggggagctgaccatgacagatgccacccctgactccctcagcctgtcctggacggttcccgagggccagtttgaccacttcctggtccagtacaggaatggggatgggcagcccaaggcggtgcgggtgccggggcacgaggacggggtcaccatctcaggcctggagccagaccataaatacaagatgaacctgtacggcttccacggtggccagcgcgtgggccccatctctgtcattggggtgacggctgcagaggaagagacccccagccccacggaactcagcactgaggccccggagccccctgaggagccgctcctgggggagctgacagtgacaggatcctcccctgactcgctgagcctctcctggaccatcccccagggccacttcgactccttcaccgtgcagtacaaggacagggacgggcggccccaggtgatgcgtgtcaggggcgaggagagcgaggtcaccgtggggggcctggagcccgggcgcaaatacaagatgcacctgtacggcctccacgaggggcggcgtgtgggcccggtgtccaccgtgggtgtgacagaggatgaagcagagaccacccaagcagtgcccaccacaacccctgagccccccaacaagcctcgcctcggggagctgaccgtgacagatgccacccctgactccctcagcctgtcctggatggtccccgagggccagtttgaccacttcctggtccagtacaggaatggggatgggcagcccaaggtggtgcgggtgccggggcacgaggacggggtcaccatctcaggcctggagccagaccacaagtacaagatgaacctgtacggcttccacggtggccagcgcgtgggccccatctctgtcattggggtgacagctgcagaggaagaaactcccgcccccacagaacccagcacggaggccccggagccccctgaggagccgctcctgggggagctgacagtgacaggatcctcccctgactcgctgagcctctcctggaccatcccccagggccgcttcgactccttcactgtgcagtacaaggacagggacgggcggccccaggtggtgcgtgtcaggggcgaggagagcgaggtcaccgtggggggcctggagcccgggtgcaaatacaagatgcacctgtacggcctccacgaggggcagcgcgtgggcccagtgtccgctgtgggtgtgacagctccaaaggatgaagccgagaccacccaagcagtgcctaccatgacccctgagccccccatcaagcctcgcctgggggagctgaccgtgacagatgccacccccgactccctcagcctgtcctggatggttcccgagggccagtttgaccacttcctggtccagtacaggaatggggatgggcagcccaaggcggtgcgggtgccggggcacgaggacggggtcaccatctcaggcctggagccagaccataaatacaagatgaacctgtacggcttccacggtggccagcgcgtaggccctgtgtctgccattggggtgacggaggaagagacccccagccccacagaacccagcactgaggccccggaggcccctgaggagccgctcctgggggagttgacagtgacaggatcctcccctgactcgctgagcctctcctggaccgtcccccagggccgcttcgactccttcaccgtgcagtacaaggacagggacgggcagccccaggtggtgcgtgtcaggggcgaggagagcgaggtcaccgtggggggcctggagcccgggcgcaaatacaagatgcatctgtacggcctccacgaggggcagcgcgtgggcccagtgtccaccgtgggcatcacggcgcccctgcccacaccactgccggtggagccccgcctgggggagctggcggtggcggccgtgacctcggactcagtgggcctctcatggacggtggcccagggcccctttgactccttcctggtacagtacagggacgcgcaggggcagccccaggcagtgcctgtgagcggagacctccgagcggtcgccgtctcggggctggacccggcccgcaagtacaagttcctgctctttggactccagaatgggaaacgccacggcccagtccctgtggaggccaggaccgccccagacaccaaaccgtctccccgcctgggggagctgactgtgacagatgcgacccctgactccgtgggcctctcgtggacggtccctgagggcgaattcgactccttcgtggtccagtacaaggataaggatggtcggctccaggtggtgccggtggcagccaaccagcgggaggtcacagtccagggcctggagcccagtaggaaatacaggttcctgctctatggtctgtcaggcaggaaacgactgggccccatctctgctgacagcaccacagctcccctggagaaggagctacctccccacctgggggaactgaccgtggctgaggagacctccagctctctgcgcctgtcctggacggtagcccagggcccctttgactccttcgtggtccagtacagggacacggacgggcagcccagggcagtgcctgtggccgcagaccagcgcacagtcaccgtagaggacctggagcctggcaagaaatacaagtttctgctctacgggctccttgggggaaagcgcctgggcccggtctctgccctgggaatgacagccccagaagaggacacaccagccccagagttagccccagaggcccctgagcctcctgaagagccccgcctaggagtgctgaccgtgaccgacacaaccccagactccatgcgcctctcgtggagcgtggcccagggcccctttgattccttcgtggtccagtatgaggacacgaacgggcagccccaggccttgctcgtggacggcgaccagagcaagatcctcatctcaggcctggagcccagcaccccctacaggttcctcctctatggcctccatgaagggaagcgcctggggcccctctcagctgagggcaccacagggctggctcctgctggtcagacctcagaggagtcaaggccccgcctgtcccagctgtctgtgactgacgtgaccaccagttcactgaggctcaactgggaggccccaccgggggccttcgactccttcctgctccgctttggggttccatcaccaagcactctggagccgcatccgcgtccactgctgcagcgcgagctgatggtgccggggacgcggcactcggccgtgctccgggacctgcgttccgggactctgtacagcctgacactgtatgggctgcgaggaccccacaaggccgacagcatccagggaaccgcccgcaccctcagcccagttctggagagcccccgtgacctccaattcagtgaaatcagggagacctcagccaaggtcaactggatgcccccaccatcccgggcggacagcttcaaagtctcctaccagctggcggacggaggggagcctcagagtgtgcaggtggatggccaggcccggacccagaaactccaggggctgatcccaggcgctcgctatgaggtgaccgtggtctcggtccgaggctttgaggagagtgagcctctcacaggcttcctcaccacggttcctgacggtcccacacagttgcgtgcactgaacttgaccgagggattcgccgtgctgcactggaagcccccccagaatcctgtggacacctatgacgtccaggtcacagcccctggggccccgcctctgcaggcggagaccccaggcagcgcggtggactaccccctgcatgaccttgtcctccacaccaactacaccgccacagtgcgtggcctgcggggccccaacctcacttccccagccagcatcaccttcaccacagggctagaggcccctcgggacttggaggccaaggaagtgaccccccgcaccgccctgctcacttggactgagcccccagtccggcccgcaggctacctgctcagcttccacacccctggtggacagaaccaggagatcctgctcccaggagggatcacatctcaccagctccttggcctctttccctccacctcctacaatgcacggctccaggccatgtggggccagagcctcctgccgcccgtgtccacctctttcaccacgggtgggctgcggatccccttccccagggactgcggggaggagatgcagaacggagccggtgcctccaggaccagcaccatcttcctcaacggcaaccgcgagcggcccctgaacgtgttttgcgacatggagactgatgggggcggctggctggtgttccagcgccgcatggatggacagacagacttctggagggactgggaggactatgcccatggttttgggaacatctctggagagttctggctgggcaatgaggccctgcacagcctgacacaggcaggtgactactccatgcgcgtggacctgcgggctggggacgaggctgtgttcgcccagtacgactccttccacgtagactcggctgcggagtactaccgcctccacttggagggctaccacggcaccgcaggggactccatgagctaccacagcggcagtgtcttctctgcccgtgatcgggaccccaacagcttgctcatctcctgcgctgtctcctaccgaggggcctggtggtacaggaactgccactacgccaacctcaacgggctctacgggagcacagtggaccatcagggagtgagctggtaccactggaagggcttcgagttctcggtgcccttcacggaaatgaagctgagaccaagaaactttcgctccccagcggggggaggctgagctgctgcccacctctctcgcaccccagtatgactgccgagcactgaggggtcgccccgagagaagagccagggtccttcaccacccagccgctggaggaagccttctctgccagcgatctcgcagcactgtgtttacaggggggaggggaggggttcgtacgggagcaataaaggagaaactgaggtacccgg

SEQ ID NO: 201467 - DNA, 3125 bp, Artificial Sequence
  derived and/or modified sequence
ccttgtgcatttgggctgaagacaaagatgactgcaggagtgggcaggccggagtggggcgccctggcctgtccccaggaaggaggaggagtctgcagccctgtgggcttcaacatccatcaaggagtccagagcaggagccaggccaggcgggagggaaaggccctgggaggggctctctaatctcccagccccgactctgccccgtcactgccactgctcctcattactcgctggggctgctgtcgcctccccgaagggtggccttgtccagatagcggcaaacctccctgccgtggatgagtcaggagcattttcttaagaggaacatcactggaaaacaaaatgagcggggacacagaaaccaacagcagtggctgcatttgtggtacaggctcctcttccagagctcgctgatgcccacctcagacaggcctgaccacggcacggctggtgggatttgccagtcacctcaaccagccagttccaccctcagcttctctcagaagggagcaccacactcctcaagctcagtgaatgtatcccggcatgggtggggccagagcctgtgatatctcgaggtgggctcggcaggacaccggggtgtggaagggggaagcgagcacctgactcagacagcgcgggagctcgcaggagtcacgaggccacagcgacttcattgtctgactgggcctggacctataaacttcccacctcagccttgggccaagcctggaagataaaaatggagcaccccatggcgcccctcactcagattctcccctgggcttctcccacgcagccccagaagaggacacaccagccccagagttagccccagaggcccctgagcctcctgaagagccccgcctaggagtgctgaccgtgaccgacacaaccccagactccatgcgcctctcgtggagcgtggcccagggcccctttgattccttcgtggtccagtatgaggacacgaacgggcagccccaggccttgctcgtggacggcgaccagagcaagatcctcatctcaggcctggagcccagcaccccctacaggttcctcctctatggcctccatgaagggaagcgcctggggcccctctcagctgagggcaccacagggctggctcctgctggtcagacctcagaggagtcaaggccccgcctgtcccagctgtctgtgactgacgtgaccaccagttcactgaggctcaactgggaggccccaccgggggccttcgactccttcctgctccgctttggggttccatcaccaagcactctggagccgcatccgcgtccactgctgcagcgcgagctgatggtgccggggacgcggcactcggccgtgctccgggacctgcgttccgggactctgtacagcctgacactgtatgggctgcgaggaccccacaaggccgacagcatccagggaaccgcccgcaccctcagcccagttctggagagcccccgtgacctccaattcagtgaaatcagggagacctcagccaaggtcaactggatgcccccaccatcccgggcggacagcttcaaagtctcctaccagctggcggacggaggggagcctcagagtgtgcaggtggatggccaggcccggacccagaaactccaggggctgatcccaggcgctcgctatgaggtgaccgtggtctcggtccgaggctttgaggagagtgagcctctcacaggcttcctcaccacggttcctgacggtcccacacagttgcgtgcactgaacttgaccgagggattcgccgtgctgcactggaagcccccccagaatcctgtggacacctatgacgtccaggtcacagcccctggggccccgcctctgcaggcggagaccccaggcagcgcggtggactaccccctgcatgaccttgtcctccacaccaactacaccgccacagtgcgtggcctgcggggccccaacctcacttccccagccagcatcaccttcaccacagggctagaggcccctcgggacttggaggccaaggaagtgaccccccgcaccgccctgctcacttggactgagcccccagtccggcccgcaggctacctgctcagcttccacacccctggtggacagaaccaggagatcctgctcccaggagggatcacatctcaccagctccttggcctctttccctccacctcctacaatgcacggctccaggccatgtggggccagagcctcctgccgcccgtgtccacctctttcaccacgggtgggctgcggatccccttccccagggactgcggggaggagatgcagaacggagccggtgcctccaggaccagcaccatcttcctcaacggcaaccgcgagcggcccctgaacgtgttttgcgacatggagactgatgggggcggctggctggtgttccagcgccgcatggatggacagacagacttctggagggactgggaggactatgcccatggttttgggaacatctctggagagttctggctgggcaatgaggccctgcacagcctgacacaggcaggtgactactccatgcgcgtggacctgcgggctggggacgaggctgtgttcgcccagtacgactccttccacgtagactcggctgcggagtactaccgcctccacttggagggctaccacggcaccgcaggggactccatgagctaccacagcggcagtgtcttctctgcccgtgatcgggaccccaacagcttgctcatctcctgcgctgtctcctaccgaggggcctggtggtacaggaactgccactacgccaacctcaacgggctctacgggagcacagtggaccatcagggagtgagctggtaccactggaagggcttcgagttctcggtgcccttcacggaaatgaagctgagaccaagaaactttcgctccccagcggggggaggctgagctgctgcccacctctctcgcaccccagtatgactgccgagcactgaggggtcgccccgagagaagagccagggtccttcaccacccagccgctggaggaagccttctctgccagcgatctcgcagcactgtgtttacaggggggaggggaggggttcgtacgggagcaataaaggagaaactgaggtacccgg

SEQ ID NO: 201468 - DNA, 627 bp, Artificial Sequence
  derived and/or modified sequence
atgggcggcggccggggcctgctgggccgggagaccctgggccctggggaccgctgcagcggcaagggccccctgtgctactggcccccacctggcagccccccagcccccagcctgcgggccagcctgcccctggagcccccacgctgccccctgcggagctgccccctgcccaggtctgcctgcctgtgcagcaggaacagcgcccctggcagctgctgccggccctgggccagcctgtggagcggcctgcccccacccagccgggccagcagcgccccacccatgcacatctggaccctgagctgtgcccctgtggcccaggccgagctgctgctgcacacagaccggcccctgccccccctgcccacccccctgctgctgacccggctgcctgatgactacatcatgctgcccacagacctgcgctgccactgccaccgccaccccagccacagcacagaccggctgctgctgctggtgatctgcacccacctgggcggcatctgggccggccacagcccctggaccatgatccagacagctggctgccccagccgggacctgctgcccagcgcccggcccatcagcagccccatccctgagaccttctgtgccccagcctag

SEQ ID NO: 201469 - DNA, 12669 bp, Artificial Sequence
  derived and/or modified sequence
atgatgcccgcccagtacgccctgaccagcagcctggtgctgctggtgctgctgagcaccgccagagccggccccttcagcagcagaagcaacgtgaccctgcccgcccccagaccccccccccagcccggcggccacaccgtgggcgccggcgtgggcagccccagcagccagctgtacgagcacaccgtggagggcggcgagaagcaggtggtgttcacccacagaatcaacctgccccccagcaccggctgcggctgcccccccggcaccgagccccccgtgctggccagcgaggtgcaggccctgagagtgagactggagatcctggaggagctggtgaagggcctgaaggagcagtgcaccggcggctgctgccccgccagcgcccaggccggcaccggccagaccgacgtgagaaccctgtgcagcctgcacggcgtgttcgacctgagcagatgcacctgcagctgcgagcccggctggggcggccccacctgcagcgaccccaccgacgccgagatcccccccagcagcccccccagcgccagcggcagctgccccgacgactgcaacgaccagggcagatgcgtgagaggcagatgcgtgtgcttccccggctacaccggccccagctgcggctggcccagctgccccggcgactgccagggcagaggcagatgcgtgcagggcgtgtgcgtgtgcagagccggcttcagcggccccgactgcagccagagaagctgccccagaggctgcagccagagaggcagatgcgagggcggcagatgcgtgtgcgaccccggctacaccggcgacgactgcggcatgagaagctgccccagaggctgcagccagagaggcagatgcgagaacggcagatgcgtgtgcaaccccggctacgccggcgaggactgcggcgtgagaagctgccccagaggctgcagccagagaggcagatgcaaggacggcagatgcgtgtgcgaccccggctacaccggcgaggactgcggcaccagaagctgcccctgggactgcggcgagggcggcagatgcgtggacggcagatgcgtgtgctggcccggctacaccggcgaggactgcagcaccagaacctgccccagagactgcagaggcagaggcagatgcgaggacggcgagtgcatctgcgacaccggctacagcggcgacgactgcggcgtgagaagctgccccggcgactgcaaccagagaggcagatgcgaggacggcagatgcgtgtgctggcccggctacaccggcaccgactgcggcagcagagcctgccccagagactgcagaggcagaggcagatgcgagaacggcgtgtgcgtgtgcaacgccggctacagcggcgaggactgcggcgtgagaagctgccccggcgactgcagaggcagaggcagatgcgagagcggcagatgcatgtgctggcccggctacaccggcagagactgcggcaccagagcctgccccggcgactgcagaggcagaggcagatgcgtggacggcagatgcgtgtgcaaccccggcttcaccggcgaggactgcggcagcagaagatgccccggcgactgcagaggccacggcctgtgcgaggacggcgtgtgcgtgtgcgacgccggctacagcggcgaggactgcagcaccagaagctgccccggcggctgcagaggcagaggccagtgcctggacggcagatgcgtgtgcgaggacggctacagcggcgaggactgcggcgtgagacagtgccccaacgactgcagccagcacggcgtgtgccaggacggcgtgtgcatctgctgggagggctacgtgagcgaggactgcagcatcagaacctgccccagcaactgccacggcagaggcagatgcgaggagggcagatgcctgtgcgaccccggctacaccggccccacctgcgccaccagaatgtgccccgccgactgcagaggcagaggcagatgcgtgcagggcgtgtgcctgtgccacgtgggctacggcggcgaggactgcggccaggaggagccccccgccagcgcctgccccggcggctgcggccccagagagctgtgcagagccggccagtgcgtgtgcgtggagggcttcagaggccccgactgcgccatccagacctgccccggcgactgcagaggcagaggcgagtgccacgacggcagctgcgtgtgcaaggacggctacgccggcgaggactgcggcgaggaggtgcccaccatcgagggcatgagaatgcacctgctggaggagaccaccgtgagaaccgagtggacccccgcccccggccccgtggacgcctacgagatccagttcatccccaccaccgagggcgccagcccccccttcaccgccagagtgcccagcagcgccagcgcctacgaccagagaggcctggcccccggccaggagtaccaggtgaccgtgagagccctgagaggcaccagctggggcctgcccgccagcaagaccatcaccaccatgatcgacggcccccaggacctgagagtggtggccgtgacccccaccaccctggagctgggctggctgagaccccaggccgaggtggacagattcgtggtgagctacgtgagcgccggcaaccagagagtgagactggaggtgccccccgaggccgacggcaccctgctgaccgacctgatgcccggcgtggagtacgtggtgaccgtgaccgccgagagaggcagagccgtgagctaccccgccagcgtgagagccaacaccggcagcagccccctgggcctgctgggcaccaccgacgagcccccccccagcggccccagcaccacccagggcgcccaggcccccctgctgcagcagagaccccaggagctgggcgagctgagagtgctgggcagagacgagaccggcagactgagagtggtgtggaccgcccagcccgacaccttcgcctacttccagctgagaatgagagtgcccgagggccccggcgcccacgaggaggtgctgcccggcgacgtgagacaggccctggtgcccccccccccccccggcaccccctacgagctgagcctgcacggcgtgccccccggcggcaagcccagcgaccccatcatctaccagggcatcatggacaaggacgaggagaagcccggcaagagcagcggcccccccagactgggcgagctgaccgtgaccgacagaaccagcgacagcctgctgctgagatggaccgtgcccgagggcgagttcgacagcttcgtgatccagtacaaggacagagacggccagccccaggtggtgcccgtggagggcccccagagaagcgccgtgatcaccagcctggaccccggcagaaagtacaagttcgtgctgtacggcttcgtgggcaagaagagacacggccccctggtggccgaggccaagatcctgccccagagcgaccccagccccggcacccccccccacctgggcaacctgtgggtgaccgaccccacccccgacagcctgcacctgagctggaccgtgcccgagggccagttcgacaccttcatggtgcagtacagagacagagacggcagaccccaggtggtgcccgtggagggccccgagagaagcttcgtggtgagcagcctggaccccgaccacaagtacagattcaccctgttcggcatcgccaacaagaagagatacggccccctgaccgccgacggcaccaccgcccccgagagaaaggaggagccccccagacccgagttcctggagcagcccctgctgggcgagctgaccgtgaccggcgtgacccccgacagcctgagactgagctggaccgtggcccagggccccttcgacagcttcatggtgcagtacaaggacgcccagggccagccccaggccgtgcccgtggccggcgacgagaacgaggtgaccgtgcccggcctggaccccgacagaaagtacaagatgaacctgtacggcctgagaggcagacagagagtgggccccgagagcgtggtggccaagaccgccccccaggaggacgtggacgagacccccagccccaccgagctgggcaccgaggcccccgagagccccgaggagcccctgctgggcgagctgaccgtgaccggcagcagccccgacagcctgagcctgttctggaccgtgccccagggcagcttcgacagcttcaccgtgcagtacaaggacagagacggcagacccagagccgtgagagtgggcggcaaggagagcgaggtgaccgtgggcggcctggagcccggccacaagtacaagatgcacctgtacggcctgcacgagggccagagagtgggccccgtgagcgccgtgggcgtgaccgccccccagcaggaggagaccccccccgccaccgagagccccctggagcccagactgggcgagctgaccgtgaccgacgtgacccccaacagcgtgggcctgagctggaccgtgcccgagggccagttcgacagcttcatcgtgcagtacaaggacaaggacggccagccccaggtggtgcccgtggccgccgaccagagagaggtgaccgtgtacaacctggagcccgagagaaagtacaagatgaacatgtacggcctgcacgacggccagagaatgggccccctgagcgtggtgatcgtgaccgcccccctgccccccgcccccgccaccgaggccagcaagccccccctggagcccagactgggcgagctgaccgtgaccgacatcacccccgacagcgtgggcctgagctggaccgtgcccgagggcgagttcgacagcttcgtggtgcagtacaaggacagagacggccagccccaggtggtgcccgtggccgccgaccagagagaggtgaccatccccgacctggagcccagcagaaagtacaagttcctgctgttcggcatccaggacggcaagagaagaagccccgtgagcgtggaggccaagaccgtggccagaggcgacgccagccccggcgccccccccagactgggcgagctgtgggtgaccgaccccacccccgacagcctgagactgagctggaccgtgcccgagggccagttcgacagcttcgtggtgcagttcaaggacaaggacggcccccaggtggtgcccgtggagggccacgagagaagcgtgaccgtgacccccctggacgccggcagaaagtacagattcctgctgtacggcctgctgggcaagaagagacacggccccctgaccgccgacggcaccaccgaggccagaagcgccatggacgacaccggcaccaagagaccccccaagcccagactgggcgaggagctgcaggtgaccaccgtgacccagaacagcgtgggcctgagctggaccgtgcccgagggccagttcgacagcttcgtggtgcagtacaaggacagagacggccagccccaggtggtgcccgtggagggcagcctgagagaggtgagcgtgcccggcctggaccccgcccacagatacaagctgctgctgtacggcctgcaccacggcaagagagtgggccccatcagcgccgtggccatcaccgccggcagagaggagaccgagaccgagaccaccgcccccaccccccccgcccccgagccccacctgggcgagctgaccgtggaggaggccaccagccacaccctgcacctgagctggatggtgaccgagggcgagttcgacagcttcgagatccagtacaccgacagagacggccagctgcagatggtgagaatcggcggcgacagaaacgacatcaccctgagcggcctggagagcgaccacagatacctggtgaccctgtacggcttcagcgacggcaagcacgtgggccccgtgcacgtggaggccctgaccgtgcccgaggaggagaagcccagcgagccccccaccgccacccccgagccccccatcaagcccagactgggcgagctgaccgtgaccgacgccacccccgacagcctgagcctgagctggaccgtgcccgagggccagttcgaccacttcctggtgcagtacagaaacggcgacggccagcccaaggccgtgagagtgcccggccacgaggagggcgtgaccatcagcggcctggagcccgaccacaagtacaagatgaacctgtacggcttccacggcggccagagaatgggccccgtgagcgtggtgggcgtgaccgccgccgaggaggagacccccagccccaccgagcccagcatggaggcccccgagcccgccgaggagcccctgctgggcgagctgaccgtgaccggcagcagccccgacagcctgagcctgagctggaccgtgccccagggcagattcgacagcttcaccgtgcagtacaaggacagagacggcagaccccaggtggtgagagtgggcggcgaggagagcgaggtgaccgtgggcggcctggagcccggcagaaagtacaagatgcacctgtacggcctgcacgagggcagaagagtgggccccgtgagcgccgtgggcgtgaccgcccccgaggaggagagccccgacgcccccctggccaagctgagactgggccagatgaccgtgagagacatcaccagcgacagcctgagcctgagctggaccgtgcccgagggccagttcgaccacttcctggtgcagttcaagaacggcgacggccagcccaaggccgtgagagtgcccggccacgaggacggcgtgaccatcagcggcctggagcccgaccacaagtacaagatgaacctgtacggcttccacggcggccagagagtgggccccgtgagcgccgtgggcctgaccgcccccggcaaggacgaggagatggcccccgccagcaccgagccccccacccccgagccccccatcaagcccagactggaggagctgaccgtgaccgacgccacccccgacagcctgagcctgagctggaccgtgcccgagggccagttcgaccacttcctggtgcagtacaagaacggcgacggccagcccaaggccaccagagtgcccggccacgaggacagagtgaccatcagcggcctggagcccgacaacaagtacaagatgaacctgtacggcttccacggcggccagagagtgggccccgtgagcgccatcggcgtgaccgccgccgaggaggagacccccagccccaccgagcccagcatggaggcccccgagccccccgaggagcccctgctgggcgagctgaccgtgaccggcagcagccccgacagcctgagcctgagctggaccgtgccccagggcagattcgacagcttcaccgtgcagtacaaggacagagacggcagaccccaggtggtgagagtgggcggcgaggagagcgaggtgaccgtgggcggcctggagcccggcagaaagtacaagatgcacctgtacggcctgcacgagggcagaagagtgggccccgtgagcaccgtgggcgtgaccgccccccaggaggacgtggacgagacccccagccccaccgagcccggcaccgaggcccccgagccccccgaggagcccctgctgggcgagctgaccgtgaccggcagcagccccgacagcctgagcctgagctggaccgtgccccagggcagattcgacagcttcaccgtgcagtacaaggacagagacggcagaccccaggccgtgagagtgggcggccaggagagcaaggtgaccgtgagaggcctggagcccggcagaaagtacaagatgcacctgtacggcctgcacgagggcagaagactgggccccgtgagcgccgtgggcgtgaccgaggacgaggccgagaccacccaggccgtgcccaccatgacccccgagccccccatcaagcccagactgggcgagctgaccatgaccgacgccacccccgacagcctgagcctgagctggaccgtgcccgagggccagttcgaccacttcctggtgcagtacagaaacggcgacggccagcccaaggccgtgagagtgcccggccacgaggacggcgtgaccatcagcggcctggagcccgaccacaagtacaagatgaacctgtacggcttccacggcggccagagagtgggccccatcagcgtgatcggcgtgaccgccgccgaggaggagacccccagccccaccgagctgagcaccgaggcccccgagccccccgaggagcccctgctgggcgagctgaccgtgaccggcagcagccccgacagcctgagcctgagctggaccatcccccagggccacttcgacagcttcaccgtgcagtacaaggacagagacggcagaccccaggtgatgagagtgagaggcgaggagagcgaggtgaccgtgggcggcctggagcccggcagaaagtacaagatgcacctgtacggcctgcacgagggcagaagagtgggccccgtgagcaccgtgggcgtgaccgtgcccaccaccacccccgagccccccaacaagcccagactgggcgagctgaccgtgaccgacgccacccccgacagcctgagcctgagctggatggtgcccgagggccagttcgaccacttcctggtgcagtacagaaacggcgacggccagcccaaggtggtgagagtgcccggccacgaggacggcgtgaccatcagcggcctggagcccgaccacaagtacaagatgaacctgtacggcttccacggcggccagagagtgggccccatcagcgtgatcggcgtgaccgccgccgaggaggagacccccgcccccaccgagcccagcaccgaggcccccgagccccccgaggagcccctgctgggcgagctgaccgtgaccggcagcagccccgacagcctgagcctgagctggaccatcccccagggcagattcgacagcttcaccgtgcagtacaaggacagagacggcagaccccaggtggtgagagtgagaggcgaggagagcgaggtgaccgtgggcggcctggagcccggctgcaagtacaagatgcacctgtacggcctgcacgagggccagagagtgggccccgtgagcgccgtgggcgtgaccgtgcccaccatgacccccgagccccccatcaagcccagactgggcgagctgaccgtgaccgacgccacccccgacagcctgagcctgagctggatggtgcccgagggccagttcgaccacttcctggtgcagtacagaaacggcgacggccagcccaaggccgtgagagtgcccggccacgaggacggcgtgaccatcagcggcctggagcccgaccacaagtacaagatgaacctgtacggcttccacggcggccagagagtgggccccgtgagcgccatcggcgtgaccgaggaggagacccccagccccaccgagcccagcaccgaggcccccgaggcccccgaggagcccctgctgggcgagctgaccgtgaccggcagcagccccgacagcctgagcctgagctggaccgtgccccagggcagattcgacagcttcaccgtgcagtacaaggacagagacggccagccccaggtggtgagagtgagaggcgaggagagcgaggtgaccgtgggcggcctggagcccggcagaaagtacaagatgcacctgtacggcctgcacgagggccagagagtgggccccgtgagcaccgtgggcatcaccgcccccctgcccacccccctgcccgtggagcccagactgggcgagctggccgtggccgccgtgaccagcgacagcgtgggcctgagctggaccgtggcccagggccccttcgacagcttcctggtgcagtacagagacgcccagggccagccccaggccgtgcccgtgagcggcgacctgagagccgtggccgtgagcggcctggaccccgccagaaagtacaagttcctgctgttcggcctgcagaacggcaagagacacggccccgtgcccgtggaggccagaaccgcccccgacaccaagcccagccccagactgggcgagctgaccgtgaccgacgccacccccgacagcgtgggcctgagctggaccgtgcccgagggcgagttcgacagcttcgtggtgcagtacaaggacaaggacggcagactgcaggtggtgcccgtggccgccaaccagagagaggtgaccgtgcagggcctggagcccagcagaaagtacagattcctgctgtacggcctgagcggcagaaagagactgggccccatcagcgccgacagcaccaccgcccccctggagaaggagctgcccccccacctgggcgagctgaccgtggccgaggagaccagcagcagcctgagactgagctggaccgtggcccagggccccttcgacagcttcgtggtgcagtacagagacaccgacggccagcccagagccgtgcccgtggccgccgaccagagaaccgtgaccgtggaggacctggagcccggcaagaagtacaagttcctgctgtacggcctgctgggcggcaagagactgggccccgtgagcgccctgggcatgaccgcccccgaggaggacacccccgcccccgagctggcccccgaggcccccgagccccccgaggagcccagactgggcgtgctgaccgtgaccgacaccacccccgacagcatgagactgagctggagcgtggcccagggccccttcgacagcttcgtggtgcagtacgaggacaccaacggccagccccaggccctgctggtggacggcgaccagagcaagatcctgatcagcggcctggagcccagcaccccctacagattcctgctgtacggcctgcacgagggcaagagactgggccccctgagcgccgagggcaccaccggcctggcccccgccggccagaccagcgaggagagcagacccagactgagccagctgagcgtgaccgacgtgaccaccagcagcctgagactgaactgggaggccccccccggcgccttcgacagcttcctgctgagattcggcgtgcccagccccagcaccctggagccccaccccagacccctgctgcagagagagctgatggtgcccggcaccagacacagcgccgtgctgagagacctgagaagcggcaccctgtacagcctgaccctgtacggcctgagaggcccccacaaggccgacagcatccagggcaccgccagaaccctgagccccgtgctggagagccccagagacctgcagttcagcgagatcagagagaccagcgccaaggtgaactggatgcccccccccagcagagccgacagcttcaaggtgagctaccagctggccgacggcggcgagccccagagcgtgcaggtggacggccaggccagaacccagaagctgcagggcctgatccccggcgccagatacgaggtgaccgtggtgagcgtgagaggcttcgaggagagcgagcccctgaccggcttcctgaccaccgtgcccgacggccccacccagctgagagccctgaacctgaccgagggcttcgccgtgctgcactggaagcccccccagaaccccgtggacacctacgacgtgcaggtgaccgcccccggcgccccccccctgcaggccgagacccccggcagcgccgtggactaccccctgcacgacctggtgctgcacaccaactacaccgccaccgtgagaggcctgagaggccccaacctgaccagccccgccagcatcaccttcaccaccggcctggaggcccccagagacctggaggccaaggaggtgacccccagaaccgccctgctgacctggaccgagccccccgtgagacccgccggctacctgctgagcttccacacccccggcggccagaaccaggagatcctgctgcccggcggcatcaccagccaccagctgctgggcctgttccccagcaccagctacaacgccagactgcaggccatgtggggccagagcctgctgccccccgtgagcaccagcttcaccaccggcggcctgagaatccccttccccagagactgcggcgaggagatgcagaacggcgccggcgccagcagaaccagcaccatcttcctgaacggcaacagagagagacccctgaacgtgttctgcgacatggagaccgacggcggcggctggctggtgttccagagaagaatggacggccagaccgacttctggagagactgggaggactacgcccacggcttcggcaacatcagcggcgagttctggctgggcaacgaggccctgcacagcctgacccaggccggcgactacagcatgagagtggacctgagagccggcgacgaggccgtgttcgcccagtacgacagcttccacgtggacagcgccgccgagtactacagactgcacctggagggctaccacggcaccgccggcgacagcatgagctaccacagcggcagcgtgttcagcgccagagacagagaccccaacagcctgctgatcagctgcgccgtgagctacagaggcgcctggtggtacagaaactgccactacgccaacctgaacggcctgtacggcagcaccgtggaccaccagggcgtgagctggtaccactggaagggcttcgagttcagcgtgcccttcaccgagatgaagctgagacccagaaacttcagaagccccgccggcggcggctag

SEQ ID NO: 201470 - DNA, 6450 bp, Artificial Sequence
  derived and/or modified sequence
tgagccgaggaggagacccccagccccaccgagcccagcatggaggcccccgagcccgccgaggagcccctgctgggcgagctgaccgtgaccggcagcagccccgacagcctgagcctgagctggaccgtgccccagggcagattcgacagcttcaccgtgcagtacaaggacagagacggcagaccccaggtggtgagagtgggcggcgaggagagcgaggtgaccgtgggcggcctggagcccggcagaaagtacaagatgcacctgtacggcctgcacgagggcagaagagtgggccccgtgagcgccgtgggcgtgaccgcccccgaggaggagagccccgacgcccccctggccaagctgagactgggccagatgaccgtgagagacatcaccagcgacagcctgagcctgagctggaccgtgcccgagggccagttcgaccacttcctggtgcagttcaagaacggcgacggccagcccaaggccgtgagagtgcccggccacgaggacggcgtgaccatcagcggcctggagcccgaccacaagtacaagatgaacctgtacggcttccacggcggccagagagtgggccccgtgagcgccgtgggcctgaccgcccccggcaaggacgaggagatggcccccgccagcaccgagccccccacccccgagccccccatcaagcccagactggaggagctgaccgtgaccgacgccacccccgacagcctgagcctgagctggaccgtgcccgagggccagttcgaccacttcctggtgcagtacaagaacggcgacggccagcccaaggccaccagagtgcccggccacgaggacagagtgaccatcagcggcctggagcccgacaacaagtacaagatgaacctgtacggcttccacggcggccagagagtgggccccgtgagcgccatcggcgtgaccgccgccgaggaggagacccccagccccaccgagcccagcatggaggcccccgagccccccgaggagcccctgctgggcgagctgaccgtgaccggcagcagccccgacagcctgagcctgagctggaccgtgccccagggcagattcgacagcttcaccgtgcagtacaaggacagagacggcagaccccaggtggtgagagtgggcggcgaggagagcgaggtgaccgtgggcggcctggagcccggcagaaagtacaagatgcacctgtacggcctgcacgagggcagaagagtgggccccgtgagcaccgtgggcgtgaccgccccccaggaggacgtggacgagacccccagccccaccgagcccggcaccgaggcccccgagccccccgaggagcccctgctgggcgagctgaccgtgaccggcagcagccccgacagcctgagcctgagctggaccgtgccccagggcagattcgacagcttcaccgtgcagtacaaggacagagacggcagaccccaggccgtgagagtgggcggccaggagagcaaggtgaccgtgagaggcctggagcccggcagaaagtacaagatgcacctgtacggcctgcacgagggcagaagactgggccccgtgagcgccgtgggcgtgaccgaggacgaggccgagaccacccaggccgtgcccaccatgacccccgagccccccatcaagcccagactgggcgagctgaccatgaccgacgccacccccgacagcctgagcctgagctggaccgtgcccgagggccagttcgaccacttcctggtgcagtacagaaacggcgacggccagcccaaggccgtgagagtgcccggccacgaggacggcgtgaccatcagcggcctggagcccgaccacaagtacaagatgaacctgtacggcttccacggcggccagagagtgggccccatcagcgtgaccggcgtgaccgccgccgaggaggagacccccagccccaccgagctgagcaccgaggcccccgagccccccgaggagcccctgctgggcgagctgaccgtgaccggcagcagccccgacagcctgagcctgagctggaccatcccccagggccacttcgacagcttcaccgtgcagtacaaggacagagacggcagaccccaggtgatgagagtgagaggcgaggagagcgaggtgaccgtgggcggcctggagcccggcagaaagtacaagatgcacctgtacggcctgcacgagggcagaagagtgggccccgtgagcaccgtgggcgtgaccgtgcccaccaccacccccgagccccccaacaagcccagactgggcgagctgaccgtgaccgacgccacccccgacagcctgagcctgagctggatggtgcccgagggccagttcgaccacttcctggtgcagtacagaaacggcgacggccagcccaaggtggtgagagtgcccggccacgaggacggcgtgaccatcagcggcctggagcccgaccacaagtacaagatgaacctgtacggcttccacggcggccagagagtgggccccatcagcgtgatcggcgtgaccgccgccgaggaggagacccccgcccccaccgagcccagcaccgaggcccccgagccccccgaggagcccctgctgggcgagctgaccgtgaccggcagcagccccgacagcctgagcctgagctggaccatcccccagggcagattcgacagcttcaccgtgcagtacaaggacagagacggcagaccccaggtggtgagagtgagaggcgaggagagcgaggtgaccgtgggcggcctggagcccggctgcaagtacaagatgcacctgtacggcctgcacgagggccagagagtgggccccgtgagcgccgtgggcgtgaccgtgcccaccatgacccccgagccccccatcaagcccagactgggcgagctgaccgtgaccgacgccacccccgacagcctgagcctgagctggatggtgcccgagggccagttcgaccacttcctggtgcagtacagaaacggcgacggccagcccaaggccgtgagagtgcccggccacgaggacggcgtgaccatcagcggcctggagcccgaccacaagtacaagatgaacctgtacggcttccacggcggccagagagtgggccccgtgagcgccatcggcgtgaccgaggaggagacccccagccccaccgagcccagcaccgaggcccccgaggcccccgaggagcccctgctgggcgagctgaccgtgaccggcagcagccccgacagcctgagcctgagctggaccgtgccccagggcagattcgacagcttcaccgtgcagtacaaggacagagacggccagccccaggtggtgagagtgagaggcgaggagagcgaggtgaccgtgggcggcctggagcccggcagaaagtacaagatgcacctgtacggcctgcacgagggccagagagtgggccccgtgagcaccgtgggcatcaccgcccccctgcccacccccctgcccgtggagcccagactgggcgagctggccgtggccgccgtgaccagcgacagcgtgggcctgagctggaccgtggcccagggccccttcgacagcttcctggtgcagtacagagacgcccagggccagccccaggccgtgcccgtgagcggcgacctgagagccgtggccgtgagcggcctggaccccgccagaaagtacaagttcctgctgttcggcctgcagaacggcaagagacacggccccgtgcccgtggaggccagaaccgcccccgacaccaagcccagccccagactgggcgagctgaccgtgaccgacgccacccccgacagcgtgggcctgagctggaccgtgcccgagggcgagttcgacagcttcgtggtgcagtacaaggacaaggacggcagactgcaggtggtgcccgtggccgccaaccagagagaggtgaccgtgcagggcctggagcccagcagaaagtacagattcctgctgtacggcctgagcggcagaaagagactgggccccatcagcgccgacagcaccaccgcccccctggagaaggagctgcccccccacctgggcgagctgaccgtggccgaggagaccagcagcagcctgagactgagctggaccgtggcccagggccccttcgacagcttcgtggtgcagtacagagacaccgacggccagcccagagccgtgcccgtggccgccgaccagagaaccgtgaccgtggaggacctggagcccggcaagaagtacaagttcctgctgtacggcctgctgggcggcaagagactgggccccgtgagcgccctgggcatgaccgcccccgaggaggacacccccgcccccgagctggcccccgaggcccccgagccccccgaggagcccagactgggcgtgctgaccgtgaccgacaccacccccgacagcatgagactgagctggagcgtggcccagggccccttcgacagcttcgtggtgcagtacgaggacaccaacggccagccccaggccctgctggtggacggcgaccagagcaagatcctgatcagcggcctggagcccagcaccccctacagattcctgctgtacggcctgcacgagggcaagagactgggccccctgagcgccgagggcaccaccggcctggcccccgccggccagaccagcgaggagagcagacccagactgagccagctgagcgtgaccgacgtgaccaccagcagcctgagactgaactgggaggccccccccggcgccttcgacagcttcctgctgagattcggcgtgcccagccccagcaccctggagccccaccccagacccctgctgcagagagagctgatggtgcccggcaccagacacagcgccgtgctgagagacctgagaagcggcaccctgtacagcctgaccctgtacggcctgagaggcccccacaaggccgacagcatccagggcaccgccagaaccctgagccccgtgctggagagccccagagacctgcagttcagcgagatcagagagaccagcgccaaggtgaactggatgcccccccccagcagagccgacagcttcaaggtgagctaccagctggccgacggcggcgagccccagagcgtgcaggtggacggccaggccagaacccagaagctgcagggcctgatccccggcgccagatacgaggtgaccgtggtgagcgtgagaggcttcgaggagagcgagcccctgaccggcttcctgaccaccgtgcccgacggccccacccagctgagagccctgaacctgaccgagggcttcgccgtgctgcactggaagcccccccagaaccccgtggacacctacgacatccaggtgaccgcccccggcgccccccccctgcaggccgagacccccggcagcgccgtggactaccccctgcacgacctggtgctgcacaccaactacaccgccaccgtgagaggcctgagaggccccaacctgaccagccccgccagcatcaccttcaccaccggcctggaggcccccagagacctggaggccaaggaggtgacccccagaaccgccctgctgacctggaccgagccccccgtgagacccgccggctacctgctgagcttccacacccccggcggccagacccaggagatcctgctgcccggcggcatcaccagccaccagctgctgggcctgttccccagcaccagctacaacgccagactgcaggccatgtggggccagagcctgctgccccccgtgagcaccagcttcaccaccggcggcctgagaatccccttccccagagactgcggcgaggagatgcagaacggcgccggcgccagcagaaccagcaccatcttcctgaacggcaacagagagagacccctgatcgtgttctgcgacatggagaccgacggcggcggctggctggtgttccagagaagaatggacggccagaccgacttctggagagactgggaggactacgcccacggcttcggcaacatcagcggcgagttctggctgggcaacgaggccctgcacagcctgacccaggccggcgactacagcatgagagtggacctgagagccggcgacgaggccgtgttcgcccagtacgacagcttccacgtggacagcgccgccgagtactacagactgcacctggagggctaccacggcaccgccggcgacagcatgagctaccacagcggcagcgtgttcagcgccagagacagagaccccaacagcctgctgatcagctgcgccgtgagctacagaggcgcctggtggtacagaaactgccactacgccaacctgaacggcctgtacggcagcaccgtggaccaccagggcgtgagctggtaccactggaagggcttcgagttcagcgtgcccttcaccgagatgaagctgagacccagaaacttcagaagccccgccggcggcggctag

SEQ ID NO: 201471 - DNA, 9891 bp, Artificial Sequence
  derived and/or modified sequence
tgaagcagccccctgggcctgctgggcaccaccgacgagcccccccccagcggccccagcaccacccagggcgcccaggcccccctgctgcagcagagaccccaggagctgggcgagctgagagtgctgggcagagacgagaccggcagactgagagtggtgtggaccgcccagcccgacaccttcgcctacttccagctgagaatgagagtgcccgagggccccggcgcccacgaggaggtgctgcccggcgacgtgagacaggccctggtgcccccccccccccccggcaccccctacgagctgagcctgcacggcgtgccccccggcggcaagcccagcgaccccatcatctaccagggcatcatggacaaggacgaggagaagcccggcaagagcagcggcccccccagactgggcgagctgaccgtgaccgacagaaccagcgacagcctgctgctgagatggaccgtgcccgagggcgagttcgacagcttcgtgatccagtacaaggacagagacggccagccccaggtggtgcccgtggagggcccccagagaagcgccgtgatcaccagcctggaccccggcagaaagtacaagttcgtgctgtacggcttcgtgggcaagaagagacacggccccctggtggccgaggccaagatcctgccccagagcgaccccagccccggcacccccccccacctgggcaacctgtgggtgaccgaccccacccccgacagcctgcacctgagctggaccgtgcccgagggccagttcgacaccttcatggtgcagtacagagacagagacggcagaccccaggtggtgcccgtggagggccccgagagaagcttcgtggtgagcagcctggaccccgaccacaagtacagattcaccctgttcggcatcgccaacaagaagagatacggccccctgaccgccgacggcaccaccgcccccgagagaaaggaggagccccccagacccgagttcctggagcagcccctgctgggcgagctgaccgtgaccggcgtgacccccgacagcctgagactgagctggaccgtggcccagggccccttcgacagcttcatggtgcagtacaaggacgcccagggccagccccaggccgtgcccgtggccggcgacgagaacgaggtgaccgtgcccggcctggaccccgacagaaagtacaagatgaacctgtacggcctgagaggcagacagagagtgggccccgagagcgtggtggccaagaccgccccccaggaggacgtggacgagacccccagccccaccgagctgggcaccgaggcccccgagagccccgaggagcccctgctgggcgagctgaccgtgaccggcagcagccccgacagcctgagcctgttctggaccgtgccccagggcagcttcgacagcttcaccgtgcagtacaaggacagagacggcagaccccaggccgtgagagtgggcggcaaggagagcgaggtgaccgtgggcggcctggagcccggccacaagtacaagatgcacctgtacggcctgcacgagggccagagagtgggccccgtgagcgccgtgggcgtgaccgccccccagcaggaggagaccccccccgccaccgagagccccctggagcccagactgggcgagctgaccgtgaccgacgtgacccccaacagcgtgggcctgagctggaccgtgcccgagggccagttcgacagcttcatcgtgcagtacaaggacaaggacggccagccccaggtggtgcccgtggccgccgaccagagagaggtgaccgtgtacaacctggagcccgagagaaagtacaagatgaacatgtacggcctgcacgacggccagagaatgggccccctgagcgtggtgatcgtgaccgcccccctgccccccgcccccgccaccgaggccagcaagccccccctggagcccagactgggcgagctgaccgtgaccgacatcacccccgacagcgtgggcctgagctggaccgtgcccgagggcgagttcgacagcttcgtggtgcagtacaaggacagagacggccagccccaggtggtgcccgtggccgccgaccagagagaggtgaccatccccgacctggagcccagcagaaagtacaagttcctgctgttcggcatccaggacggcaagagaagaagccccgtgagcgtggaggccaagaccgtggccagaggcgacgccagccccggcgccccccccagactgggcgagctgtgggtgaccgaccccacccccgacagcctgagactgagctggaccgtgcccgagggccagttcgacagcttcgtggtgcagttcaaggacaaggacggcccccaggtggtgcccgtggagggccacgagagaagcgtgaccgtgacccccctggacgccggcagaaagtacagattcctgctgtacggcctgctgggcaagaagagacacggccccctgaccgccgacggcaccaccgaggccagaagcgccatggacgacaccggcaccaagagaccccccaagcccagactgggcgaggagctgcaggtgaccaccgtgacccagaacagcgtgggcctgagctggaccgtgcccgagggccagttcgacagcttcgtggtgcagtacaaggacagagacggccagccccaggtggtgcccgtggagggcagcctgagagaggtgagcgtgcccggcctggaccccgcccacagatacaagctgctgctgtacggcctgcaccacggcaagagagtgggccccatcagcgccgtggccatcaccgccggcagagaggagaccgagaccgagaccaccgcccccaccccccccgcccccgagccccacctgggcgagctgaccgtggaggaggccaccagccacaccctgcacctgagctggatggtgaccgagggcgagttcgacagcttcgagatccagtacaccgacagagacggccagctgcagatggtgagaatcggcggcgacagaaacgacatcaccctgagcggcctggagagcgaccacagatacctggtgaccctgtacggcttcagcgacggcaagcacgtgggccccgtgcacgtggaggccctgaccgtgcccgaggaggagaagcccagcgagccccccaccgccacccccgagccccccatcaagcccagactgggcgagctgaccgtgaccgacgccacccccgacagcctgagcctgagctggaccgtgcccgagggccagttcgaccacttcctggtgcagtacagaaacggcgacggccagcccaaggccgtgagagtgcccggccacgaggagggcgtgaccatcagcggcctggagcccgaccacaagtacaagatgaacctgtacggcttccacggcggccagagaatgggccccgtgagcgtggtgggcgtgaccgccgccgaggaggagacccccagccccaccgagcccagcatggaggcccccgagcccgccgaggagcccctgctgggcgagctgaccgtgaccggcagcagccccgacagcctgagcctgagctggaccgtgccccagggcagattcgacagcttcaccgtgcagtacaaggacagagacggcagaccccaggtggtgagagtgggcggcgaggagagcgaggtgaccgtgggcggcctggagcccggcagaaagtacaagatgcacctgtacggcctgcacgagggcagaagagtgggccccgtgagcgccgtgggcgtgaccgcccccgaggaggagagccccgacgcccccctggccaagctgagactgggccagatgaccgtgagagacatcaccagcgacagcctgagcctgagctggaccgtgcccgagggccagttcgaccacttcctggtgcagttcaagaacggcgacggccagcccaaggccgtgagagtgcccggccacgaggacggcgtgaccatcagcggcctggagcccgaccacaagtacaagatgaacctgtacggcttccacggcggccagagagtgggccccgtgagcgccgtgggcctgaccgcccccggcaaggacgaggagatggcccccgccagcaccgagccccccacccccgagccccccatcaagcccagactggaggagctgaccgtgaccgacgccacccccgacagcctgagcctgagctggaccgtgcccgagggccagttcgaccacttcctggtgcagtacaagaacggcgacggccagcccaaggccaccagagtgcccggccacgaggacagagtgaccatcagcggcctggagcccgacaacaagtacaagatgaacctgtacggcttccacggcggccagagagtgggccccgtgagcgccatcggcgtgaccgccgccgaggaggagacccccagccccaccgagcccagcatggaggcccccgagccccccgaggagcccctgctgggcgagctgaccgtgaccggcagcagccccgacagcctgagcctgagctggaccgtgccccagggcagattcgacagcttcaccgtgcagtacaaggacagagacggcagaccccaggtggtgagagtgggcggcgaggagagcgaggtgaccgtgggcggcctggagcccggcagaaagtacaagatgcacctgtacggcctgcacgagggcagaagagtgggccccgtgagcaccgtgggcgtgaccgccccccaggaggacgtggacgagacccccagccccaccgagcccggcaccgaggcccccggcccccccgaggagcccctgctgggcgagctgaccgtgaccggcagcagccccgacagcctgagcctgagctggaccgtgccccagggcagattcgacagcttcaccgtgcagtacaaggacagagacggcagaccccaggccgtgagagtgggcggccaggagagcaaggtgaccgtgagaggcctggagcccggcagaaagtacaagatgcacctgtacggcctgcacgagggcagaagactgggccccgtgagcgccgtgggcgtgaccgaggacgaggccgagaccacccaggccgtgcccaccatgacccccgagccccccatcaagcccagactgggcgagctgaccatgaccgacgccacccccgacagcctgagcctgagctggaccgtgcccgagggccagttcgaccacttcctggtgcagtacagaaacggcgacggccagcccaaggccgtgagagtgcccggccacgaggacggcgtgaccatcagcggcctggagcccgaccacaagtacaagatgaacctgtacggcttccacggcggccagagagtgggccccatcagcgtgatcggcgtgaccgccgccgaggaggagacccccagccccaccgagctgagcaccgaggcccccgagccccccgaggagcccctgctgggcgagctgaccgtgaccggcagcagccccgacagcctgagcctgagctggaccatcccccagggccacttcgacagcttcaccgtgcagtacaaggacagagacggcagaccccaggtgatgagagtgagaggcgaggagagcgaggtgaccgtgggcggcctggagcccggcagaaagtacaagatgcacctgtacggcctgcacgagggcagaagagtgggccccgtgagcaccgtgggcgtgaccgtgcccaccaccacccccgagccccccaacaagcccagactgggcgagctgaccgtgaccgacgccacccccgacagcctgagcctgagctggatggtgcccgagggccagttcgaccacttcctggtgcagtacagaaacggcgacggccagcccaaggtggtgagagtgcccggccacgaggacggcgtgaccatcagcggcctggagcccgaccacaagtacaagatgaacctgtacggcttccacggcggccagagagtgggccccatcagcgtgatcggcgtgaccgccgccgaggaggagacccccgcccccaccgagcccagcaccgaggcccccgagccccccgaggagcccctgctgggcgagctgaccgtgaccggcagcagccccgacagcctgagcctgagctggaccatcccccagggcagattcgacagcttcaccgtgcagtacaaggacagagacggcagaccccaggtggtgagagtgagaggcgaggagagcgaggtgaccgtgggcggcctggagcccggctgcaagtacaagatgcacctgtacggcctgcacgagggccagagagtgggccccgtgagcgccgtgggcgtgaccgtgcccaccatgacccccgagccccccatcaagcccagactgggcgagctgaccgtgaccgacgccacccccgacagcctgagcctgagctggatggtgcccgagggccagttcgaccacttcctggtgcagtacagaaacggcgacggccagcccaaggccgtgagagtgcccggccacgaggacggcgtgaccatcagcggcctggagcccgaccacaagtacaagatgaacctgtacggcttccacggcggccagagagtgggccccgtgagcgccatcggcgtgaccgaggaggagacccccagccccaccgagcccagcaccgaggcccccgaggcccccgaggagcccctgctgggcgagctgaccgtgaccggcagcagccccgacagcctgagcctgagctggaccgtgccccagggcagattcgacagcttcaccgtgcagtacaaggacagagacggccagccccaggtggtgagagtgagagtggaggagagcgaggtgaccgtgggcggcctggagcccggcagaaagtacaagatgcacctgtacggcctgcacgagggccagagagtgggccccgtgagcaccgtgggcatcaccgcccccctgcccacccccctgcccgtggagcccagactgggcgagctggccgtggccgccgtgaccagcgacagcgtgggcctgagctggaccgtggcccagggccccttcgacagcttcctggtgcagtacagagacgcccagggccagccccaggccgtgcccgtgagcggcgacctgagagccgtggccgtgagcggcctggaccccgccagaaagtacaagttcctgctgttcggcctgcagaacggcaagagacacggccccgtgcccgtggaggccagaaccgcccccgacaccaagcccagccccagactgggcgagctgaccgtgaccgacgccacccccgacagcgtgggcctgagctggaccgtgcccgagggcgagttcgacagcttcgtggtgcagtacaaggacaaggacggcagactgcaggtggtgcccgtggccgccaaccagagagaggtgaccgtgcagggcctggagcccagcagaaagtacagattcctgctgtacggcctgagcggcagaaagagactgggccccatcagcgccgacagcaccaccgcccccctggagaaggagctgcccccccacctgggcgagctgaccgtggccgaggagaccagcagcagcctgagactgagctggaccgtggcccagggccccttcgacagcttcgtggtgcagtacagagacaccgacggccagcccagagccgtgcccgtggccgccgaccagagaaccgtgaccgtggaggacctggagcccggcaagaagtacaagttcctgctgtacggcctgctgggcggcaagagactgggccccgtgagcgccctgggcatgaccgcccccgaggaggacacccccgcccccgagctggcccccgaggcccccgagccccccgaggagcccagactgggcgtgctgaccgtgaccgacaccacccccgacagcatgagactgagctggagcgtggcccagggccccttcgacagcttcgtggtgcagtacgaggacaccaacggccagccccaggccctgctggtggacggcgaccagagcaagatcctgatcagcggcctggagcccagcaccccctacagattcctgctgtacggcctgcacgagggcaagagactgggccccctgagcgccgagggcaccaccggcctggcccccgccggccagaccagcgaggagagcagacccagactgagccagctgagcgtgaccgacgtgaccaccagcagcctgagactgaactgggaggccccccccggcgccttcgacagcttcctgctgagattcggcgtgcccagccccagcaccctggagccccaccccagacccctgctgcagagagagctgatggtgcccggcaccagacacagcgccgtgctgagagacctgagaagcggcaccctgtacagcctgaccctgtacggcctgagaggcccccacaaggccgacagcatccagggcaccgccagaaccctgagccccgtgctggagagccccagagacctgcagttcagcgagatcagagagaccagcgccaaggtgaactggatgcccccccccagcagagccgacagcttcaaggtgagctaccagctggccgacggcggcgagccccagagcgtgcaggtggacggccaggccagaacccagaagctgcagggcctgatccccggcgccagatacgaggtgaccgtggtgagcgtgagaggcttcgaggagagcgagcccctgaccggcttcctgaccaccgtgcccgacggccccacccagctgagagccctgaacctgaccgagggcttcgccgtgctgcactggaagcccccccagaaccccgtggacacctacgacgtgcaggtgaccgcccccggcgccccccccctgcaggccgagacccccggcagcgccgtggactaccccctgcacgacctggtgctgcacaccaactacaccgccaccgtgagaggcctgagaggccccaacctgaccagccccgccagcatcaccttcaccaccggcctggaggcccccagagacctggaggccaaggaggtgacccccagaaccgccctgctgacctggaccgagccccccgtgagacccgccggctacctgctgagcttccacacccccggcggccagaaccaggagatcctgctgcccggcggcatcaccagccaccagctgctgggcctgttccccagcaccagctacaacgccagactgcaggccatgtggggccagagcctgctgccccccgtgagcaccagcttcaccaccggcggcctgagaatccccttccccagagactgcggcgaggagatgcagaacggcgccggcgccagcagaaccagcaccatcttcctgaacggcaacagagagagacccctgaacgtgttctgcgacatggagaccgacggcggcggctggctggtgttccagagaagaatggacggccagaccgacttctggagagactgggaggactacgcccacggcttcggcaacatcagcggcgagttctggctgggcaacgaggccctgcacagcctgacccaggccggcgactacagcatgagagtggacctgagagccggcgacgaggccgtgttcgcccagtacgacagcttccacgtggacagcgccgccgagtactacagactgcacctggagggctaccacggcaccgccggcgacagcatgagctaccacagcggcagcgtgttcagcgccagagacagagaccccaacagcctgctgatcagctgcgccgtgagctacagaggcgcctggtggtacagaaactgccactacgccaacctgaacggcctgtacggcagcaccgtggaccaccagggcgtgagctggtaccactggaagggcttcgagttcagcgtgcccttcaccgagatgaagctgagacccagaaacttcagaagccccgccggcggcggctag

SEQ ID NO: 201472 - DNA, 12669 bp, Artificial Sequence
  derived and/or modified sequence
atgatgcccgcccagtacgccctgaccagcagcctggtgctgctggtgctgctgagcaccgccagagccggccccttcagcagcagaagcaacgtgaccctgcccgcccccagaccccccccccagcccggcggccacaccgtgggcgccggcgtgggcagccccagcagccagctgtacgagcacaccgtggagggcggcgagaagcaggtggtgttcacccacagaatcaacctgccccccagcaccggctgcggctgcccccccggcaccgagccccccgtgctggccagcgaggtgcaggccctgagagtgagactggagatcctggaggagctggtgaagggcctgaaggagcagtgcaccggcggctgctgccccgccagcgcccaggccggcaccggccagaccgacgtgagaaccctgtgcagcctgcacggcgtgttcgacctgagcagatgcacctgcagctgcgagcccggctggggcggccccacctgcagcgaccccaccgacgccgagatcccccccagcagcccccccagcgccagcggcagctgccccgacgactgcaacgaccagggcagatgcgtgagaggcagatgcgtgtgcttccccggctacaccggccccagctgcggctggcccagctgccccggcgactgccagggcagaggcagatgcgtgcagggcgtgtgcgtgtgcagagccggcttcagcggccccgactgcagccagagaagctgccccagaggctgcagccagagaggcagatgcgagggcggcagatgcgtgtgcgaccccggctacaccggcgacgactgcggcatgagaagctgccccagaggctgcagccagagaggcagatgcgagaacggcagatgcgtgtgcaaccccggctacaccggcgaggactgcggcgtgagaagctgccccagaggctgcagccagagaggcagatgcaaggacggcagatgcgtgtgcgaccccggctacaccggcgaggactgcggcaccagaagctgcccctgggactgcggcgagggcggcagatgcgtggacggcagatgcgtgtgctggcccggctacaccggcgaggactgcagcaccagaacctgccccagagactgcagaggcagaggcagatgcgaggacggcgagtgcatctgcgacaccggctacagcggcgacgactgcggcgtgagaagctgccccggcgactgcaaccagagaggcagatgcgaggacggcagatgcgtgtgctggcccggctacaccggcaccgactgcggcagcagagcctgccccagagactgcagaggcagaggcagatgcgagaacggcgtgtgcgtgtgcaacgccggctacagcggcgaggactgcggcgtgagaagctgccccggcgactgcagaggcagaggcagatgcgagagcggcagatgcatgtgctggcccggctacaccggcagagactgcggcaccagagcctgccccggcgactgcagaggcagaggcagatgcgtggacggcagatgcgtgtgcaaccccggcttcaccggcgaggactgcggcagcagaagatgccccggcgactgcagaggccacggcctgtgcgaggacggcgtgtgcgtgtgcgacgccggctacagcggcgaggactgcagcaccagaagctgccccggcggctgcagaggcagaggccagtgcctggacggcagatgcgtgtgcgaggacggctacagcggcgaggactgcggcgtgagacagtgccccaacgactgcagccagcacggcgtgtgccaggacggcgtgtgcatctgctgggagggctacgtgagcgaggactgcagcatcagaacctgccccagcaactgccacggcagaggcagatgcgaggagggcagatgcctgtgcgaccccggctacaccggccccacctgcgccaccagaatgtgccccgccgactgcagaggcagaggcagatgcgtgcagggcgtgtgcctgtgccacgtgggctacggcggcgaggactgcggccaggaggagccccccgccagcgcctgccccggcggctgcggccccagagagctgtgcagagccggccagtgcgtgtgcgtggagggcttcagaggccccgactgcgccatccagacctgccccggcgactgcagaggcagaggcgagtgccacgacggcagctgcgtgtgcaaggacggctacgccggcgaggactgcggcgaggaggtgcccaccatcgagggcatgagaatgcacctgctggaggagaccaccgtgagaaccgagtggacccccgcccccggccccgtggacgcctacgagatccagttcatccccaccaccgagggcgccagcccccccttcaccgccagagtgcccagcagcgccagcgcctacgaccagagaggcctggcccccggccaggagtaccaggtgaccgtgagagccctgagaggcaccagctggggcctgcccgccagcaagaccatcaccaccatgatcgacggcccccaggacctgagagtggtggccgtgacccccaccaccctggagctgggctggctgagaccccaggccgaggtggacagattcgtggtgagctacgtgagcgccggcaaccagagagtgagactggaggtgccccccgaggccgacggcaccctgctgaccgacctgatgcccggcgtggagtacgtggtgaccgtgaccgccgagagaggcagagccgtgagctaccccgccagcgtgagagccaacaccggcagcagccccctgggcctgctgggcaccaccgacgagcccccccccagcggccccagcaccacccagggcgcccaggcccccctgctgcagcagagaccccaggagctgggcgagctgagagtgctgggcagagacgagaccggcagactgagagtggtgtggaccgcccagcccgacaccttcgcctacttccagctgagaatgagagtgcccgagggccccggcgcccacgaggaggtgctgcccggcgacgtgagacaggccctggtgcccccccccccccccggcaccccctacgagctgagcctgcacggcgtgccccccggcggcaagcccagcgaccccatcatctaccagggcatcatggacaaggacgaggagaagcccggcaagagcagcggcccccccagactgggcgagctgaccgtgaccgacagaaccagcgacagcctgctgctgagatggaccgtgcccgagggcgagttcgacagcttcgtgatccagtacaaggacagagacggccagccccaggtggtgcccgtggagggcccccagagaagcgccgtgatcaccagcctggaccccggcagaaagtacaagttcgtgctgtacggcttcgtgggcaagaagagacacggccccctggtggccgaggccaagatcctgccccagagcgaccccagccccggcaccccccccagactgggcaacctgtgggtgaccgaccccacccccgacagcctgcacctgagctggaccgtgcccgagggccagttcgacaccttcatggtgcagtacagagacagagacggcagaccccaggtggtgcccgtggagggccccgagagaagcttcgtggtgagcagcctggaccccgaccacaagtacagattcaccctgttcggcatcgccaacaagaagagatacggccccctgaccgccgacggcaccaccgcccccgagagaaaggaggagccccccagacccgagttcctggagcagcccctgctgggcgagctgaccgtgaccggcgtgacccccgacagcctgagactgagctggaccgtggcccagggccccttcgacagcttcatggtgcagtacaaggacgcccagggccagccccaggccgtgcccgtggccggcgacgagaacgaggtgaccgtgcccggcctggaccccgacagaaagtacaagatgaacctgtacggcctgagaggcagacagagagtgggccccgagagcgtggtggccaagaccgccccccaggaggacgtggacgagacccccagccccaccgagctgggcaccgaggcccccgagagccccgaggagcccctgctgggcgagctgaccgtgaccggcagcagccccgacagcctgagcctgttctggaccgtgccccagggcagcttcgacagcttcaccgtgcagtacaaggacagagacggcagacccagagccgtgagagtgggcggcaaggagagcgaggtgaccgtgggcggcctggagcccggccacaagtacaagatgcacctgtacggcctgcacgagggccagagagtgggccccgtgagcgccgtgggcgtgaccgccccccagcaggaggagaccccccccgccaccgagagccccctggagcccagactgggcgagctgaccgtgaccgacgtgacccccaacagcgtgggcctgagctggaccgtgcccgagggccagttcgacagcttcatcgtgcagtacaaggacaaggacggccagccccaggtggtgcccgtggccgccgaccagagagaggtgaccgtgtacaacctggagcccgagagaaagtacaagatgaacatgtacggcctgcacgacggccagagaatgggccccctgagcgtggtgatcgtgaccgcccccctgccccccgcccccgccaccgaggccagcaagccccccctggagcccagactgggcgagctgaccgtgaccgacatcacccccgacagcgtgggcctgagctggaccgtgcccgagggcgagttcgacagcttcgtggtgcagtacaaggacagagacggccagccccaggtggtgcccgtggccgccgaccagagagaggtgaccatccccgacctggagcccagcagaaagtacaagttcctgctgttcggcatccaggacggcaagagaagaagccccgtgagcgtggaggccaagaccgtggccagaggcgacgccagccccggcgccccccccagactgggcgagctgtgggtgaccgaccccacccccgacagcctgagactgagctggaccgtgcccgagggccagttcgacagcttcgtggtgcagttcaaggacaaggacggcccccaggtggtgcccgtggagggccacgagagaagcgtgaccgtgacccccctggacgccggcagaaagtacagattcctgctgtacggcctgctgggcaagaagagacacggccccctgaccgccgacggcaccaccgaggccagaagcgccatggacgacaccggcaccaagagaccccccaagcccagactgggcgaggagctgcaggtgaccaccgtgacccagaacagcgtgggcctgagctggaccgtgcccgagggccagttcgacagcttcgtggtgcagtacaaggacagagacggccagccccaggtggtgcccgtggagggcagcctgagagaggtgagcgtgcccggcctggaccccgcccacagatacaagctgctgctgtacggcctgcaccacggcaagagagtgggccccatcagcgccgtggccatcaccgccggcagagaggagaccgagaccgagaccaccgcccccaccccccccgcccccgagccccacctgggcgagctgaccgtggaggaggccaccagccacaccctgcacctgagctggatggtgaccgagggcgagttcgacagcttcgagatccagtacaccgacagagacggccagctgcagatggtgagaatcggcggcgacagaaacgacatcaccctgagcggcctggagagcgaccacagatacctggtgaccctgtacggcttcagcgacggcaagcacgtgggccccgtgcacgtggaggccctgaccgtgcccgaggaggagaagcccagcgagccccccaccgccacccccgagccccccatcaagcccagactgggcgagctgaccgtgaccgacgccacccccgacagcctgagcctgagctggaccgtgcccgagggccagttcgaccacttcctggtgcagtacagaaacggcgacggccagcccaaggccgtgagagtgcccggccacgaggagggcgtgaccatcagcggcctggagcccgaccacaagtacaagatgaacctgtacggcttccacggcggccagagaatgggccccgtgagcgtggtgggcgtgaccgccgccgaggaggagacccccagccccaccgagcccagcatggaggcccccgagcccgccgaggagcccctgctgggcgagctgaccgtgaccggcagcagccccgacagcctgagcctgagctggaccgtgccccagggcagattcgacagcttcaccgtgcagtacaaggacagagacggcagaccccaggtggtgagagtgggcggcgaggagagcgaggtgaccgtgggcggcctggagcccggcagaaagtacaagatgcacctgtacggcctgcacgagggcagaagagtgggccccgtgagcgccgtgggcgtgaccgcccccgaggaggagagccccgacgcccccctggccaagctgagactgggccagatgaccgtgagagacatcaccagcgacagcctgagcctgagctggaccgtgcccgagggccagttcgaccacttcctggtgcagttcaagaacggcgacggccagcccaaggccgtgagagtgcccggccacgaggacggcgtgaccatcagcggcctggagcccgaccacaagtacaagatgaacctgtacggcttccacggcggccagagagtgggccccgtgagcgccgtgggcctgaccgcccccggcaaggacgaggagatggcccccgccagcaccgagccccccacccccgagccccccatcaagcccagactggaggagctgaccgtgaccgacgccacccccgacagcctgagcctgagctggaccgtgcccgagggccagttcgaccacttcctggtgcagtacaagaacggcgacggccagcccaaggccaccagagtgcccggccacgaggacagagtgaccatcagcggcctggagcccgacaacaagtacaagatgaacctgtacggcttccacggcggccagagagtgggccccgtgagcgccatcggcgtgaccgccgccgaggaggagacccccagccccaccgagcccagcatggaggcccccgagccccccgaggagcccctgctgggcgagctgaccgtgaccggcagcagccccgacagcctgagcctgagctggaccgtgccccagggcagattcgacagcttcaccgtgcagtacaaggacagagacggcagaccccaggtggtgagagtgggcggcgaggagagcgaggtgaccgtgggcggcctggagcccggcagaaagtacaagatgcacctgtacggcctgcacgagggcagaagagtgggccccgtgagcaccgtgggcgtgaccgccccccaggaggacgtggacgagacccccagccccaccgagcccggcaccgaggcccccgagccccccgaggagcccctgctgggcgagctgaccgtgaccggcagcagccccgacagcctgagcctgagctggaccgtgccccagggcagattcgacagcttcaccgtgcagtacaaggacagagacggcagaccccaggccgtgagagtgggcggccaggagagcaaggtgaccgtgagaggcctggagcccggcagaaagtacaagatgcacctgtacggcctgcacgagggcagaagactgggccccgtgagcgccgtgggcgtgaccgaggacgaggccgagaccacccaggccgtgcccaccatgacccccgagccccccatcaagcccagactgggcgagctgaccatgaccgacgccacccccgacagcctgagcctgagctggaccgtgcccgagggccagttcgaccacttcctggtgcagtacagaaacggcgacggccagcccaaggccgtgagagtgcccggccacgaggacggcgtgaccatcagcggcctggagcccgaccacaagtacaagatgaacctgtacggcttccacggcggccagagagtgggccccatcagcgtgatcggcgtgaccgccgccgaggaggagacccccagccccaccgagctgagcaccgaggcccccgagccccccgaggagcccctgctgggcgagctgaccgtgaccggcagcagccccgacagcctgagcctgagctggaccatcccccagggccacttcgacagcttcaccgtgcagtacaaggacagagacggcagaccccaggtgatgagagtgagaggcgaggagagcgaggtgaccgtgggcggcctggagcccggcagaaagtacaagatgcacctgtacggcctgcacgagggcagaagagtgggccccgtgagcaccgtgggcgtgaccgtgcccaccaccacccccgagccccccaacaagcccagactgggcgagctgaccgtgaccgacgccacccccgacagcctgagcctgagctggatggtgcccgagggccagttcgaccacttcctggtgcagtacagaaacggcgacggccagcccaaggtggtgagagtgcccggccacgaggacggcgtgaccatcagcggcctggagcccgaccacaagtacaagatgaacctgtacggcttccacggcggccagagagtgggccccatcagcgtgatcggcgtgaccgccgccgaggaggagacccccgcccccaccgagcccagcaccgaggcccccgagccccccgaggagcccctgctgggcgagctgaccgtgaccggcagcagccccgacagcctgagcctgagctggaccatcccccagggcagattcgacagcttcaccgtgcagtacaaggacagagacggcagaccccaggtggtgagagtgagaggcgaggagagcgaggtgaccgtgggcggcctggagcccggctgcaagtacaagatgcacctgtacggcctgcacgagggccagagagtgggccccgtgagcgccgtgggcgtgaccgtgcccaccatgacccccgagccccccatcaagcccagactgggcgagctgaccgtgaccgacgccacccccgacagcctgagcctgagctggatggtgcccgagggccagttcgaccacttcctggtgcagtacagaaacggcgacggccagcccaaggccgtgagagtgcccggccacgaggacggcgtgaccatcagcggcctggagcccgaccacaagtacaagatgaacctgtacggcttccacggcggccagagagtgggccccgtgagcgccatcggcgtgaccgaggaggagacccccagccccaccgagcccagcaccgaggcccccgaggcccccgaggagcccctgctgggcgagctgaccgtgaccggcagcagccccgacagcctgagcctgagctggaccgtgccccagggcagattcgacagcttcaccgtgcagtacaaggacagagacggccagccccaggtggtgagagtgagaggcgaggagagcgaggtgaccgtgggcggcctggagcccggcagaaagtacaagatgcacctgtacggcctgcacgagggccagagagtgggccccgtgagcaccgtgggcatcaccgcccccctgcccacccccctgcccgtggagcccagactgggcgagctggccgtggccgccgtgaccagcgacagcgtgggcctgagctggaccgtggcccagggccccttcgacagcttcctggtgcagtacagagacgcccagggccagccccaggccgtgcccgtgagcggcgacctgagagccgtggccgtgagcggcctggaccccgccagaaagtacaagttcctgctgttcggcctgcagaacggcaagagacacggccccgtgcccgtggaggccagaaccgcccccgacaccaagcccagccccagactgggcgagctgaccgtgaccgacgccacccccgacagcgtgggcctgagctggaccgtgcccgagggcgagttcgacagcttcgtggtgcagtacaaggacaaggacggcagactgcaggtggtgcccgtggccgccaaccagagagaggtgaccgtgcagggcctggagcccagcagaaagtacagattcctgctgtacggcctgagcggcagaaagagactgggccccatcagcgccgacagcaccaccgcccccctggagaaggagctgcccccccacctgggcgagctgaccgtggccgaggagaccagcagcagcctgagactgagctggaccgtggcccagggccccttcgacagcttcgtggtgcagtacagagacaccgacggccagcccagagccgtgcccgtggccgccgaccagagaaccgtgaccgtggaggacctggagcccggcaagaagtacaagttcctgctgtacggcctgctgggcggcaagagactgggccccgtgagcgccctgggcatgaccgcccccgaggaggacacccccgcccccgagctggcccccgaggcccccgagccccccgaggagcccagactgggcgtgctgaccgtgaccgacaccacccccgacagcatgagactgagctggagcgtggcccagggccccttcgacagcttcgtggtgcagtacgaggacaccaacggccagccccaggccctgctggtggacggcgaccagagcaagatcctgatcagcggcctggagcccagcaccccctacagattcctgctgtacggcctgcacgagggcaagagactgggccccctgagcgccgagggcaccaccggcctggcccccgccggccagaccagcgaggagagcagacccagactgagccagctgagcgtgaccgacgtgaccaccagcagcctgagactgaactgggaggccccccccggcgccttcgacagcttcctgctgagattcggcgtgcccagccccagcaccctggagccccaccccagacccctgctgcagagagagctgatggtgcccggcaccagacacagcgccgtgctgagagacctgagaagcggcaccctgtacagcctgaccctgtacggcctgagaggcccccacaaggccgacagcatccagggcaccgccagaaccctgagccccgtgctggagagccccagagacctgcagttcagcgagatcagagagaccagcgccaaggtgaactggatgcccccccccagcagagccgacagcttcaaggtgagctaccagctggccgacggcggcgagccccagagcgtgcaggtggacggccaggccagaacccagaagctgcagggcctgatccccggcgccagatacgaggtgaccgtggtgagcgtgagaggcttcgaggagagcgagcccctgaccggcttcctgaccaccgtgcccgacggccccacccagctgagagccctgaacctgaccgagggcttcgccgtgctgcactggaagcccccccagaaccccgtggacacctacgacatccaggtgaccgcccccggcgccccccccctgcaggccgagacccccggcagcgccgtggactaccccctgcacgacctggtgctgcacaccaactacaccgccaccgtgagaggcctgagaggccccaacctgaccagccccgccagcatcaccttcaccaccggcctggaggcccccagagacctggaggccaaggaggtgacccccagaaccgccctgctgacctggaccgagccccccgtgagacccgccggctacctgctgagcttccacacccccggcggccagacccaggagatcctgctgcccggcggcatcaccagccaccagctgctgggcctgttccccagcaccagctacaacgccagactgcaggccatgtggggccagagcctgctgccccccgtgagcaccagcttcaccaccggcggcctgagaatccccttccccagagactgcggcgaggagatgcagaacggcgccggcgccagcagaaccagcaccatcttcctgaacggcaacagagagagacccctgatcgtgttctgcgacatggagaccgacggcggcggctggctggtgttccagagaagaatggacggccagaccgacttctggagagactgggaggactacgcccacggcttcggcaacatcagcggcgagttctggctgggcaacgaggccctgcacagcctgacccaggccggcgactacagcatgagagtggacctgagagccggcgacgaggccgtgttcgcccagtacgacagcttccacgtggacagcgccgccgagtactacagactgcacctggagggctaccacggcaccgccggcgacagcatgagctaccacagcggcagcgtgttcagcgccagagacagagaccccaacagcctgctgatcagctgcgccgtgagctacagaggcgcctggtggtacagaaactgccactacgccaacctgaacggcctgtacggcagcaccgtggaccaccagggcgtgagctggtaccactggaagggcttcgagttcagcgtgcccttcaccgagatgaagctgagacccagaaacttcagaagccccgccggcggcggctag

SEQ ID NO: 201473 - DNA, 1905 bp, Artificial Sequence
  derived and/or modified sequence
tgaagcagccccctgggcctgctgggcaccaccgacgagcccccccccagcggccccagcaccacccagggcgcccaggcccccctgctgcagcagagaccccaggagctgggcgagctgagagtgctgggcagagacgagaccggcagactgagagtggtgtggaccgcccagcccgacaccttcgcctacttccagctgagaatgagagtgcccgagggccccggcgcccacgaggaggtgctgcccggcgacgtgagacaggccctggtgcccccccccccccccggcaccccctacgagctgagcctgcacggcgtgccccccggcggcaagcccagcgaccccatcatctaccagggcatcatggacaaggacgaggagaagcccggcaagagcagcggcccccccagactgggcgagctgaccgtgaccgacagaaccagcgacagcctgctgctgagatggaccgtgcccgagggcgagttcgacagcttcgtgatccagtacaaggacagagacggccagccccaggtggtgcccgtggagggcccccagagaagcgccgtgatcaccagcctggaccccggcagaaagtacaagttcgtgctgtacggcttcgtgggcaagaagagacacggccccctggtggccgaggccaagatcctgccccagagcgaccccagccccggcaccccccccagactgggcaacctgtgggtgaccgaccccacccccgacagcctgcacctgagctggaccgtgcccgagggccagttcgacaccttcatggtgcagtacagagacagagacggcagaccccaggtggtgcccgtggagggccccgagagaagcttcgtggtgagcagcctggaccccgaccacaagtacagattcaccctgttcggcatcgccaacaagaagagatacggccccctgaccgccgacggcaccaccgcccccgagagaaaggaggagccccccagacccgagttcctggagcagcccctgctgggcgagctgaccgtgaccggcgtgacccccgacagcctgagactgagctggaccgtggcccagggccccttcgacagcttcatggtgcagtacaaggacgcccagggccagccccaggccgtgcccgtggccggcgacgagaacgaggtgaccgtgcccggcctggaccccgacagaaagtacaagatgaacctgtacggcctgagaggcagacagagagtgggccccgagagcgtggtggccaagaccgccccccaggaggacgtggacgagacccccagccccaccgagctgggcaccgaggcccccgagagccccgaggagcccctgctgggcgagctgaccgtgaccggcagcagccccgacagcctgagcctgttctggaccgtgccccagggcagcttcgacagcttcaccgtgcagtacaaggacagagacggcagacccagagccgtgagagtgggcggcaaggagagcgaggtgaccgtgggcggcctggagcccggccacaagtacaagatgcacctgtacggcctgcacgagggccagagagtgggccccgtgagcgccgtgggcgtgaccgccccccagcaggaggagaccccccccgccaccgagagccccctggagcccagactgggcgagctgaccgtgaccgacgtgacccccaacagcgtgggcctgagctggaccgtgcccgagggccagttcgacagcttcatcgtgcagtacaaggacaaggacggccagccccaggtggtgcccgtggccgccgaccagagagaggtgaccgtgtacaacctggagcccgagagaaagtacaagatgaacatgtacggcctgcacgacggccagagaatgggccccctgagcgtggtgatcgtgacctag

SEQ ID NO: 201474 - DNA, 12669 bp, Artificial Sequence
  derived and/or modified sequence
atgatgcccgcccagtacgccctgaccagcagcctggtgctgctggtgctgctgagcaccgccagagccggccccttcagcagcagaagcaacgtgaccctgcccgcccccagaccccccccccagcccggcggccacaccgtgggcgccggcgtgggcagccccagcagccagctgtacgagcacaccgtggagggcggcgagaagcaggtggtgttcacccacagaatcaacctgccccccagcaccggctgcggctgcccccccggcaccgagccccccgtgctggccagcgaggtgcaggccctgagagtgagactggagatcctggaggagctggtgaagggcctgaaggagcagtgcaccggcggctgctgccccgccagcgcccaggccggcaccggccagaccgacgtgagaaccctgtgcagcctgcacggcgtgttcgacctgagcagatgcacctgcagctgcgagcccggctggggcggccccacctgcagcgaccccaccgacgccgagatcccccccagcagcccccccagcgccagcggcagctgccccgacgactgcaacgaccagggcagatgcgtgagaggcagatgcgtgtgcttccccggctacaccggccccagctgcggctggcccagctgccccggcgactgccagggcagaggcagatgcgtgcagggcgtgtgcgtgtgcagagccggcttcagcggccccgactgcagccagagaagctgccccagaggctgcagccagagaggcagatgcgagggcggcagatgcgtgtgcgaccccggctacaccggcgacgactgcggcatgagaagctgccccagaggctgcagccagagaggcagatgcgagaacggcagatgcgtgtgcaaccccggctacaccggcgaggactgcggcgtgagaagctgccccagaggctgcagccagagaggcagatgcaaggacggcagatgcgtgtgcgaccccggctacaccggcgaggactgcggcaccagaagctgcccctgggactgcggcgagggcggcagatgcgtggacggcagatgcgtgtgctggcccggctacaccggcgaggactgcagcaccagaacctgccccagagactgcagaggcagaggcagatgcgaggacggcgagtgcatctgcgacaccggctacagcggcgacgactgcggcgtgagaagctgccccggcgactgcaaccagagaggcagatgcgaggacggcagatgcgtgtgctggcccggctacaccggcaccgactgcggcagcagagcctgccccagagactgcagaggcagaggcagatgcgagaacggcgtgtgcgtgtgcaacgccggctacagcggcgaggactgcggcgtgagaagctgccccggcgactgcagaggcagaggcagatgcgagagcggcagatgcatgtgctggcccggctacaccggcagagactgcggcaccagagcctgccccggcgactgcagaggcagaggcagatgcgtggacggcagatgcgtgtgcaaccccggcttcaccggcgaggactgcggcagcagaagatgccccggcgactgcagaggccacggcctgtgcgaggacggcgtgtgcgtgtgcgacgccggctacagcggcgaggactgcagcaccagaagctgccccggcggctgcagaggcagaggccagtgcctggacggcagatgcgtgtgcgaggacggctacagcggcgaggactgcggcgtgagacagtgccccaacgactgcagccagcacggcgtgtgccaggacggcgtgtgcatctgctgggagggctacgtgagcgaggactgcagcatcagaacctgccccagcaactgccacggcagaggcagatgcgaggagggcagatgcctgtgcgaccccggctacaccggccccacctgcgccaccagaatgtgccccgccgactgcagaggcagaggcagatgcgtgcagggcgtgtgcctgtgccacgtgggctacggcggcgaggactgcggccaggaggagccccccgccagcgcctgccccggcggctgcggccccagagagctgtgcagagccggccagtgcgtgtgcgtggagggcttcagaggccccgactgcgccatccagacctgccccggcgactgcagaggcagaggcgagtgccacgacggcagctgcgtgtgcaaggacggctacgccggcgaggactgcggcgaggaggtgcccaccatcgagggcatgagaatgcacctgctggaggagaccaccgtgagaaccgagtggacccccgcccccggccccgtggacgcctacgagatccagttcatccccaccaccgagggcgccagcccccccttcaccgccagagtgcccagcagcgccagcgcctacgaccagagaggcctggcccccggccaggagtaccaggtgaccgtgagagccctgagaggcaccagctggggcctgcccgccagcaagaccatcaccaccatgatcgacggcccccaggacctgagagtggtggccgtgacccccaccaccctggagctgggctggctgagaccccaggccgaggtggacagattcgtggtgagctacgtgagcgccggcaaccagagagtgagactggaggtgccccccgaggccgacggcaccctgctgaccgacctgatgcccggcgtggagtacgtggtgaccgtgaccgccgagagaggcagagccgtgagctaccccgccagcgtgagagccaacaccggcagcagccccctgggcctgctgggcaccaccgacgagcccccccccagcggccccagcaccacccagggcgcccaggcccccctgctgcagcagagaccccaggagctgggcgagctgagagtgctgggcagagacgagaccggcagactgagagtggtgtggaccgcccagcccgacaccttcgcctacttccagctgagaatgagagtgcccgagggccccggcgcccacgaggaggtgctgcccggcgacgtgagacaggccctggtgcccccccccccccccggcaccccctacgagctgagcctgcacggcgtgccccccggcggcaagcccagcgaccccatcatctaccagggcatcatggacaaggacgaggagaagcccggcaagagcagcggcccccccagactgggcgagctgaccgtgaccgacagaaccagcgacagcctgctgctgagatggaccgtgcccgagggcgagttcgacagcttcgtgatccagtacaaggacagagacggccagccccaggtggtgcccgtggagggcccccagagaagcgccgtgatcaccagcctggaccccggcagaaagtacaagttcgtgctgtacggcttcgtgggcaagaagagacacggccccctggtggccgaggccaagatcctgccccagagcgaccccagccccggcaccccccccagactgggcaacctgtgggtgaccgaccccacccccgacagcctgcacctgagctggaccgtgcccgagggccagttcgacaccttcatggtgcagtacagagacagagacggcagaccccaggtggtgcccgtggagggccccgagagaagcttcgtggtgagcagcctggaccccgaccacaagtacagattcaccctgttcggcatcgccaacaagaagagatacggccccctgaccgccgacggcaccaccgcccccgagagaaaggaggagcccccccaccccgagttcctggagcagcccctgctgggcgagctgaccgtgaccggcgtgacccccgacagcctgagactgagctggaccgtggcccagggccccttcgacagcttcatggtgcagtacaaggacgcccagggccagccccaggccgtgcccgtggccggcgacgagaacgaggtgaccgtgcccggcctggaccccgacagaaagtacaagatgaacctgtacggcctgagaggcagacagagagtgggccccgagagcgtggtggccaagaccgccccccaggaggacgtggacgagacccccagccccaccgagctgggcaccgaggcccccgagagccccgaggagcccctgctgggcgagctgaccgtgaccggcagcagccccgacagcctgagcctgttctggaccgtgccccagggcagcttcgacagcttcaccgtgcagtacaaggacagagacggcagacccagagccgtgagagtgggcggcaaggagagcgaggtgaccgtgggcggcctggagcccggccacaagtacaagatgcacctgtacggcctgcacgagggccagagagtgggccccgtgagcgccgtgggcgtgaccgccccccagcaggaggagaccccccccgccaccgagagccccctggagcccagactgggcgagctgaccgtgaccgacgtgacccccaacagcgtgggcctgagctggaccgtgcccgagggccagttcgacagcttcatcgtgcagtacaaggacaaggacggccagccccaggtggtgcccgtggccgccgaccagagagaggtgaccgtgtacaacctggagcccgagagaaagtacaagatgaacatgtacggcctgcacgacggccagagaatgggccccctgagcgtggtgatcgtgaccgcccccctgccccccgcccccgccaccgaggccagcaagccccccctggagcccagactgggcgagctgaccgtgaccgacatcacccccgacagcgtgggcctgagctggaccgtgcccgagggcgagttcgacagcttcgtggtgcagtacaaggacagagacggccagccccaggtggtgcccgtggccgccgaccagagagaggtgaccatccccgacctggagcccagcagaaagtacaagttcctgctgttcggcatccaggacggcaagagaagaagccccgtgagcgtggaggccaagaccgtggccagaggcgacgccagccccggcgccccccccagactgggcgagctgtgggtgaccgaccccacccccgacagcctgagactgagctggaccgtgcccgagggccagttcgacagcttcgtggtgcagttcaaggacaaggacggcccccaggtggtgcccgtggagggccacgagagaagcgtgaccgtgacccccctggacgccggcagaaagtacagattcctgctgtacggcctgctgggcaagaagagacacggccccctgaccgccgacggcaccaccgaggccagaagcgccatggacgacaccggcaccaagagaccccccaagcccagactgggcgaggagctgcaggtgaccaccgtgacccagaacagcgtgggcctgagctggaccgtgcccgagggccagttcgacagcttcgtggtgcagtacaaggacagagacggccagccccaggtggtgcccgtggagggcagcctgagagaggtgagcgtgcccggcctggaccccgcccacagatacaagctgctgctgtacggcctgcaccacggcaagagagtgggccccatcagcgccgtggccatcaccgccggcagagaggagaccgagaccgagaccaccgcccccaccccccccgcccccgagccccacctgggcgagctgaccgtggaggaggccaccagccacaccctgcacctgagctggatggtgaccgagggcgagttcgacagcttcgagatccagtacaccgacagagacggccagctgcagatggtgagaatcggcggcgacagaaacgacatcaccctgagcggcctggagagcgaccacagatacctggtgaccctgtacggcttcagcgacggcaagcacgtgggccccgtgcacgtggaggccctgaccgtgcccgaggaggagaagcccagcgagccccccaccgccacccccgagccccccatcaagcccagactgggcgagctgaccgtgaccgacgccacccccgacagcctgagcctgagctggaccgtgcccgagggccagttcgaccacttcctggtgcagtacagaaacggcgacggccagcccaaggccgtgagagtgcccggccacgaggagggcgtgaccatcagcggcctggagcccgaccacaagtacaagatgaacctgtacggcttccacggcggccagagaatgggccccgtgagcgtggtgggcgtgaccgccgccgaggaggagacccccagccccaccgagcccagcatggaggcccccgagcccgccgaggagcccctgctgggcgagctgaccgtgaccggcagcagccccgacagcctgagcctgagctggaccgtgccccagggcagattcgacagcttcaccgtgcagtacaaggacagagacggcagaccccaggtggtgagagtgggcggcgaggagagcgaggtgaccgtgggcggcctggagcccggcagaaagtacaagatgcacctgtacggcctgcacgagggcagaagagtgggccccgtgagcgccgtgggcgtgaccgcccccgaggaggagagccccgacgcccccctggccaagctgagactgggccagatgaccgtgagagacatcaccagcgacagcctgagcctgagctggaccgtgcccgagggccagttcgaccacttcctggtgcagttcaagaacggcgacggccagcccaaggccgtgagagtgcccggccacgaggacggcgtgaccatcagcggcctggagcccgaccacaagtacaagatgaacctgtacggcttccacggcggccagagagtgggccccgtgagcgccgtgggcctgaccgcccccggcaaggacgaggagatggcccccgccagcaccgagccccccacccccgagccccccatcaagcccagactggaggagctgaccgtgaccgacgccacccccgacagcctgagcctgagctggaccgtgcccgagggccagttcgaccacttcctggtgcagtacaagaacggcgacggccagcccaaggccaccagagtgcccggccacgaggacagagtgaccatcagcggcctggagcccgacaacaagtacaagatgaacctgtacggcttccacggcggccagagagtgggccccgtgagcgccatcggcgtgaccgccgccgaggaggagacccccagccccaccgagcccagcatggaggcccccgagccccccgaggagcccctgctgggcgagctgaccgtgaccggcagcagccccgacagcctgagcctgagctggaccgtgccccagggcagattcgacagcttcaccgtgcagtacaaggacagagacggcagaccccaggtggtgagagtgggcggcgaggagagcgaggtgaccgtgggcggcctggagcccggcagaaagtacaagatgcacctgtacggcctgcacgagggcagaagagtgggccccgtgagcaccgtgggcgtgaccgccccccaggaggacgtggacgagacccccagccccaccgagcccggcaccgaggcccccgagccccccgaggagcccctgctgggcgagctgaccgtgaccggcagcagccccgacagcctgagcctgagctggaccgtgccccagggcagattcgacagcttcaccgtgcagtacaaggacagagacggcagaccccaggccgtgagagtgggcggccaggagagcaaggtgaccgtgagaggcctggagcccggcagaaagtacaagatgcacctgtacggcctgcacgagggcagaagactgggccccgtgagcgccgtgggcgtgaccgaggacgaggccgagaccacccaggccgtgcccaccatgacccccgagccccccatcaagcccagactgggcgagctgaccatgaccgacgccacccccgacagcctgagcctgagctggaccgtgcccgagggccagttcgaccacttcctggtgcagtacagaaacggcgacggccagcccaaggccgtgagagtgcccggccacgaggacggcgtgaccatcagcggcctggagcccgaccacaagtacaagatgaacctgtacggcttccacggcggccagagagtgggccccatcagcgtgatcggcgtgaccgccgccgaggaggagacccccagccccaccgagctgagcaccgaggcccccgagccccccgaggagcccctgctgggcgagctgaccgtgaccggcagcagccccgacagcctgagcctgagctggaccatcccccagggccacttcgacagcttcaccgtgcagtacaaggacagagacggcagaccccaggtgatgagagtgagaggcgaggagagcgaggtgaccgtgggcggcctggagcccggcagaaagtacaagatgcacctgtacggcctgcacgagggcagaagagtgggccccgtgagcaccgtgggcgtgaccgtgcccaccaccacccccgagccccccaacaagcccagactgggcgagctgaccgtgaccgacgccacccccgacagcctgagcctgagctggatggtgcccgagggccagttcgaccacttcctggtgcagtacagaaacggcgacggccagcccaaggtggtgagagtgcccggccacgaggacggcgtgaccatcagcggcctggagcccgaccacaagtacaagatgaacctgtacggcttccacggcggccagagagtgggccccatcagcgtgatcggcgtgaccgccgccgaggaggagacccccgcccccaccgagcccagcaccgaggcccccgagccccccgaggagcccctgctgggcgagctgaccgtgaccggcagcagccccgacagcctgagcctgagctggaccatcccccagggcagattcgacagcttcaccgtgcagtacaaggacagagacggcagaccccaggtggtgagagtgagaggcgaggagagcgaggtgaccgtgggcggcctggagcccggctgcaagtacaagatgcacctgtacggcctgcacgagggccagagagtgggccccgtgagcgccgtgggcgtgaccgtgcccaccatgacccccgagccccccatcaagcccagactgggcgagctgaccgtgaccgacgccacccccgacagcctgagcctgagctggatggtgcccgagggccagttcgaccacttcctggtgcagtacagaaacggcgacggccagcccaaggccgtgagagtgcccggccacgaggacggcgtgaccatcagcggcctggagcccgaccacaagtacaagatgaacctgtacggcttccacggcggccagagagtgggccccgtgagcgccatcggcgtgaccgaggaggagacccccagccccaccgagcccagcaccgaggcccccgaggcccccgaggagcccctgctgggcgagctgaccgtgaccggcagcagccccgacagcctgagcctgagctggaccatcccccagggcagattcgacagcttcaccgtgcagtacaaggacagagacggccagccccaggtggtgagagtgagaggcgaggagagcgaggtgaccgtgggcggcctggagcccggcagaaagtacaagatgcacctgtacggcctgcacgagggccagagagtgggccccgtgagcaccgtgggcatcaccgcccccctgcccacccccctgcccgtggagcccagactgggcgagctggccgtggccgccgtgaccagcgacagcgtgggcctgagctggaccgtggcccagggccccttcgacagcttcctggtgcagtacagagacgcccagggccagccccaggccgtgcccgtgagcggcgacctgagagccgtggccgtgagcggcctggaccccgccagaaagtacaagttcctgctgttcggcctgcagaacggcaagagacacggccccgtgcccgtggaggccagaaccgcccccgacaccaagcccagccccagactgggcgagctgaccgtgaccgacgccacccccgacagcgtgggcctgagctggaccgtgcccgagggcgagttcgacagcttcgtggtgcagtacaaggacaaggacggcagactgcaggtggtgcccgtggccgccaaccagagagaggtgaccgtgcagggcctggagcccagcagaaagtacagattcctgctgtacggcctgagcggcagaaagagactgggccccatcagcgccgacagcaccaccgcccccctggagaaggagctgcccccccacctgggcgagctgaccgtggccgaggagaccagcagcagcctgagactgagctggaccgtggcccagggccccttcgacagcttcgtggtgcagtacagagacaccgacggccagcccagagccgtgcccgtggccgccgaccagagaaccgtgaccgtggaggacctggagcccggcaagaagtacaagttcctgctgtacggcctgctgggcggcaagagactgggccccgtgagcgccctgggcatgaccgcccccgaggaggacacccccgcccccgagctggcccccgaggcccccgagccccccgaggagcccagactgggcgtgctgaccgtgaccgacaccacccccgacagcatgagactgagctggagcgtggcccagggccccttcgacagcttcgtggtgcagtacgaggacaccaacggccagccccaggccctgctggtggacggcgaccagagcaagatcctgatcagcggcctggagcccagcaccccctacagattcctgctgtacggcctgcacgagggcaagagactgggccccctgagcgccgagggcaccaccggcctggcccccgccggccagaccagcgaggagagcagacccagactgagccagctgagcgtgaccgacgtgaccaccagcagcctgagactgaactgggaggccccccccggcgccttcgacagcttcctgctgagattcggcgtgcccagccccagcaccctggagccccaccccagacccctgctgcagagagagctgatggtgcccggcaccagacacagcgccgtgctgagagacctgagaagcggcaccctgtacagcctgaccctgtacggcctgagaggcccccacaaggccgacagcatccagggcaccgccagaaccctgagccccgtgctggagagccccagagacctgcagttcagcgagatcagagagaccagcgccaaggtgaactggatgcccccccccagcagagccgacagcttcaaggtgagctaccagctggccgacggcggcgagccccagagcgtgcaggtggacggccaggccagaacccagaagctgcagggcctgatccccggcgccagatacgaggtgaccgtggtgagcgtgagaggcttcgaggagagcgagcccctgaccggcttcctgaccaccgtgcccgacggccccacccagctgagagccctgaacctgaccgagggcttcgccgtgctgcactggaagcccccccagaaccccgtggacacctacgacatccaggtgaccgcccccggcgccccccccctgcaggccgagacccccggcagcgccgtggactaccccctgcacgacctggtgctgcacaccaactacaccgccaccgtgagaggcctgagaggccccaacctgaccagccccgccagcatcaccttcaccaccggcctggaggcccccagagacctggaggccaaggaggtgacccccagaaccgccctgctgacctggaccgagccccccgtgagacccgccggctacctgctgagcttccacacccccggcggccagacccaggagatcctgctgcccggcggcatcaccagccaccagctgctgggcctgttccccagcaccagctacaacgccagactgcaggccacctggggccagagcctgctgccccccgtgagcaccagcttcaccaccggcggcctgagaatccccttccccagagactgcggcgaggagatgcagaacggcgccggcgccagcagaaccagcaccatcttcctgaacggcaacagagagagacccctgaacgtgttctgcgacatggagaccgacggcggcggctggctggtgttccagagaagaatggacggccagaccgacttctggagagactgggaggactacgcccacggcttcggcaacatcagcggcgagttctggctgggcaacgaggccctgcacagcctgacccaggccggcgactacagcatgagagtggacctgagagccggcgacgaggccgtgttcgcccagtacgacagcttccacgtggacagcgccgccgagtactacagactgcacctggagggctaccacggcaccgccggcgacagcatgagctaccacagcggcagcgtgttcagcgccagagacagagaccccaacagcctgctgatcagctgcgccgtgagctacagaggcgcctggtggtacagaaactgccactacgccaacctgaacggcctgtacggcagcaccgtggaccaccagggcgtgagctggtaccactggaagggcttcgagttcagcgtgcccttcaccgagatgaagctgagacccagaaacttcagaagccccgccggcggcggctag

SEQ ID NO: 201475 - DNA, 6843 bp, Artificial Sequence
  derived and/or modified sequence
atgatgcccgcccagtacgccctgaccagcagcctggtgctgctggtgctgctgagcaccgccagagccggccccttcagcagcagaagcaacgtgaccctgcccgcccccagaccccccccccagcccggcggccacaccgtgggcgccggcgtgggcagccccagcagccagctgtacgagcacaccgtggagggcggcgagaagcaggtggtgttcacccacagaatcaacctgccccccagcaccggctgcggctgcccccccggcaccgagccccccgtgctggccagcgaggtgcaggccctgagagtgagactggagatcctggaggagctggtgaagggcctgaaggagcagtgcaccggcggctgctgccccgccagcgcccaggccggcaccggccagaccgacgtgagaaccctgtgcagcctgcacggcgtgttcgacctgagcagatgcacctgcagctgcgagcccggctggggcggccccacctgcagcgaccccaccgacgccgagatcccccccagcagcccccccagcgccagcggcagctgccccgacgactgcaacgaccagggcagatgcgtgagaggcagatgcgtgtgcttccccggctacaccggccccagctgcggctggcccagctgccccggcgactgccagggcagaggcagatgcgtgcagggcgtgtgcgtgtgcagagccggcttcagcggccccgactgcagccagagaagctgccccagaggctgcagccagagaggcagatgcgagggcggcagatgcgtgtgcgaccccggctacaccggcgacgactgcggcatgagaagctgccccagaggctgcagccagagaggcagatgcgagaacggcagatgcgtgtgcaaccccggctacaccggcgaggactgcggcgtgagaagctgccccagaggctgcagccagagaggcagatgcaaggacggcagatgcgtgtgcgaccccggctacaccggcgaggactgcggcaccagaagctgcccctgggactgcggcgagggcggcagatgcgtggacggcagatgcgtgtgctggcccggctacaccggcgaggactgcagcaccagaacctgccccagagactgcagaggcagaggcagatgcgaggacggcgagtgcatctgcgacaccggctacagcggcgacgactgcggcgtgagaagctgccccggcgactgcaaccagagaggcagatgcgaggacggcagatgcgtgtgctggcccggctacaccggcaccgactgcggcagcagagcctgccccagagactgcagaggcagaggcagatgcgagaacggcgtgtgcgtgtgcaacgccggctacagcggcgaggactgcggcgtgagaagctgccccggcgactgcagaggcagaggcagatgcgagagcggcagatgcatgtgctggcccggctacaccggcagagactgcggcaccagagcctgccccggcgactgcagaggcagaggcagatgcgtggacggcagatgcgtgtgcaaccccggcttcaccggcgaggactgcggcagcagaagatgccccggcgactgcagaggccacggcctgtgcgaggacggcgtgtgcgtgtgcgacgccggctacagcggcgaggactgcagcaccagaagctgccccggcggctgcagaggcagaggccagtgcctggacggcagatgcgtgtgcgaggacggctacagcggcgaggactgcggcgtgagacagtgccccaacgactgcagccagcacggcgtgtgccaggacggcgtgtgcatctgctgggagggctacgtgagcgaggactgcagcatcagaacctgccccagcaactgccacggcagaggcagatgcgaggagggcagatgcctgtgcgaccccggctacaccggccccacctgcgccaccagaatgtgccccgccgactgcagaggcagaggcagatgcgtgcagggcgtgtgcctgtgccacgtgggctacggcggcgaggactgcggccaggaggagccccccgccagcgcctgccccggcggctgcggccccagagagctgtgcagagccggccagtgcgtgtgcgtggagggcttcagaggccccgactgcgccatccagacctgccccggcgactgcagaggcagaggcgagtgccacgacggcagctgcgtgtgcaaggacggctacgccggcgaggactgcggcgaggaggtgcccaccatcgagggcatgagaatgcacctgctggaggagaccaccgtgagaaccgagtggacccccgcccccggccccgtggacgcctacgagatccagttcatccccaccaccgagggcgccagcccccccttcaccgccagagtgcccagcagcgccagcgcctacgaccagagaggcctggcccccggccaggagtaccaggtgaccgtgagagccctgagaggcaccagctggggcctgcccgccagcaagaccatcaccaccatgatcgacggcccccaggacctgagagtggtggccgtgacccccaccaccctggagctgggctggctgagaccccaggccgaggtggacagattcgtggtgagctacgtgagcgccggcaaccagagagtgagactggaggtgccccccgaggccgacggcaccctgctgaccgacctgatgcccggcgtggagtacgtggtgaccgtgaccgccgagagaggcagagccgtgagctaccccgccagcgtgagagccaacaccggcagcagccccctgggcctgctgggcaccaccgacgagcccccccccagcggccccagcaccacccagggcgcccaggcccccctgctgcagcagagaccccaggagctgggcgagctgagagtgctgggcagagacgagaccggcagactgagagtggtgtggaccgcccagcccgacaccttcgcctacttccagctgagaatgagagtgcccgagggccccggcgcccacgaggaggtgctgcccggcgacgtgagacaggccctggtgcccccccccccccccggcaccccctacgagctgagcctgcacggcgtgccccccggcggcaagcccagcgaccccatcatctaccagggcatcatggacaaggacgaggagaagcccggcaagagcagcggcccccccagactgggcgagctgaccgtgaccgacagaaccagcgacagcctgctgctgagatggaccgtgcccgagggcgagttcgacagcttcgtgatccagtacaaggacagagacggccagccccaggtggtgcccgtggagggcccccagagaagcgccgtgatcaccagcctggaccccggcagaaagtacaagttcgtgctgtacggcttcgtgggcaagaagagacacggccccctggtggccgaggccaagatcctgccccagagcgaccccagccccggcacccccccccacctgggcaacctgtgggtgaccgaccccacccccgacagcctgcacctgagctggaccgtgcccgagggccagttcgacaccttcatggtgcagtacagagacagagacggcagaccccaggtggtgcccgtggagggccccgagagaagcttcgtggtgagcagcctggaccccgaccacaagtacagattcaccctgttcggcatcgccaacaagaagagatacggccccctgaccgccgacggcaccaccgcccccgagagaaaggaggagccccccagacccgagttcctggagcagcccctgctgggcgagctgaccgtgaccggcgtgacccccgacagcctgagactgagctggaccgtggcccagggccccttcgacagcttcatggtgcagtacaaggacgcccagggccagccccaggccgtgcccgtggccggcgacgagaacgaggtgaccgtgcccggcctggaccccgacagaaagtacaagatgaacctgtacggcctgagaggcagacagagagtgggccccgagagcgtggtggccaagaccgccccccaggaggacgtggacgagacccccagccccaccgagctgggcaccgaggcccccgagagccccgaggagcccctgctgggcgagctgaccgtgaccggcagcagccccgacagcctgagcctgttctggaccgtgccccagggcagcttcgacagcttcaccgtgcagtacaaggacagagacggcagacccagagccgtgagagtgggcggcaaggagagcgaggtgaccgtgggcggcctggagcccggccacaagtacaagatgcacctgtacggcctgcacgagggccagagagtgggccccgtgagcgccgtgggcgtgaccgccccccagcaggaggagaccccccccgccaccgagagccccctggagcccagactgggcgagctgaccgtgaccgacgtgacccccaacagcgtgggcctgagctggaccgtgcccgagggccagttcgacagcttcatcgtgcagtacaaggacaaggacggccagccccaggtggtgcccgtggccgccgaccagagagaggtgaccgtgtacaacctggagcccgagagaaagtacaagatgaacatgtacggcctgcacgacggccagagaatgggccccctgagcgtggtgatcgtgaccgcccccctgccccccgcccccgccaccgaggccagcaagccccccctggagcccagactgggcgagctgaccgtgaccgacatcacccccgacagcgtgggcctgagctggaccgtgcccgagggcgagttcgacagcttcgtggtgcagtacaaggacagagacggccagccccaggtggtgcccgtggccgccgaccagagagaggtgaccatccccgacctggagcccagcagaaagtacaagttcctgctgttcggcatccaggacggcaagagaagaagccccgtgagcgtggaggccaagaccgtggccagaggcgacgccagccccggcgccccccccagactgggcgagctgtgggtgaccgaccccacccccgacagcctgagactgagctggaccgtgcccgagggccagttcgacagcttcgtggtgcagttcaaggacaaggacggcccccaggtggtgcccgtggagggccacgagagaagcgtgaccgtgacccccctggacgccggcagaaagtacagattcctgctgtacggcctgctgggcaagaagagacacggccccctgaccgccgacggcaccaccgaggccagaagcgccatggacgacaccggcaccaagagaccccccaagcccagactgggcgaggagctgcaggtgaccaccgtgacccagaacagcgtgggcctgagctggaccgtgcccgagggccagttcgacagcttcgtggtgcagtacaaggacagagacggccagccccaggtggtgcccgtggagggcagcctgagagaggtgagcgtgcccggcctggaccccgcccacagatacaagctgctgctgtacggcctgcaccacggcaagagagtgggccccatcagcgccgtggccatcaccgccggcagagaggagaccgagaccgagaccaccgcccccaccccccccgcccccgagccccacctgggcgagctgaccgtggaggaggccaccagccacaccctgcacctgagctggatggtgaccgagggcgagttcgacagcttcgagatccagtacaccgacagagacggccagctgcagatggtgagaatcggcggcgacagaaacgacatcaccctgagcggcctggagagcgaccacagatacctggtgaccctgtacggcttcagcgacggcaagcacgtgggccccgtgcacgtggaggccctgaccgtgcccgaggaggagaagcccagcgagccccccaccgccacccccgagccccccatcaagcccagactgggcgagctgaccgtgaccgacgccacccccgacagcctgagcctgagctggaccgtgcccgagggccagttcgaccacttcctggtgcagtacagaaacggcgacggccagcccaaggccgtgagagtgcccggccacgaggagggcgtgaccatcagcggcctggagcccgaccacaagtacaagatgaacctgtacggcttccacggcggccagagaatgggccccgtgagcgtggtgggcgtgaccgccgccgaggaggagacccccagccccaccgagcccagcatggaggcccccgagcccgccgaggagcccctgctgggcgagctgaccgtgaccggcagcagccccgacagcctgagcctgagctggaccgtgccccagggcagattcgacagcttcaccgtgcagtacaaggacagagacggcagaccccaggtggtgagagtgggcggcgaggagagcgaggtgaccgtgggcggcctggagcccggcagaaagtacaagatgcacctgtacggcctgcacgagggcagaagagtgggccccgtgagcgccgtgggcgtgaccgcccccgaggaggagagccccgacgcccccctggccaagctgagactgggccagatgaccgtgagagacatcaccagcgacagcctgagcctgagctggaccgtgcccgagggccagttcgaccacttcctggtgcagttcaagaacggcgacggccagcccaaggccgtgagagtgcccggccacgaggacggcgtgaccatcagcggcctggagcccgaccacaagtacaagatgaacctgtacggcttccacggcggccagagagtgggccccgtgagcgccgtgggcctgacctag

SEQ ID NO: 201476 - DNA, 654 bp, Artificial Sequence
  derived and/or modified sequence
gcccccggcaaggacgaggagatggcccccgccagcaccgagccccccacccccgagccccccatcaagcccagactggaggagctgaccgtgaccgacgccacccccgacagcctgagcctgagctggaccgtgcccgagggccagttcgaccacttcctggtgcagtacaagaacggcgacggccagcccaaggccaccagagtgcccggccacgaggacagagtgaccatcagcggcctggagcccgacaacaagtacaagatgaacctgtacggcttccacggcggccagagagtgggccccgtgagcgccatcggcgtgaccgccgccgaggaggagacccccagccccaccgagcccagcatggaggcccccgagccccccgaggagcccctgctgggcgagctgaccgtgaccggcagcagccccgacagcctgagcctgagctggaccgtgccccagggcagattcgacagcttcaccgtgcagtacaaggacagagacggcagaccccaggtggtgagagtgggcggcgaggagagcgaggtgaccgtgggcggcctggagcccggcagaaagtacaagatgcacctgtacggcctgcacgagggcagaagagtgggccccgtgagcaccgtgggcgtgacctag

SEQ ID NO: 201477 - DNA, 12729 bp, Artificial Sequence
  derived and/or modified sequence
atgatgcccgcccagtacgccctgaccagcagcctggtgctgctggtgctgctgagcaccgccagagccggccccttcagcagcagaagcaacgtgaccctgcccgcccccagaccccccccccagcccggcggccacaccgtgggcgccggcgtgggcagccccagcagccagctgtacgagcacaccgtggagggcggcgagaagcaggtggtgttcacccacagaatcaacctgccccccagcaccggctgcggctgcccccccggcaccgagccccccgtgctggccagcgaggtgcaggccctgagagtgagactggagatcctggaggagctggtgaagggcctgaaggagcagtgcaccggcggctgctgccccgccagcgcccaggccggcaccggccagaccgacgtgagaaccctgtgcagcctgcacggcgtgttcgacctgagcagatgcacctgcagctgcgagcccggctggggcggccccacctgcagcgaccccaccgacgccgagatcccccccagcagcccccccagcgccagcggcagctgccccgacgactgcaacgaccagggcagatgcgtgagaggcagatgcgtgtgcttccccggctacaccggccccagctgcggctggcccagctgccccggcgactgccagggcagaggcagatgcgtgcagggcgtgtgcgtgtgcagagccggcttcagcggccccgactgcagccagagaagctgccccagaggctgcagccagagaggcagatgcgagggcggcagatgcgtgtgcgaccccggctacaccggcgacgactgcggcatgagaagctgccccagaggctgcagccagagaggcagatgcgagaacggcagatgcgtgtgcaaccccggctacaccggcgaggactgcggcgtgagaagctgccccagaggctgcagccagagaggcagatgcaaggacggcagatgcgtgtgcgaccccggctacaccggcgaggactgcggcaccagaagctgcccctgggactgcggcgagggcggcagatgcgtggacggcagatgcgtgtgctggcccggctacaccggcgaggactgcagcaccagaacctgccccagagactgcagaggcagaggcagatgcgaggacggcgagtgcatctgcgacaccggctacagcggcgacgactgcggcgtgagaagctgccccggcgactgcaaccagagaggcagatgcgaggacggcagatgcgtgtgctggcccggctacaccggcaccgactgcggcagcagagcctgccccagagactgcagaggcagaggcagatgcgagaacggcgtgtgcgtgtgcaacgccggctacagcggcgaggactgcggcgtgagaagctgccccggcgactgcagaggcagaggcagatgcgagagcggcagatgcatgtgctggcccggctacaccggcagagactgcggcaccagagcctgccccggcgactgcagaggcagaggcagatgcgtggacggcagatgcgtgtgcaaccccggcttcaccggcgaggactgcggcagcagaagatgccccggcgactgcagaggccacggcctgtgcgaggacggcgtgtgcgtgtgcgacgccggctacagcggcgaggactgcagcaccagaagctgccccggcggctgcagaggcagaggccagtgcctggacggcagatgcgtgtgcgaggacggctacagcggcgaggactgcggcgtgagacagtgccccaacgactgcagccagcacggcgtgtgccaggacggcgtgtgcatctgctgggagggctacgtgagcgaggactgcagcatcagaacctgccccagcaactgccacggcagaggcagatgcgaggagggcagatgcctgtgcgaccccggctacaccggccccacctgcgccaccagaatgtgccccgccgactgcagaggcagaggcagatgcgtgcagggcgtgtgcctgtgccacgtgggctacggcggcgaggactgcggccaggaggagccccccgccagcgcctgccccggcggctgcggccccagagagctgtgcagagccggccagtgcgtgtgcgtggagggcttcagaggccccgactgcgccatccagacctgccccggcgactgcagaggcagaggcgagtgccacgacggcagctgcgtgtgcaaggacggctacgccggcgaggactgcggcgaggaggtgcccaccatcgagggcatgagaatgcacctgctggaggagaccaccgtgagaaccgagtggacccccgcccccggccccgtggacgcctacgagatccagttcatccccaccaccgagggcgccagcccccccttcaccgccagagtgcccagcagcgccagcgcctacgaccagagaggcctggcccccggccaggagtaccaggtgaccgtgagagccctgagaggcaccagctggggcctgcccgccagcaagaccatcaccaccatgatcgacggcccccaggacctgagagtggtggccgtgacccccaccaccctggagctgggctggctgagaccccaggccgaggtggacagattcgtggtgagctacgtgagcgccggcaaccagagagtgagactggaggtgccccccgaggccgacggcaccctgctgaccgacctgatgcccggcgtggagtacgtggtgaccgtgaccgccgagagaggcagagccgtgagctaccccgccagcgtgagagccaacaccggcagcagccccctgggcctgctgggcaccaccgacgagcccccccccagcggccccagcaccacccagggcgcccaggcccccctgctgcagcagagaccccaggagctgggcgagctgagagtgctgggcagagacgagaccggcagactgagagtggtgtggaccgcccagcccgacaccttcgcctacttccagctgagaatgagagtgcccgagggccccggcgcccacgaggaggtgctgcccggcgacgtgagacaggccctggtgcccccccccccccccggcaccccctacgagctgagcctgcacggcgtgccccccggcggcaagcccagcgaccccatcatctaccagggcatcatggacaaggacgaggagaagcccggcaagagcagcggcccccccagactgggcgagctgaccgtgaccgacagaaccagcgacagcctgctgctgagatggaccgtgcccgagggcgagttcgacagcttcgtgatccagtacaaggacagagacggccagccccaggtggtgcccgtggagggcccccagagaagcgccgtgatcaccagcctggaccccggcagaaagtacaagttcgtgctgtacggcttcgtgggcaagaagagacacggccccctggtggccgaggccaagatcctgccccagagcgaccccagccccggcaccccccccagactgggcaacctgtgggtgaccgaccccacccccgacagcctgcacctgagctggaccgtgcccgagggccagttcgacaccttcatggtgcagtacagagacagagacggcagaccccaggtggtgcccgtggagggccccgagagaagcttcgtggtgagcagcctggaccccgaccacaagtacagattcaccctgttcggcatcgccaacaagaagagatacggccccctgaccgccgacggcaccaccgcccccgagagaaaggaggagccccccagacccgagttcctggagcagcccctgctgggcgagctgaccgtgaccggcgtgacccccgacagcctgagactgagctggaccgtggcccagggccccttcgacagcttcatggtgcagtacaaggacgcccagggccagccccaggccgtgcccgtggccggcgacgagaacgaggtgaccgtgcccggcctggaccccgacagaaagtacaagatgaacctgtacggcctgagaggcagacagagagtgggccccgagagcgtggtggccaagaccgccccccaggaggacgtggacgagacccccagccccaccgagctgggcaccgaggcccccgagagccccgaggagcccctgctgggcgagctgaccgtgaccggcagcagccccgacagcctgagcctgttctggaccgtgccccagggcagcttcgacagcttcaccgtgcagtacaaggacagagacggcagacccagagccgtgagagtgggcggcaaggagagcgaggtgaccgtgggcggcctggagcccggccacaagtacaagatgcacctgtacggcctgcacgagggccagagagtgggccccgtgagcgccgtgggcgtgaccgccccccagcaggaggagaccccccccgccaccgagagccccctggagcccagactgggcgagctgaccgtgaccgacgtgacccccaacagcgtgggcctgagctggaccgtgcccgagggccagttcgacagcttcatcgtgcagtacaaggacaaggacggccagccccaggtggtgcccgtggccgccgaccagagagaggtgaccgtgtacaacctggagcccgagagaaagtacaagatgaacatgtacggcctgcacgacggccagagaatgggccccctgagcgtggtgatcgtgaccgcccccctgccccccgcccccgccaccgaggccagcaagccccccctggagcccagactgggcgagctgaccgtgaccgacatcacccccgacagcgtgggcctgagctggaccgtgcccgagggcgagttcgacagcttcgtggtgcagtacaaggacagagacggccagccccaggtggtgcccgtggccgccgaccagagagaggtgaccatccccgacctggagcccagcagaaagtacaagttcctgctgttcggcatccaggacggcaagagaagaagccccgtgagcgtggaggccaagaccgtggccagaggcgacgccagccccggcgccccccccagactgggcgagctgtgggtgaccgaccccacccccgacagcctgagactgagctggaccgtgcccgagggccagttcgacagcttcgtggtgcagttcaaggacaaggacggcccccaggtggtgcccgtggagggccacgagagaagcgtgaccgtgacccccctggacgccggcagaaagtacagattcctgctgtacggcctgctgggcaagaagagacacggccccctgaccgccgacggcaccaccgaggccagaagcgccatggacgacaccggcaccaagagaccccccaagcccagactgggcgaggagctgcaggtgaccaccgtgacccagaacagcgtgggcctgagctggaccgtgcccgagggccagttcgacagcttcgtggtgcagtacaaggacagagacggccagccccaggtggtgcccgtggagggcagcctgagagaggtgagcgtgcccggcctggaccccgcccacagatacaagctgctgctgtacggcctgcaccacggcaagagagtgggccccatcagcgccgtggccatcaccgccggcagagaggagaccgagaccgagaccaccgcccccaccccccccgcccccgagccccacctgggcgagctgaccgtggaggaggccaccagccacaccctgcacctgagctggatggtgaccgagggcgagttcgacagcttcgagatccagtacaccgacagagacggccagctgcagatggtgagaatcggcggcgacagaaacgacatcaccctgagcggcctggagagcgaccacagatacctggtgaccctgtacggcttcagcgacggcaagcacgtgggccccgtgcacgtggaggccctgaccgtgcccgaggaggagaagcccagcgagccccccaccgccacccccgagccccccatcaagcccagactgggcgagctgaccgtgaccgacgccacccccgacagcctgagcctgagctggaccgtgcccgagggccagttcgaccacttcctggtgcagtacagaaacggcgacggccagcccaaggccgtgagagtgcccggccacgaggagggcgtgaccatcagcggcctggagcccgaccacaagtacaagatgaacctgtacggcttccacggcggccagagaatgggccccgtgagcgtggtgggcgtgaccgccgccgaggaggagacccccagccccaccgagcccagcatggaggcccccgagcccgccgaggagcccctgctgggcgagctgaccgtgaccggcagcagccccgacagcctgagcctgagctggaccgtgccccagggcagattcgacagcttcaccgtgcagtacaaggacagagacggcagaccccaggtggtgagagtgggcggcgaggagagcgaggtgaccgtgggcggcctggagcccggcagaaagtacaagatgcacctgtacggcctgcacgagggcagaagagtgggccccgtgagcgccgtgggcgtgaccgcccccgaggaggagagccccgacgcccccctggccaagctgagactgggccagatgaccgtgagagacatcaccagcgacagcctgagcctgagctggaccgtgcccgagggccagttcgaccacttcctggtgcagttcaagaacggcgacggccagcccaaggccgtgagagtgcccggccacgaggacggcgtgaccatcagcggcctggagcccgaccacaagtacaagatgaacctgtacggcttccacggcggccagagagtgggccccgtgagcgccgtgggcctgaccgcccccggcaaggacgaggagatggcccccgccagcaccgagccccccacccccgagccccccatcaagcccagactggaggagctgaccgtgaccgacgccacccccgacagcctgagcctgagctggaccgtgcccgagggccagttcgaccacttcctggtgcagtacaagaacggcgacggccagcccaaggccaccagagtgcccggccacgaggacagagtgaccatcagcggcctggagcccgacaacaagtacaagatgaacctgtacggcttccacggcggccagagagtgggccccgtgagcgccatcggcgtgaccgccgccgaggaggagacccccagccccaccgagcccagcatggaggcccccgagccccccgaggagcccctgctgggcgagctgaccgtgaccggcagcagccccgacagcctgagcctgagctggaccgtgccccagggcagattcgacagcttcaccgtgcagtacaaggacagagacggcagaccccaggtggtgagagtgggcggcgaggagagcgaggtgaccgtgggcggcctggagcccggcagaaagtacaagatgcacctgtacggcctgcacgagggcagaagagtgggccccgtgagcaccgtgggcgtgaccgccccccaggaggacgtggacgagacccccagccccaccgagcccggcaccgaggcccccgagccccccgaggagcccctgctgggcgagctgaccgtgaccggcagcagccccgacagcctgagcctgagctggaccgtgccccagggcagattcgacagcttcaccgtgcagtacaaggacagagacggcagaccccaggccgtgagagtgggcggccaggagagcaaggtgaccgtgagaggcctggagcccggcagaaagtacaagatgcacctgtacggcctgcacgagggcagaagactgggccccgtgagcgccgtgggcgtgaccgaggacgaggccgagaccacccaggccgtgcccaccatgacccccgagccccccatcaagcccagactgggcgagctgaccatgaccgacgccacccccgacagcctgagcctgagctggaccgtgcccgagggccagttcgaccacttcctggtgcagtacagaaacggcgacggccagcccaaggccgtgagagtgcccggccacgaggacggcgtgaccatcagcggcctggagcccgaccacaagtacaagatgaacctgtacggcttccacggcggccagagagtgggccccatcagcgtgatcggcgtgaccgccgccgaggaggagacccccagccccaccgagctgagcaccgaggcccccgagccccccgaggagcccctgctgggcgagctgaccgtgaccggcagcagccccgacagcctgagcctgagctggaccatcccccagggccacttcgacagcttcaccgtgcagtacaaggacagagacggcagaccccaggtgatgagagtgagaggcgaggagagcgaggtgaccgtgggcggcctggagcccggcagaaagtacaagatgcacctgtacggcctgcacgagggcagaagagtgggccccgtgagcaccgtgggcgtgaccgaggacgaggccgagaccacccaggccgtgcccaccaccacccccgagccccccaacaagcccagactgggcgagctgaccgtgaccgacgccacccccgacagcctgagcctgagctggatggtgcccgagggccagttcgaccacttcctggtgcagtacagaaacggcgacggccagcccaaggtggtgagagtgcccggccacgaggacggcgtgaccatcagcggcctggagcccgaccacaagtacaagatgaacctgtacggcttccacggcggccagagagtgggccccatcagcgtgatcggcgtgaccgccgccgaggaggagacccccgcccccaccgagcccagcaccgaggcccccgagccccccgaggagcccctgctgggcgagctgaccgtgaccggcagcagccccgacagcctgagcctgagctggaccatcccccagggcagattcgacagcttcaccgtgcagtacaaggacagagacggcagaccccaggtggtgagagtgagaggcgaggagagcgaggtgaccgtgggcggcctggagcccggctgcaagtacaagatgcacctgtacggcctgcacgagggccagagagtgggccccgtgagcgccgtgggcgtgaccgcccccaaggacgaggccgagaccacccaggccgtgcccaccatgacccccgagccccccatcaagcccagactgggcgagctgaccgtgaccgacgccacccccgacagcctgagcctgagctggatggtgcccgagggccagttcgaccacttcctggtgcagtacagaaacggcgacggccagcccaaggccgtgagagtgcccggccacgaggacggcgtgaccatcagcggcctggagcccgaccacaagtacaagatgaacctgtacggcttccacggcggccagagagtgggccccgtgagcgccatcggcgtgaccgaggaggagacccccagccccaccgagcccagcaccgaggcccccgaggcccccgaggagcccctgctgggcgagctgaccgtgaccggcagcagccccgacagcctgagcctgagctggaccgtgccccagggcagattcgacagcttcaccgtgcagtacaaggacagagacggccagccccaggtggtgagagtgagaggcgaggagagcgaggtgaccgtgggcggcctggagcccggcagaaagtacaagatgcacctgtacggcctgcacgagggccagagagtgggccccgtgagcaccgtgggcatcaccgcccccctgcccacccccctgcccgtggagcccagactgggcgagctggccgtggccgccgtgaccagcgacagcgtgggcctgagctggaccgtggcccagggccccttcgacagcttcctggtgcagtacagagacgcccagggccagccccaggccgtgcccgtgagcggcgacctgagagccgtggccgtgagcggcctggaccccgccagaaagtacaagttcctgctgttcggcctgcagaacggcaagagacacggccccgtgcccgtggaggccagaaccgcccccgacaccaagcccagccccagactgggcgagctgaccgtgaccgacgccacccccgacagcgtgggcctgagctggaccgtgcccgagggcgagttcgacagcttcgtggtgcagtacaaggacaaggacggcagactgcaggtggtgcccgtggccgccaaccagagagaggtgaccgtgcagggcctggagcccagcagaaagtacagattcctgctgtacggcctgagcggcagaaagagactgggccccatcagcgccgacagcaccaccgcccccctggagaaggagctgcccccccacctgggcgagctgaccgtggccgaggagaccagcagcagcctgagactgagctggaccgtggcccagggccccttcgacagcttcgtggtgcagtacagagacaccgacggccagcccagagccgtgcccgtggccgccgaccagagaaccgtgaccgtggaggacctggagcccggcaagaagtacaagttcctgctgtacggcctgctgggcggcaagagactgggccccgtgagcgccctgggcatgaccgcccccgaggaggacacccccgcccccgagctggcccccgaggcccccgagccccccgaggagcccagactgggcgtgctgaccgtgaccgacaccacccccgacagcatgagactgagctggagcgtggcccagggccccttcgacagcttcgtggtgcagtacgaggacaccaacggccagccccaggccctgctggtggacggcgaccagagcaagatcctgatcagcggcctggagcccagcaccccctacagattcctgctgtacggcctgcacgagggcaagagactgggccccctgagcgccgagggcaccaccggcctggcccccgccggccagaccagcgaggagagcagacccagactgagccagctgagcgtgaccgacgtgaccaccagcagcctgagactgaactgggaggccccccccggcgccttcgacagcttcctgctgagattcggcgtgcccagccccagcaccctggagccccaccccagacccctgctgcagagagagctgatggtgcccggcaccagacacagcgccgtgctgagagacctgagaagcggcaccctgtacagcctgaccctgtacggcctgagaggcccccacaaggccgacagcatccagggcaccgccagaaccctgagccccgtgctggagagccccagagacctgcagttcagcgagatcagagagaccagcgccaaggtgaactggatgcccccccccagcagagccgacagcttcaaggtgagctaccagctggccgacggcggcgagccccagagcgtgcaggtggacggccaggccagaacccagaagctgcagggcctgatccccggcgccagatacgaggtgaccgtggtgagcgtgagaggcttcgaggagagcgagcccctgaccggcttcctgaccaccgtgcccgacggccccacccagctgagagccctgaacctgaccgagggcttcgccgtgctgcactggaagcccccccagaaccccgtggacacctacgacatccaggtgaccgcccccggcgccccccccctgcaggccgagacccccggcagcgccgtggactaccccctgcacgacctggtgctgcacaccaactacaccgccaccgtgagaggcctgagaggccccaacctgaccagccccgccagcatcaccttcaccaccggcctggaggcccccagagacctggaggccaaggaggtgacccccagaaccgccctgctgacctggaccgagccccccgtgagacccgccggctacctgctgagcttccacacccccggcggccagacccaggagatcctgctgcccggcggcatcaccagccaccagctgctgggcctgttccccagcaccagctacaacgccagactgcaggccatgtggggccagagcctgctgccccccgtgagcaccagcttcaccaccggcggcctgagaatccccttccccagagactgcggcgaggagatgcagaacggcgccggcgccagcagaaccagcaccatcttcctgaacggcaacagagagagacccctgatcgtgttctgcgacatggagaccgacggcggcggctggctggtgttccagagaagaatggacggccagaccgacttctggagagactgggaggactacgcccacggcttcggcaacatcagcggcgagttctggctgggcaacgaggccctgcacagcctgacccaggccggcgactacagcatgagagtggacctgagagccggcgacgaggccgtgttcgcccagtacgacagcttccacgtggacagcgccgccgagtactacagactgcacctggagggctaccacggcaccgccggcgacagcatgagctaccacagcggcagcgtgttcagcgccagagacagagaccccaacagcctgctgatcagctgcgccgtgagctacagaggcgcctggtggtacagaaactgccactacgccaacctgaacggcctgtacggcagcaccgtggaccaccagggcgtgagctggtaccactggaagggcttcgagttcagcgtgcccttcaccgagatgaagctgagacccagaaacttcagaagccccgccggcggcggctag

SEQ ID NO: 201478 - DNA, 12729 bp, Artificial Sequence
  derived and/or modified sequence
atgatgcccgcccagtacgccctgaccagcagcctggtgctgctggtgctgctgagcaccgccagagccggccccttcagcagcagaagcaacgtgaccctgcccgcccccagaccccccccccagcccggcggccacaccgtgggcgccggcgtgggcagccccagcagccagctgtacgagcacaccgtggagggcggcgagaagcaggtggtgttcacccacagaatcaacctgccccccagcaccggctgcggctgcccccccggcaccgagccccccgtgctggccagcgaggtgcaggccctgagagtgagactggagatcctggaggagctggtgaagggcctgaaggagcagtgcaccggcggctgctgccccgccagcgcccaggccggcaccggccagaccgacgtgagaaccctgtgcagcctgcacggcgtgttcgacctgagcagatgcacctgcagctgcgagcccggctggggcggccccacctgcagcgaccccaccgacgccgagatcccccccagcagcccccccagcgccagcggcagctgccccgacgactgcaacgaccagggcagatgcgtgagaggcagatgcgtgtgcttccccggctacaccggccccagctgcggctggcccagctgccccggcgactgccagggcagaggcagatgcgtgcagggcgtgtgcgtgtgcagagccggcttcagcggccccgactgcagccagagaagctgccccagaggctgcagccagagaggcagatgcgagggcggcagatgcgtgtgcgaccccggctacaccggcgacgactgcggcatgagaagctgccccagaggctgcagccagagaggcagatgcgagaacggcagatgcgtgtgcaaccccggctacgccggcgaggactgcggcgtgagaagctgccccagaggctgcagccagagaggcagatgcaaggacggcagatgcgtgtgcgaccccggctacaccggcgaggactgcggcaccagaagctgcccctgggactgcggcgagggcggcagatgcgtggacggcagatgcgtgtgctggcccggctacaccggcgaggactgcagcaccagaacctgccccagagactgcagaggcagaggcagatgcgaggacggcgagtgcatctgcgacaccggctacagcggcgacgactgcggcgtgagaagctgccccggcgactgcaaccagagaggcagatgcgaggacggcagatgcgtgtgctggcccggctacaccggcaccgactgcggcagcagagcctgccccagagactgcagaggcagaggcagatgcgagaacggcgtgtgcgtgtgcaacgccggctacagcggcgaggactgcggcgtgagaagctgccccggcgactgcagaggcagaggcagatgcgagagcggcagatgcatgtgctggcccggctacaccggcagagactgcggcaccagagcctgccccggcgactgcagaggcagaggcagatgcgtggacggcagatgcgtgtgcaaccccggcttcaccggcgaggactgcggcagcagaagatgccccggcgactgcagaggccacggcctgtgcgaggacggcgtgtgcgtgtgcgacgccggctacagcggcgaggactgcagcaccagaagctgccccggcggctgcagaggcagaggccagtgcctggacggcagatgcgtgtgcgaggacggctacagcggcgaggactgcggcgtgagacagtgccccaacgactgcagccagcacggcgtgtgccaggacggcgtgtgcatctgctgggagggctacgtgagcgaggactgcagcatcagaacctgccccagcaactgccacggcagaggcagatgcgaggagggcagatgcctgtgcgaccccggctacaccggccccacctgcgccaccagaatgtgccccgccgactgcagaggcagaggcagatgcgtgcagggcgtgtgcctgtgccacgtgggctacggcggcgaggactgcggccaggaggagccccccgccagcgcctgccccggcggctgcggccccagagagctgtgcagagccggccagtgcgtgtgcgtggagggcttcagaggccccgactgcgccatccagacctgccccggcgactgcagaggcagaggcgagtgccacgacggcagctgcgtgtgcaaggacggctacgccggcgaggactgcggcgaggaggtgcccaccatcgagggcatgagaatgcacctgctggaggagaccaccgtgagaaccgagtggacccccgcccccggccccgtggacgcctacgagatccagttcatccccaccaccgagggcgccagcccccccttcaccgccagagtgcccagcagcgccagcgcctacgaccagagaggcctggcccccggccaggagtaccaggtgaccgtgagagccctgagaggcaccagctggggcctgcccgccagcaagaccatcaccaccatgatcgacggcccccaggacctgagagtggtggccgtgacccccaccaccctggagctgggctggctgagaccccaggccgaggtggacagattcgtggtgagctacgtgagcgccggcaaccagagagtgagactggaggtgccccccgaggccgacggcaccctgctgaccgacctgatgcccggcgtggagtacgtggtgaccgtgaccgccgagagaggcagagccgtgagctaccccgccagcgtgagagccaacaccggcagcagccccctgggcctgctgggcaccaccgacgagcccccccccagcggccccagcaccacccagggcgcccaggcccccctgctgcagcagagaccccaggagctgggcgagctgagagtgctgggcagagacgagaccggcagactgagagtggtgtggaccgcccagcccgacaccttcgcctacttccagctgagaatgagagtgcccgagggccccggcgcccacgaggaggtgctgcccggcgacgtgagacaggccctggtgcccccccccccccccggcaccccctacgagctgagcctgcacggcgtgccccccggcggcaagcccagcgaccccatcatctaccagggcatcatggacaaggacgaggagaagcccggcaagagcagcggcccccccagactgggcgagctgaccgtgaccgacagaaccagcgacagcctgctgctgagatggaccgtgcccgagggcgagttcgacagcttcgtgatccagtacaaggacagagacggccagccccaggtggtgcccgtggagggcccccagagaagcgccgtgatcaccagcctggaccccggcagaaagtacaagttcgtgctgtacggcttcgtgggcaagaagagacacggccccctggtggccgaggccaagatcctgccccagagcgaccccagccccggcacccccccccacctgggcaacctgtgggtgaccgaccccacccccgacagcctgcacctgagctggaccgtgcccgagggccagttcgacaccttcatggtgcagtacagagacagagacggcagaccccaggtggtgcccgtggagggccccgagagaagcttcgtggtgagcagcctggaccccgaccacaagtacagattcaccctgttcggcatcgccaacaagaagagatacggccccctgaccgccgacggcaccaccgcccccgagagaaaggaggagccccccagacccgagttcctggagcagcccctgctgggcgagctgaccgtgaccggcgtgacccccgacagcctgagactgagctggaccgtggcccagggccccttcgacagcttcatggtgcagtacaaggacgcccagggccagccccaggccgtgcccgtggccggcgacgagaacgaggtgaccgtgcccggcctggaccccgacagaaagtacaagatgaacctgtacggcctgagaggcagacagagagtgggccccgagagcgtggtggccaagaccgccccccaggaggacgtggacgagacccccagccccaccgagctgggcaccgaggcccccgagagccccgaggagcccctgctgggcgagctgaccgtgaccggcagcagccccgacagcctgagcctgttctggaccgtgccccagggcagcttcgacagcttcaccgtgcagtacaaggacagagacggcagacccagagccgtgagagtgggcggcaaggagagcgaggtgaccgtgggcggcctggagcccggccacaagtacaagatgcacctgtacggcctgcacgagggccagagagtgggccccgtgagcgccgtgggcgtgaccgccccccagcaggaggagaccccccccgccaccgagagccccctggagcccagactgggcgagctgaccgtgaccgacgtgacccccaacagcgtgggcctgagctggaccgtgcccgagggccagttcgacagcttcatcgtgcagtacaaggacaaggacggccagccccaggtggtgcccgtggccgccgaccagagagaggtgaccgtgtacaacctggagcccgagagaaagtacaagatgaacatgtacggcctgcacgacggccagagaatgggccccctgagcgtggtgatcgtgaccgcccccctgccccccgcccccgccaccgaggccagcaagccccccctggagcccagactgggcgagctgaccgtgaccgacatcacccccgacagcgtgggcctgagctggaccgtgcccgagggcgagttcgacagcttcgtggtgcagtacaaggacagagacggccagccccaggtggtgcccgtggccgccgaccagagagaggtgaccatccccgacctggagcccagcagaaagtacaagttcctgctgttcggcatccaggacggcaagagaagaagccccgtgagcgtggaggccaagaccgtggccagaggcgacgccagccccggcgccccccccagactgggcgagctgtgggtgaccgaccccacccccgacagcctgagactgagctggaccgtgcccgagggccagttcgacagcttcgtggtgcagttcaaggacaaggacggcccccaggtggtgcccgtggagggccacgagagaagcgtgaccgtgacccccctggacgccggcagaaagtacagattcctgctgtacggcctgctgggcaagaagagacacggccccctgaccgccgacggcaccaccgaggccagaagcgccatggacgacaccggcaccaagagaccccccaagcccagactgggcgaggagctgcaggtgaccaccgtgacccagaacagcgtgggcctgagctggaccgtgcccgagggccagttcgacagcttcgtggtgcagtacaaggacagagacggccagccccaggtggtgcccgtggagggcagcctgagagaggtgagcgtgcccggcctggaccccgcccacagatacaagctgctgctgtacggcctgcaccacggcaagagagtgggccccatcagcgccgtggccatcaccgccggcagagaggagaccgagaccgagaccaccgcccccaccccccccgcccccgagccccacctgggcgagctgaccgtggaggaggccaccagccacaccctgcacctgagctggatggtgaccgagggcgagttcgacagcttcgagatccagtacaccgacagagacggccagctgcagatggtgagaatcggcggcgacagaaacgacatcaccctgagcggcctggagagcgaccacagatacctggtgaccctgtacggcttcagcgacggcaagcacgtgggccccgtgcacgtggaggccctgaccgtgcccgaggaggagaagcccagcgagccccccaccgccacccccgagccccccatcaagcccagactgggcgagctgaccgtgaccgacgccacccccgacagcctgagcctgagctggaccgtgcccgagggccagttcgaccacttcctggtgcagtacagaaacggcgacggccagcccaaggccgtgagagtgcccggccacgaggagggcgtgaccatcagcggcctggagcccgaccacaagtacaagatgaacctgtacggcttccacggcggccagagaatgggccccgtgagcgtggtgggcgtgaccgccgccgaggaggagacccccagccccaccgagcccagcatggaggcccccgagcccgccgaggagcccctgctgggcgagctgaccgtgaccggcagcagccccgacagcctgagcctgagctggaccgtgccccagggcagattcgacagcttcaccgtgcagtacaaggacagagacggcagaccccaggtggtgagagtgggcggcgaggagagcgaggtgaccgtgggcggcctggagcccggcagaaagtacaagatgcacctgtacggcctgcacgagggcagaagagtgggccccgtgagcgccgtgggcgtgaccgcccccgaggaggagagccccgacgcccccctggccaagctgagactgggccagatgaccgtgagagacatcaccagcgacagcctgagcctgagctggaccgtgcccgagggccagttcgaccacttcctggtgcagttcaagaacggcgacggccagcccaaggccgtgagagtgcccggccacgaggacggcgtgaccatcagcggcctggagcccgaccacaagtacaagatgaacctgtacggcttccacggcggccagagagtgggccccgtgagcgccgtgggcctgaccgcccccggcaaggacgaggagatggcccccgccagcaccgagccccccacccccgagccccccatcaagcccagactggaggagctgaccgtgaccgacgccacccccgacagcctgagcctgagctggaccgtgcccgagggccagttcgaccacttcctggtgcagtacaagaacggcgacggccagcccaaggccaccagagtgcccggccacgaggacagagtgaccatcagcggcctggagcccgacaacaagtacaagatgaacctgtacggcttccacggcggccagagagtgggccccgtgagcgccatcggcgtgaccgccgccgaggaggagacccccagccccaccgagcccagcatggaggcccccgagccccccgaggagcccctgctgggcgagctgaccgtgaccggcagcagccccgacagcctgagcctgagctggaccgtgccccagggcagattcgacagcttcaccgtgcagtacaaggacagagacggcagaccccaggtggtgagagtgggcggcgaggagagcgaggtgaccgtgggcggcctggagcccggcagaaagtacaagatgcacctgtacggcctgcacgagggcagaagagtgggccccgtgagcaccgtgggcgtgaccgccccccaggaggacgtggacgagacccccagccccaccgagcccggcaccgaggcccccgagccccccgaggagcccctgctgggcgagctgaccgtgaccggcagcagccccgacagcctgagcctgagctggaccgtgccccagggcagattcgacagcttcaccgtgcagtacaaggacagagacggcagaccccaggccgtgagagtgggcggccaggagagcaaggtgaccgtgagaggcctggagcccggcagaaagtacaagatgcacctgtacggcctgcacgagggcagaagactgggccccgtgagcgccgtgggcgtgaccgaggacgaggccgagaccacccaggccgtgcccaccatgacccccgagccccccatcaagcccagactgggcgagctgaccatgaccgacgccacccccgacagcctgagcctgagctggaccgtgcccgagggccagttcgaccacttcctggtgcagtacagaaacggcgacggccagcccaaggccgtgagagtgcccggccacgaggacggcgtgaccatcagcggcctggagcccgaccacaagtacaagatgaacctgtacggcttccacggcggccagagagtgggccccatcagcgtgatcggcgtgaccgccgccgaggaggagacccccagccccaccgagctgagcaccgaggcccccgagccccccgaggagcccctgctgggcgagctgaccgtgaccggcagcagccccgacagcctgagcctgagctggaccatcccccagggccacttcgacagcttcaccgtgcagtacaaggacagagacggcagaccccaggtgatgagagtgagaggcgaggagagcgaggtgaccgtgggcggcctggagcccggcagaaagtacaagatgcacctgtacggcctgcacgagggcagaagagtgggccccgtgagcaccgtgggcgtgaccgaggacgaggccgagaccacccaggccgtgcccaccaccacccccgagccccccaacaagcccagactgggcgagctgaccgtgaccgacgccacccccgacagcctgagcctgagctggatggtgcccgagggccagttcgaccacttcctggtgcagtacagaaacggcgacggccagcccaaggtggtgagagtgcccggccacgaggacggcgtgaccatcagcggcctggagcccgaccacaagtacaagatgaacctgtacggcttccacggcggccagagagtgggccccatcagcgtgatcggcgtgaccgccgccgaggaggagacccccgcccccaccgagcccagcaccgaggcccccgagccccccgaggagcccctgctgggcgagctgaccgtgaccggcagcagccccgacagcctgagcctgagctggaccatcccccagggcagattcgacagcttcaccgtgcagtacaaggacagagacggcagaccccaggtggtgagagtgagaggcgaggagagcgaggtgaccgtgggcggcctggagcccggctgcaagtacaagatgcacctgtacggcctgcacgagggccagagagtgggccccgtgagcgccgtgggcgtgaccgcccccaaggacgaggccgagaccacccaggccgtgcccaccatgacccccgagccccccatcaagcccagactgggcgagctgaccgtgaccgacgccacccccgacagcctgagcctgagctggatggtgcccgagggccagttcgaccacttcctggtgcagtacagaaacggcgacggccagcccaaggccgtgagagtgcccggccacgaggacggcgtgaccatcagcggcctggagcccgaccacaagtacaagatgaacctgtacggcttccacggcggccagagagtgggccccgtgagcgccatcggcgtgaccgaggaggagacccccagccccaccgagcccagcaccgaggcccccgaggcccccgaggagcccctgctgggcgagctgaccgtgaccggcagcagccccgacagcctgagcctgagctggaccgtgccccagggcagattcgacagcttcaccgtgcagtacaaggacagagacggccagccccaggtggtgagagtgagaggcgaggagagcgaggtgaccgtgggcggcctggagcccggcagaaagtacaagatgcacctgtacggcctgcacgagggccagagagtgggccccgtgagcaccgtgggcatcaccgcccccctgcccacccccctgcccgtggagcccagactgggcgagctggccgtggccgccgtgaccagcgacagcgtgggcctgagctggaccgtggcccagggccccttcgacagcttcctggtgcagtacagagacgcccagggccagccccaggccgtgcccgtgagcggcgacctgagagccgtggccgtgagcggcctggaccccgccagaaagtacaagttcctgctgttcggcctgcagaacggcaagagacacggccccgtgcccgtggaggccagaaccgcccccgacaccaagcccagccccagactgggcgagctgaccgtgaccgacgccacccccgacagcgtgggcctgagctggaccgtgcccgagggcgagttcgacagcttcgtggtgcagtacaaggacaaggacggcagactgcaggtggtgcccgtggccgccaaccagagagaggtgaccgtgcagggcctggagcccagcagaaagtacagattcctgctgtacggcctgagcggcagaaagagactgggccccatcagcgccgacagcaccaccgcccccctggagaaggagctgcccccccacctgggcgagctgaccgtggccgaggagaccagcagcagcctgagactgagctggaccgtggcccagggccccttcgacagcttcgtggtgcagtacagagacaccgacggccagcccagagccgtgcccgtggccgccgaccagagaaccgtgaccgtggaggacctggagcccggcaagaagtacaagttcctgctgtacggcctgctgggcggcaagagactgggccccgtgagcgccctgggcatgaccgcccccgaggaggacacccccgcccccgagctggcccccgaggcccccgagccccccgaggagcccagactgggcgtgctgaccgtgaccgacaccacccccgacagcatgagactgagctggagcgtggcccagggccccttcgacagcttcgtggtgcagtacgaggacaccaacggccagccccaggccctgctggtggacggcgaccagagcaagatcctgatcagcggcctggagcccagcaccccctacagattcctgctgtacggcctgcacgagggcaagagactgggccccctgagcgccgagggcaccaccggcctggcccccgccggccagaccagcgaggagagcagacccagactgagccagctgagcgtgaccgacgtgaccaccagcagcctgagactgaactgggaggccccccccggcgccttcgacagcttcctgctgagattcggcgtgcccagccccagcaccctggagccccaccccagacccctgctgcagagagagctgatggtgcccggcaccagacacagcgccgtgctgagagacctgagaagcggcaccctgtacagcctgaccctgtacggcctgagaggcccccacaaggccgacagcatccagggcaccgccagaaccctgagccccgtgctggagagccccagagacctgcagttcagcgagatcagagagaccagcgccaaggtgaactggatgcccccccccagcagagccgacagcttcaaggtgagctaccagctggccgacggcggcgagccccagagcgtgcaggtggacggccaggccagaacccagaagctgcagggcctgatccccggcgccagatacgaggtgaccgtggtgagcgtgagaggcttcgaggagagcgagcccctgaccggcttcctgaccaccgtgcccgacggccccacccagctgagagccctgaacctgaccgagggcttcgccgtgctgcactggaagcccccccagaaccccgtggacacctacgacgtgcaggtgaccgcccccggcgccccccccctgcaggccgagacccccggcagcgccgtggactaccccctgcacgacctggtgctgcacaccaactacaccgccaccgtgagaggcctgagaggccccaacctgaccagccccgccagcatcaccttcaccaccggcctggaggcccccagagacctggaggccaaggaggtgacccccagaaccgccctgctgacctggaccgagccccccgtgagacccgccggctacctgctgagcttccacacccccggcggccagaaccaggagatcctgctgcccggcggcatcaccagccaccagctgctgggcctgttccccagcaccagctacaacgccagactgcaggccatgtggggccagagcctgctgccccccgtgagcaccagcttcaccaccggcggcctgagaatccccttccccagagactgcggcgaggagatgcagaacggcgccggcgccagcagaaccagcaccatcttcctgaacggcaacagagagagacccctgaacgtgttctgcgacatggagaccgacggcggcggctggctggtgttccagagaagaatggacggccagaccgacttctggagagactgggaggactacgcccacggcttcggcaacatcagcggcgagttctggctgggcaacgaggccctgcacagcctgacccaggccggcgactacagcatgagagtggacctgagagccggcgacgaggccgtgttcgcccagtacgacagcttccacgtggacagcgccgccgagtactacagactgcacctggagggctaccacggcaccgccggcgacagcatgagctaccacagcggcagcgtgttcagcgccagagacagagaccccaacagcctgctgatcagctgcgccgtgagctacagaggcgcctggtggtacagaaactgccactacgccaacctgaacggcctgtacggcagcaccgtggaccaccagggcgtgagctggtaccactggaagggcttcgagttcagcgtgcccttcaccgagatgaagctgagacccagaaacttcagaagccccgccggcggcggctag

SEQ ID NO: 201479 - DNA, 843 bp, Artificial Sequence
  derived and/or modified sequence
atggtgaccgagggcgagttcgacagcttcgagatccagtacaccgacagagacggccagctgcagatggtgagaatcggcggcgacagaaacgacatcaccctgagcggcctggagagcgaccacagatacctggtgaccctgtacggcttcagcgacggcaagcacgtgggccccgtgcacgtggaggccctgaccgtgcccgaggaggagaagcccagcgagccccccaccgccacccccgagccccccatcaagcccagactgggcgagctgaccgtgaccgacgccacccccgacagcctgagcctgagctggaccgtgcccgagggccagttcgaccacttcctggtgcagtacagaaacggcgacggccagcccaaggccgtgagagtgcccggccacgaggagggcgtgaccatcagcggcctggagcccgaccacaagtacaagatgaacctgtacggcttccacggcggccagagaatgggccccgtgagcgtggtgggcgtgaccgccgccgaggaggagacccccagccccaccgagcccagcatggaggcccccgagcccgccgaggagcccctgctgggcgagctgaccgtgaccggcagcagccccgacagcctgagcctgagctggaccgtgccccagggcagattcgacagcttcaccgtgcagtacaaggacagagacggcagaccccaggtggtgagagtgggcggcgaggagagcgaggtgaccgtgggcggcctggagcccggcagaaagtacaagatgcacctgtacggcctgcacgagggcagaagagtgggccccgtgagcgccgtgggcgtgacctag

SEQ ID NO: 201480 - DNA, 12729 bp, Artificial Sequence
  derived and/or modified sequence
atgatgcccgcccagtacgccctgaccagcagcctggtgctgctggtgctgctgagcaccgccagagccggccccttcagcagcagaagcaacgtgaccctgcccgcccccagaccccccccccagcccggcggccacaccgtgggcgccggcgtgggcagccccagcagccagctgtacgagcacaccgtggagggcggcgagaagcaggtggtgttcacccacagaatcaacctgccccccagcaccggctgcggctgcccccccggcaccgagccccccgtgctggccagcgaggtgcaggccctgagagtgagactggagatcctggaggagctggtgaagggcctgaaggagcagtgcaccggcggctgctgccccgccagcgcccaggccggcaccggccagaccgacgtgagaaccctgtgcagcctgcacggcgtgttcgacctgagcagatgcacctgcagctgcgagcccggctggggcggccccacctgcagcgaccccaccgacgccgagatcccccccagcagcccccccagcgccagcggcagctgccccgacgactgcaacgaccagggcagatgcgtgagaggcagatgcgtgtgcttccccggctacaccggccccagctgcggctggcccagctgccccggcgactgccagggcagaggcagatgcgtgcagggcgtgtgcgtgtgcagagccggcttcagcggccccgactgcagccagagaagctgccccagaggctgcagccagagaggcagatgcgagggcggcagatgcgtgtgcgaccccggctacaccggcgacgactgcggcatgagaagctgccccagaggctgcagccagagaggcagatgcgagaacggcagatgcgtgtgcaaccccggctacaccggcgaggactgcggcgtgagaagctgccccagaggctgcagccagagaggcagatgcaaggacggcagatgcgtgtgcgaccccggctacaccggcgaggactgcggcaccagaagctgcccctgggactgcggcgagggcggcagatgcgtggacggcagatgcgtgtgctggcccggctacaccggcgaggactgcagcaccagaacctgccccagagactgcagaggcagaggcagatgcgaggacggcgagtgcatctgcgacaccggctacagcggcgacgactgcggcgtgagaagctgccccggcgactgcaaccagagaggcagatgcgaggacggcagatgcgtgtgctggcccggctacaccggcaccgactgcggcagcagagcctgccccagagactgcagaggcagaggcagatgcgagaacggcgtgtgcgtgtgcaacgccggctacagcggcgaggactgcggcgtgagaagctgccccggcgactgcagaggcagaggcagatgcgagagcggcagatgcatgtgctggcccggctacaccggcagagactgcggcaccagagcctgccccggcgactgcagaggcagaggcagatgcgtggacggcagatgcgtgtgcaaccccggcttcaccggcgaggactgcggcagcagaagatgccccggcgactgcagaggccacggcctgtgcgaggacggcgtgtgcgtgtgcgacgccggctacagcggcgaggactgcagcaccagaagctgccccggcggctgcagaggcagaggccagtgcctggacggcagatgcgtgtgcgaggacggctacagcggcgaggactgcggcgtgagacagtgccccaacgactgcagccagcacggcgtgtgccaggacggcgtgtgcatctgctgggagggctacgtgagcgaggactgcagcatcagaacctgccccagcaactgccacggcagaggcagatgcgaggagggcagatgcctgtgcgaccccggctacaccggccccacctgcgccaccagaatgtgccccgccgactgcagaggcagaggcagatgcgtgcagggcgtgtgcctgtgccacgtgggctacggcggcgaggactgcggccaggaggagccccccgccagcgcctgccccggcggctgcggccccagagagctgtgcagagccggccagtgcgtgtgcgtggagggcttcagaggccccgactgcgccatccagacctgccccggcgactgcagaggcagaggcgagtgccacgacggcagctgcgtgtgcaaggacggctacgccggcgaggactgcggcgaggaggtgcccaccatcgagggcatgagaatgcacctgctggaggagaccaccgtgagaaccgagtggacccccgcccccggccccgtggacgcctacgagatccagttcatccccaccaccgagggcgccagcccccccttcaccgccagagtgcccagcagcgccagcgcctacgaccagagaggcctggcccccggccaggagtaccaggtgaccgtgagagccctgagaggcaccagctggggcctgcccgccagcaagaccatcaccaccatgatcgacggcccccaggacctgagagtggtggccgtgacccccaccaccctggagctgggctggctgagaccccaggccgaggtggacagattcgtggtgagctacgtgagcgccggcaaccagagagtgagactggaggtgccccccgaggccgacggcaccctgctgaccgacctgatgcccggcgtggagtacgtggtgaccgtgaccgccgagagaggcagagccgtgagctaccccgccagcgtgagagccaacaccggcagcagccccctgggcctgctgggcaccaccgacgagcccccccccagcggccccagcaccacccagggcgcccaggcccccctgctgcagcagagaccccaggagctgggcgagctgagagtgctgggcagagacgagaccggcagactgagagtggtgtggaccgcccagcccgacaccttcgcctacttccagctgagaatgagagtgcccgagggccccggcgcccacgaggaggtgctgcccggcgacgtgagacaggccctggtgcccccccccccccccggcaccccctacgagctgagcctgcacggcgtgccccccggcggcaagcccagcgaccccatcatctaccagggcatcatggacaaggacgaggagaagcccggcaagagcagcggcccccccagactgggcgagctgaccgtgaccgacagaaccagcgacagcctgctgctgagatggaccgtgcccgagggcgagttcgacagcttcgtgatccagtacaaggacagagacggccagccccaggtggtgcccgtggagggcccccagagaagcgccgtgatcaccagcctggaccccggcagaaagtacaagttcgtgctgtacggcttcgtgggcaagaagagacacggccccctggtggccgaggccaagatcctgccccagagcgaccccagccccggcaccccccccagactgggcaacctgtgggtgaccgaccccacccccgacagcctgcacctgagctggaccgtgcccgagggccagttcgacaccttcatggtgcagtacagagacagagacggcagaccccaggtggtgcccgtggagggccccgagagaagcttcgtggtgagcagcctggaccccgaccacaagtacagattcaccctgttcggcatcgccaacaagaagagatacggccccctgaccgccgacggcaccaccgcccccgagagaaaggaggagcccccccaccccgagttcctggagcagcccctgctgggcgagctgaccgtgaccggcgtgacccccgacagcctgagactgagctggaccgtggcccagggccccttcgacagcttcatggtgcagtacaaggacgcccagggccagccccaggccgtgcccgtggccggcgacgagaacgaggtgaccgtgcccggcctggaccccgacagaaagtacaagatgaacctgtacggcctgagaggcagacagagagtgggccccgagagcgtggtggccaagaccgccccccaggaggacgtggacgagacccccagccccaccgagctgggcaccgaggcccccgagagccccgaggagcccctgctgggcgagctgaccgtgaccggcagcagccccgacagcctgagcctgttctggaccgtgccccagggcagcttcgacagcttcaccgtgcagtacaaggacagagacggcagacccagagccgtgagagtgggcggcaaggagagcgaggtgaccgtgggcggcctggagcccggccacaagtacaagatgcacctgtacggcctgcacgagggccagagagtgggccccgtgagcgccgtgggcgtgaccgccccccagcaggaggagaccccccccgccaccgagagccccctggagcccagactgggcgagctgaccgtgaccgacgtgacccccaacagcgtgggcctgagctggaccgtgcccgagggccagttcgacagcttcatcgtgcagtacaaggacaaggacggccagccccaggtggtgcccgtggccgccgaccagagagaggtgaccgtgtacaacctggagcccgagagaaagtacaagatgaacatgtacggcctgcacgacggccagagaatgggccccctgagcgtggtgatcgtgaccgcccccctgccccccgcccccgccaccgaggccagcaagccccccctggagcccagactgggcgagctgaccgtgaccgacatcacccccgacagcgtgggcctgagctggaccgtgcccgagggcgagttcgacagcttcgtggtgcagtacaaggacagagacggccagccccaggtggtgcccgtggccgccgaccagagagaggtgaccatccccgacctggagcccagcagaaagtacaagttcctgctgttcggcatccaggacggcaagagaagaagccccgtgagcgtggaggccaagaccgtggccagaggcgacgccagccccggcgccccccccagactgggcgagctgtgggtgaccgaccccacccccgacagcctgagactgagctggaccgtgcccgagggccagttcgacagcttcgtggtgcagttcaaggacaaggacggcccccaggtggtgcccgtggagggccacgagagaagcgtgaccgtgacccccctggacgccggcagaaagtacagattcctgctgtacggcctgctgggcaagaagagacacggccccctgaccgccgacggcaccaccgaggccagaagcgccatggacgacaccggcaccaagagaccccccaagcccagactgggcgaggagctgcaggtgaccaccgtgacccagaacagcgtgggcctgagctggaccgtgcccgagggccagttcgacagcttcgtggtgcagtacaaggacagagacggccagccccaggtggtgcccgtggagggcagcctgagagaggtgagcgtgcccggcctggaccccgcccacagatacaagctgctgctgtacggcctgcaccacggcaagagagtgggccccatcagcgccgtggccatcaccgccggcagagaggagaccgagaccgagaccaccgcccccaccccccccgcccccgagccccacctgggcgagctgaccgtggaggaggccaccagccacaccctgcacctgagctggatggtgaccgagggcgagttcgacagcttcgagatccagtacaccgacagagacggccagctgcagatggtgagaatcggcggcgacagaaacgacatcaccctgagcggcctggagagcgaccacagatacctggtgaccctgtacggcttcagcgacggcaagcacgtgggccccgtgcacgtggaggccctgaccgtgcccgaggaggagaagcccagcgagccccccaccgccacccccgagccccccatcaagcccagactgggcgagctgaccgtgaccgacgccacccccgacagcctgagcctgagctggaccgtgcccgagggccagttcgaccacttcctggtgcagtacagaaacggcgacggccagcccaaggccgtgagagtgcccggccacgaggagggcgtgaccatcagcggcctggagcccgaccacaagtacaagatgaacctgtacggcttccacggcggccagagaatgggccccgtgagcgtggtgggcgtgaccgccgccgaggaggagacccccagccccaccgagcccagcatggaggcccccgagcccgccgaggagcccctgctgggcgagctgaccgtgaccggcagcagccccgacagcctgagcctgagctggaccgtgccccagggcagattcgacagcttcaccgtgcagtacaaggacagagacggcagaccccaggtggtgagagtgggcggcgaggagagcgaggtgaccgtgggcggcctggagcccggcagaaagtacaagatgcacctgtacggcctgcacgagggcagaagagtgggccccgtgagcgccgtgggcgtgaccgcccccgaggaggagagccccgacgcccccctggccaagctgagactgggccagatgaccgtgagagacatcaccagcgacagcctgagcctgagctggaccgtgcccgagggccagttcgaccacttcctggtgcagttcaagaacggcgacggccagcccaaggccgtgagagtgcccggccacgaggacggcgtgaccatcagcggcctggagcccgaccacaagtacaagatgaacctgtacggcttccacggcggccagagagtgggccccgtgagcgccgtgggcctgaccgcccccggcaaggacgaggagatggcccccgccagcaccgagccccccacccccgagccccccatcaagcccagactggaggagctgaccgtgaccgacgccacccccgacagcctgagcctgagctggaccgtgcccgagggccagttcgaccacttcctggtgcagtacaagaacggcgacggccagcccaaggccaccagagtgcccggccacgaggacagagtgaccatcagcggcctggagcccgacaacaagtacaagatgaacctgtacggcttccacggcggccagagagtgggccccgtgagcgccatcggcgtgaccgccgccgaggaggagacccccagccccaccgagcccagcatggaggcccccgagccccccgaggagcccctgctgggcgagctgaccgtgaccggcagcagccccgacagcctgagcctgagctggaccgtgccccagggcagattcgacagcttcaccgtgcagtacaaggacagagacggcagaccccaggtggtgagagtgggcggcgaggagagcgaggtgaccgtgggcggcctggagcccggcagaaagtacaagatgcacctgtacggcctgcacgagggcagaagagtgggccccgtgagcaccgtgggcgtgaccgccccccaggaggacgtggacgagacccccagccccaccgagcccggcaccgaggcccccgagccccccgaggagcccctgctgggcgagctgaccgtgaccggcagcagccccgacagcctgagcctgagctggaccgtgccccagggcagattcgacagcttcaccgtgcagtacaaggacagagacggcagaccccaggccgtgagagtgggcggccaggagagcaaggtgaccgtgagaggcctggagcccggcagaaagtacaagatgcacctgtacggcctgcacgagggcagaagactgggccccgtgagcgccgtgggcgtgaccgaggacgaggccgagaccacccaggccgtgcccaccatgacccccgagccccccatcaagcccagactgggcgagctgaccatgaccgacgccacccccgacagcctgagcctgagctggaccgtgcccgagggccagttcgaccacttcctggtgcagtacagaaacggcgacggccagcccaaggccgtgagagtgcccggccacgaggacggcgtgaccatcagcggcctggagcccgaccacaagtacaagatgaacctgtacggcttccacggcggccagagagtgggccccatcagcgtgatcggcgtgaccgccgccgaggaggagacccccagccccaccgagctgagcaccgaggcccccgagccccccgaggagcccctgctgggcgagctgaccgtgaccggcagcagccccgacagcctgagcctgagctggaccatcccccagggccacttcgacagcttcaccgtgcagtacaaggacagagacggcagaccccaggtgatgagagtgagaggcgaggagagcgaggtgaccgtgggcggcctggagcccggcagaaagtacaagatgcacctgtacggcctgcacgagggcagaagagtgggccccgtgagcaccgtgggcgtgaccgaggacgaggccgagaccacccaggccgtgcccaccaccacccccgagccccccaacaagcccagactgggcgagctgaccgtgaccgacgccacccccgacagcctgagcctgagctggatggtgcccgagggccagttcgaccacttcctggtgcagtacagaaacggcgacggccagcccaaggtggtgagagtgcccggccacgaggacggcgtgaccatcagcggcctggagcccgaccacaagtacaagatgaacctgtacggcttccacggcggccagagagtgggccccatcagcgtgatcggcgtgaccgccgccgaggaggagacccccgcccccaccgagcccagcaccgaggcccccgagccccccgaggagcccctgctgggcgagctgaccgtgaccggcagcagccccgacagcctgagcctgagctggaccatcccccagggcagattcgacagcttcaccgtgcagtacaaggacagagacggcagaccccaggtggtgagagtgagaggcgaggagagcgaggtgaccgtgggcggcctggagcccggctgcaagtacaagatgcacctgtacggcctgcacgagggccagagagtgggccccgtgagcgccgtgggcgtgaccgcccccaaggacgaggccgagaccacccaggccgtgcccaccatgacccccgagccccccatcaagcccagactgggcgagctgaccgtgaccgacgccacccccgacagcctgagcctgagctggatggtgcccgagggccagttcgaccacttcctggtgcagtacagaaacggcgacggccagcccaaggccgtgagagtgcccggccacgaggacggcgtgaccatcagcggcctggagcccgaccacaagtacaagatgaacctgtacggcttccacggcggccagagagtgggccccgtgagcgccatcggcgtgaccgaggaggagacccccagccccaccgagcccagcaccgaggcccccgaggcccccgaggagcccctgctgggcgagctgaccgtgaccggcagcagccccgacagcctgagcctgagctggaccatcccccagggcagattcgacagcttcaccgtgcagtacaaggacagagacggccagccccaggtggtgagagtgagaggcgaggagagcgaggtgaccgtgggcggcctggagcccggcagaaagtacaagatgcacctgtacggcctgcacgagggccagagagtgggccccgtgagcaccgtgggcatcaccgcccccctgcccacccccctgcccgtggagcccagactgggcgagctggccgtggccgccgtgaccagcgacagcgtgggcctgagctggaccgtggcccagggccccttcgacagcttcctggtgcagtacagagacgcccagggccagccccaggccgtgcccgtgagcggcgacctgagagccgtggccgtgagcggcctggaccccgccagaaagtacaagttcctgctgttcggcctgcagaacggcaagagacacggccccgtgcccgtggaggccagaaccgcccccgacaccaagcccagccccagactgggcgagctgaccgtgaccgacgccacccccgacagcgtgggcctgagctggaccgtgcccgagggcgagttcgacagcttcgtggtgcagtacaaggacaaggacggcagactgcaggtggtgcccgtggccgccaaccagagagaggtgaccgtgcagggcctggagcccagcagaaagtacagattcctgctgtacggcctgagcggcagaaagagactgggccccatcagcgccgacagcaccaccgcccccctggagaaggagctgcccccccacctgggcgagctgaccgtggccgaggagaccagcagcagcctgagactgagctggaccgtggcccagggccccttcgacagcttcgtggtgcagtacagagacaccgacggccagcccagagccgtgcccgtggccgccgaccagagaaccgtgaccgtggaggacctggagcccggcaagaagtacaagttcctgctgtacggcctgctgggcggcaagagactgggccccgtgagcgccctgggcatgaccgcccccgaggaggacacccccgcccccgagctggcccccgaggcccccgagccccccgaggagcccagactgggcgtgctgaccgtgaccgacaccacccccgacagcatgagactgagctggagcgtggcccagggccccttcgacagcttcgtggtgcagtacgaggacaccaacggccagccccaggccctgctggtggacggcgaccagagcaagatcctgatcagcggcctggagcccagcaccccctacagattcctgctgtacggcctgcacgagggcaagagactgggccccctgagcgccgagggcaccaccggcctggcccccgccggccagaccagcgaggagagcagacccagactgagccagctgagcgtgaccgacgtgaccaccagcagcctgagactgaactgggaggccccccccggcgccttcgacagcttcctgctgagattcggcgtgcccagccccagcaccctggagccccaccccagacccctgctgcagagagagctgatggtgcccggcaccagacacagcgccgtgctgagagacctgagaagcggcaccctgtacagcctgaccctgtacggcctgagaggcccccacaaggccgacagcatccagggcaccgccagaaccctgagccccgtgctggagagccccagagacctgcagttcagcgagatcagagagaccagcgccaaggtgaactggatgcccccccccagcagagccgacagcttcaaggtgagctaccagctggccgacggcggcgagccccagagcgtgcaggtggacggccaggccagaacccagaagctgcagggcctgatccccggcgccagatacgaggtgaccgtggtgagcgtgagaggcttcgaggagagcgagcccctgaccggcttcctgaccaccgtgcccgacggccccacccagctgagagccctgaacctgaccgagggcttcgccgtgctgcactggaagcccccccagaaccccgtggacacctacgacatccaggtgaccgcccccggcgccccccccctgcaggccgagacccccggcagcgccgtggactaccccctgcacgacctggtgctgcacaccaactacaccgccaccgtgagaggcctgagaggccccaacctgaccagccccgccagcatcaccttcaccaccggcctggaggcccccagagacctggaggccaaggaggtgacccccagaaccgccctgctgacctggaccgagccccccgtgagacccgccggctacctgctgagcttccacacccccggcggccagacccaggagatcctgctgcccggcggcatcaccagccaccagctgctgggcctgttccccagcaccagctacaacgccagactgcaggccacctggggccagagcctgctgccccccgtgagcaccagcttcaccaccggcggcctgagaatccccttccccagagactgcggcgaggagatgcagaacggcgccggcgccagcagaaccagcaccatcttcctgaacggcaacagagagagacccctgaacgtgttctgcgacatggagaccgacggcggcggctggctggtgttccagagaagaatggacggccagaccgacttctggagagactgggaggactacgcccacggcttcggcaacatcagcggcgagttctggctgggcaacgaggccctgcacagcctgacccaggccggcgactacagcatgagagtggacctgagagccggcgacgaggccgtgttcgcccagtacgacagcttccacgtggacagcgccgccgagtactacagactgcacctggagggctaccacggcaccgccggcgacagcatgagctaccacagcggcagcgtgttcagcgccagagacagagaccccaacagcctgctgatcagctgcgccgtgagctacagaggcgcctggtggtacagaaactgccactacgccaacctgaacggcctgtacggcagcaccgtggaccaccagggcgtgagctggtaccactggaagggcttcgagttcagcgtgcccttcaccgagatgaagctgagacccagaaacttcagaagccccgccggcggcggctag

SEQ ID NO: 201481 - DNA, 942 bp, Artificial Sequence
  derived and/or modified sequence
accgagcccggcaccgaggcccccggcccccccgaggagcccctgctgggcgagctgaccgtgaccggcagcagccccgacagcctgagcctgagctggaccgtgccccagggcagattcgacagcttcaccgtgcagtacaaggacagagacggcagaccccaggccgtgagagtgggcggccaggagagcaaggtgaccgtgagaggcctggagcccggcagaaagtacaagatgcacctgtacggcctgcacgagggcagaagactgggccccgtgagcgccgtgggcgtgaccgaggacgaggccgagaccacccaggccgtgcccaccatgacccccgagccccccatcaagcccagactgggcgagctgaccatgaccgacgccacccccgacagcctgagcctgagctggaccgtgcccgagggccagttcgaccacttcctggtgcagtacagaaacggcgacggccagcccaaggccgtgagagtgcccggccacgaggacggcgtgaccatcagcggcctggagcccgaccacaagtacaagatgaacctgtacggcttccacggcggccagagagtgggccccatcagcgtgatcggcgtgaccgccgccgaggaggagacccccagccccaccgagctgagcaccgaggcccccgagccccccgaggagcccctgctgggcgagctgaccgtgaccggcagcagccccgacagcctgagcctgagctggaccatcccccagggccacttcgacagcttcaccgtgcagtacaaggacagagacggcagaccccaggtgatgagagtgagaggcgaggagagcgaggtgaccgtgggcggcctggagcccggcagaaagtacaagatgcacctgtacggcctgcacgagggcagaagagtgggccccgtgagcaccgtgggcgtgacctag

SEQ ID NO: 201482 - DNA, 942 bp, Artificial Sequence
  derived and/or modified sequence
atgacccccgagccccccatcaagcccagactgggcgagctgaccatgaccgacgccacccccgacagcctgagcctgagctggaccgtgcccgagggccagttcgaccacttcctggtgcagtacagaaacggcgacggccagcccaaggccgtgagagtgcccggccacgaggacggcgtgaccatcagcggcctggagcccgaccacaagtacaagatgaacctgtacggcttccacggcggccagagagtgggccccatcagcgtgaccggcgtgaccgccgccgaggaggagacccccagccccaccgagctgagcaccgaggcccccgagccccccgaggagcccctgctgggcgagctgaccgtgaccggcagcagccccgacagcctgagcctgagctggaccatcccccagggccacttcgacagcttcaccgtgcagtacaaggacagagacggcagaccccaggtgatgagagtgagaggcgaggagagcgaggtgaccgtgggcggcctggagcccggcagaaagtacaagatgcacctgtacggcctgcacgagggcagaagagtgggccccgtgagcaccgtgggcgtgaccgcccccgaggacgaggaggaggagacccccgcccccaccgagcccagcaccgaggcccccgagccccccgaggagcccctgctgggcgagctgaccgtgaccggcagcagccccgacagcctgagcctgagctggaccatcccccagggcagattcgacagcttcaccgtgcagtacaaggacagagacggcagaccccaggtggtgagagtgagaggcgaggagagcgaggtgaccgtgggcggcctggagcccggctgcaagtacaagatgcacctgtacggcctgcacgagggccagagagtgggccccgtgagcgccgtgggcgtgacctag

SEQ ID NO: 201483 - DNA, 1281 bp, Artificial Sequence
  derived and/or modified sequence
gccggcgaggactgcggcgaggaggtgcccaccatcgagggcatgagaatgcacctgctggaggagaccaccgtgagaaccgagtggacccccgcccccggccccgtggacgcctacgagatccagttcatccccaccaccgagggcgccagcccccccttcaccgccagagtgcccagcagcgccagcgcctacgaccagagaggcctggcccccggccaggagtaccaggtgaccgtgagagccctgagaggcaccagctggggcctgcccgccagcaagaccatcaccaccatgatcgacggcccccaggacctgagagtggtggccgtgacccccaccaccctggagctgggctggctgagaccccaggccgaggtggacagattcgtggtgagctacgtgagcgccggcaaccagagagtgagactggaggtgccccccgaggccgacggcaccctgctgaccgacctgatgcccggcgtggagtacgtggtgaccgtgaccgccgagagaggcagagccgtgagctaccccgccagcgtgagagccaacaccggcagcagccccctgggcctgctgggcaccaccgacgagcccccccccagcggccccagcaccacccagggcgcccaggcccccctgctgcagcagagaccccaggagctgggcgagctgagagtgctgggcagagacgagaccggcagactgagagtggtgtggaccgcccagcccgacaccttcgcctacttccagctgagaatgagagtgcccgagggccccggcgcccacgaggaggtgctgcccggcgacgtgagacaggccctggtgcccccccccccccccggcaccccctacgagctgagcctgcacggcgtgccccccggcggcaagcccagcgaccccatcatctaccagggcatcatggacaaggacgaggagaagcccggcaagagcagcggcccccccagactgggcgagctgaccgtgaccgacagaaccagcgacagcctgctgctgagatggaccgtgcccgagggcgagttcgacagcttcgtgatccagtacaaggacagagacggccagccccaggtggtgcccgtggagggcccccagagaagcgccgtgatcaccagcctggaccccggcagaaagtacaagttcgtgctgtacggcttcgtgggcaagaagagacacggccccctggtggccgaggccaagatcctgccccagagcgaccccagccccggcacccccccccacctgggcaacctgtggtag

SEQ ID NO: 201484 - DNA, 2598 bp, Artificial Sequence
  derived and/or modified sequence
ctgtacggcctgagaggcagacagagagtgggccccgagagcgtggtggccaagaccgccccccaggaggacgtggacgagacccccagccccaccgagctgggcaccgaggcccccgagagccccgaggagcccctgctgggcgagctgaccgtgaccggcagcagccccgacagcctgagcctgttctggaccgtgccccagggcagcttcgacagcttcaccgtgcagtacaaggacagagacggcagacccagagccgtgagagtgggcggcaaggagagcgaggtgaccgtgggcggcctggagcccggccacaagtacaagatgcacctgtacggcctgcacgagggccagagagtgggccccgtgagcgccgtgggcgtgaccgccccccagcaggaggagaccccccccgccaccgagagccccctggagcccagactgggcgagctgaccgtgaccgacgtgacccccaacagcgtgggcctgagctggaccgtgcccgagggccagttcgacagcttcatcgtgcagtacaaggacaaggacggccagccccaggtggtgcccgtggccgccgaccagagagaggtgaccgtgtacaacctggagcccgagagaaagtacaagatgaacatgtacggcctgcacgacggccagagaatgggccccctgagcgtggtgatcgtgaccgcccccctgccccccgcccccgccaccgaggccagcaagccccccctggagcccagactgggcgagctgaccgtgaccgacatcacccccgacagcgtgggcctgagctggaccgtgcccgagggcgagttcgacagcttcgtggtgcagtacaaggacagagacggccagccccaggtggtgcccgtggccgccgaccagagagaggtgaccatccccgacctggagcccagcagaaagtacaagttcctgctgttcggcatccaggacggcaagagaagaagccccgtgagcgtggaggccaagaccgtggccagaggcgacgccagccccggcgccccccccagactgggcgagctgtgggtgaccgaccccacccccgacagcctgagactgagctggaccgtgcccgagggccagttcgacagcttcgtggtgcagttcaaggacaaggacggcccccaggtggtgcccgtggagggccacgagagaagcgtgaccgtgacccccctggacgccggcagaaagtacagattcctgctgtacggcctgctgggcaagaagagacacggccccctgaccgccgacggcaccaccgaggccagaagcgccatggacgacaccggcaccaagagaccccccaagcccagactgggcgaggagctgcaggtgaccaccgtgacccagaacagcgtgggcctgagctggaccgtgcccgagggccagttcgacagcttcgtggtgcagtacaaggacagagacggccagccccaggtggtgcccgtggagggcagcctgagagaggtgagcgtgcccggcctggaccccgcccacagatacaagctgctgctgtacggcctgcaccacggcaagagagtgggccccatcagcgccgtggccatcaccgccggcagagaggagaccgagaccgagaccaccgcccccaccccccccgcccccgagccccacctgggcgagctgaccgtggaggaggccaccagccacaccctgcacctgagctggatggtgaccgagggcgagttcgacagcttcgagatccagtacaccgacagagacggccagctgcagatggtgagaatcggcggcgacagaaacgacatcaccctgagcggcctggagagcgaccacagatacctggtgaccctgtacggcttcagcgacggcaagcacgtgggccccgtgcacgtggaggccctgaccgtgcccgaggaggagaagcccagcgagccccccaccgccacccccgagccccccatcaagcccagactgggcgagctgaccgtgaccgacgccacccccgacagcctgagcctgagctggaccgtgcccgagggccagttcgaccacttcctggtgcagtacagaaacggcgacggccagcccaaggccgtgagagtgcccggccacgaggagggcgtgaccatcagcggcctggagcccgaccacaagtacaagatgaacctgtacggcttccacggcggccagagaatgggccccgtgagcgtggtgggcgtgaccgccgccgaggaggagacccccagccccaccgagcccagcatggaggcccccgagcccgccgaggagcccctgctgggcgagctgaccgtgaccggcagcagccccgacagcctgagcctgagctggaccgtgccccagggcagattcgacagcttcaccgtgcagtacaaggacagagacggcagaccccaggtggtgagagtgggcggcgaggagagcgaggtgaccgtgggcggcctggagcccggcagaaagtacaagatgcacctgtacggcctgcacgagggcagaagagtgggccccgtgagcgccgtgggcgtgaccgcccccgaggaggagagccccgacgcccccctggcctag

SEQ ID NO: 201485 - DNA, 12669 bp, Artificial Sequence
  derived and/or modified sequence
atgatgccagcacagtacgctttaacctcctctctggttctgctcgtcctattgagcacggctagggctggccctttttctagcaggtctaacgtgacactaccagcccctaggccccccccccaaccaggtggccatacagtcggagccggagtgggctctccgtccagccaattatatgagcacaccgtggaaggaggcgaaaaacaagttgtcttcacacatcgcatcaacctcccaccctccaccggatgtggctgcccacctgggacggaacccccagtgctggcttcggaggttcaggcactgcgggtccgactcgagatcctggaggaactggtgaaggggttgaaagagcaatgtacggggggctgctgtccagcaagtgcacaggctggaacagggcagaccgacgttaggaccctgtgctccctacacggagtattcgatcttagcagatgcacttgtagctgtgagccaggctggggagggcctacatgtagcgaccctacagatgccgaaataccaccttcatcacctccaagtgcaagtggaagctgccccgatgactgcaacgatcagggacgctgcgtgcgcggacgctgcgtctgctttccaggctacaccggccctagctgcggatggcctagctgtcccggtgactgtcagggtagggggagatgtgtacagggagtgtgtgtgtgtcgtgccggcttctccgggccagattgtagccaacggagctgccccagggggtgctcccagcgaggtcggtgtgaaggcggcaggtgcgtgtgcgatcctgggtacacaggagacgattgcggtatgcgctcctgtccgaggggatgctctcaacggggccgatgcgaaaatggtcgctgcgtgtgtaatccagggtatgcaggcgaggattgcggtgtcagaagctgcccccgcggctgctctcagcgaggccgctgtaaagacgggcggtgcgtgtgtgaccccggctacaccggcgaggattgtggaactcgttcatgcccctgggactgtggagaagggggccgctgtgtggatggtcggtgcgtttgttggcccggctacaccggggaggactgttctacccgtacctgtccaagggattgtagagggcgcggcagatgtgaggacggcgaatgcatttgcgataccggctattccggcgacgattgtggggtacggtcgtgcccgggcgactgtaatcagagaggtcgttgcgaggacggacgatgtgtctgctggcccgggtatactggcacggattgtggcagccgagcatgtcctagagactgtcgtgggagggggaggtgtgaaaatggggtttgcgtttgtaacgctgggtattccggcgaagattgtggagtgagatcttgccccggtgattgcagaggccgggggaggtgcgagtctggacgatgcatgtgctggcctggatacactgggcgggactgtggtacccgggcctgcccaggtgattgtcgggggcggggccgctgcgtggatgggcggtgcgtgtgcaaccccggcttcaccggagaggactgcggctcccgaagatgccctggtgactgccgaggccacggtctgtgcgaagatggtgtctgcgtgtgtgacgcaggctactccggcgaggactgctcaacacgttcctgccctgggggatgcaggggacgaggacagtgtctcgacgggcgatgtgtctgcgaagacggctacagcggcgaagactgcggcgtccgtcaatgccctaacgattgcagccagcacggagtttgccaggatggagtgtgcatttgttgggagggatatgtgtctgaggactgtagcatcaggacctgcccctccaactgccatggtagggggaggtgcgaggaggggagatgcctgtgtgacccaggctacacaggacctacatgcgcaacaagaatgtgcccagctgattgcagaggcaggggcaggtgtgtccagggtgtctgcctctgccatgtgggctacggtggggaggactgtggccaggaagaaccgcccgcctccgcttgccccggtggctgcggtccgagagaactgtgccgcgcgggacaatgcgtgtgtgtggaaggcttccgcgggccagattgcgccattcagacctgtcctggcgattgccgcggcagaggagagtgccacgacggctcatgtgtatgtaaagatggttatgccggagaagattgcggcgaggaggtccccactatcgaaggcatgcgcatgcacctgctcgaggagaccactgtgagaaccgagtggacaccggctccagggccagtggatgcttatgaaatccagtttatacctacgacagaaggggcctcccccccatttacagccagggtaccgagtagtgccagcgcgtacgatcagcgcggacttgccccggggcaggaataccaggttaccgtgagagcgctgagggggactagctggggcctccccgccagcaagaccatcaccacaatgatagatggcccccaagatttgcgggtggtggctgttaccccaaccacccttgaactgggatggcttagacctcaggcagaggtagatcgctttgttgtgtcctatgtgagtgccggaaaccagagagtgcgactagaagttcctcctgaggcagatggaacactgctcacagaccttatgcctggagttgagtacgtggtgaccgtcactgccgagagaggtcgggccgtcagctatccagctagcgtccgcgctaacacaggaagctccccactcggactacttgggaccaccgatgagccccctcccagcggaccgagtactacccagggagcccaggctcctctgttacagcagcgtccacaagaactcggagaacttcgtgtgcttggaagggacgaaaccggtcgccttcgcgtggtatggacagcacaaccagataccttcgcctacttccagttgagaatgagggtgccagagggaccgggggcccacgaagaagtcctgccaggtgacgttcgccaggcattggtgcctccccccccaccaggcaccccctacgaattgtctctgcacggagtccctccgggaggaaaacctagcgaccccatcatctaccaggggatcatggataaggatgaggagaaacctgggaagtcctctggaccaccacgcctgggtgagttgacagttaccgatcgtacatccgactctctcctattgcgttggactgtgcccgaaggtgagttcgacagctttgtcattcagtacaaggacagggacggccaaccacaagtagtccccgtcgagggcccgcagcgtagtgcagtcattacatcactcgatcccggacggaagtacaagttcgtgctgtacggattcgtaggcaaaaaacggcacggtccactagtggcagaggccaaaattctcccccagagcgacccatcccccggcacccctccacacctgggaaatctgtgggtgactgaccctaccccggattccctgcacttgtcatggactgtgccagagggtcagtttgataccttcatggttcaataccgcgacagagacggccgtcctcaagtcgtgcctgtcgagggtccggagcgctctttcgtcgtttcctcacttgatcctgaccacaagtataggttcaccctgttcggcatcgccaataaaaaaaggtacggaccgctgaccgccgatggcacaaccgcccccgaacgaaaagaagagcctcctcgtcccgaattcttggaacagcccctgctgggcgaattaacggtaacaggggtgaccccagactccctgagactcagctggacagtagcgcagggcccgttcgactccttcatggtccagtataaagacgcccagggacaaccccaggctgtgccagtggcaggagacgagaacgaagtgacggtccctggtctggacccggatcgaaagtacaagatgaatctgtatggacttcgcggcagacagcgtgtggggcctgagtccgtggttgctaaaacagccccacaggaggacgtagacgagactccctcccccaccgagctagggacggaagctccagagagcccagaagagcccctcctgggagagctgaccgtgacggggtccagccccgactcattgagcttgttttggaccgtgcctcaagggtcttttgacagctttacagtgcagtacaaagaccgcgacggtcggccacgtgccgtgcgggttgggggtaaagagtcggaagttactgtggggggcctcgagccaggacacaaatacaagatgcacctctacggactccacgaaggtcagagagttggaccggtcagcgctgtgggcgtcactgctccacagcaggaagaaaccccacctgccaccgagtcacctctcgaacccagactgggggaacttaccgtcacagatgtcacccccaacagcgtggggctctcttggactgtcccagaggggcaatttgattccttcatcgtgcagtataaagataaagacggacagccccaggtggttccagtcgccgcagatcagcgtgaggttaccgtttataacctggaacctgaacgcaagtataaaatgaacatgtacggcctccacgatggacagcggatgggaccactctcagtcgtaatagtgactgccccgctgccgccagcccccgctacagaggcatccaaacctccactggaaccccggctaggtgagctgacggtcacagacatcactccagattcagtgggattgagttggacagttcccgagggagaatttgactctttcgtggttcaatataaggatcgggacggccaaccacaggtggtgcctgttgcggccgaccagagagaggtgacgattccagatctggagccgagccggaagtataaatttctcttgttcggaatccaggacggaaaaaggagatcaccggtgtccgtggaagcaaagaccgtagcacgtggcgacgcttctccaggcgcacctccacgcctcggcgaactatgggtcactgaccccaccccagactctctgcgattgtcctggaccgtccctgaggggcagtttgatagcttcgtcgtgcaattcaaggacaaagatggcccacaggtggtgccagtagaggggcacgagcggagcgtcaccgtgacccccctagatgctggtagaaagtatcggttcttgctatacggactgctgggaaagaagcgccacggcccactgactgcggacggaaccacagaagcaaggagcgcgatggacgatacagggactaaaagaccacccaagccccgactaggggaggaactgcaagtaacgactgtcacccagaatagcgtagggttgtcatggaccgtgcccgaggggcagttcgactcatttgtcgtgcagtataaggaccgcgatggtcagccccaagttgtccccgttgagggcagcctgcgtgaagtctctgtccctggcttagaccctgcccaccgctataagctgttgctctatggcttgcatcacggcaagagagtgggccctatcagcgccgttgccatcactgccggccgggaggaaactgagactgaaaccactgcacctacccctccggcaccagagccccacctgggtgagctcactgttgaggaggcaaccagtcacacccttcacttaagttggatggttacggaaggtgagtttgatagtttcgaaatccaatataccgaccgagacggacagctgcagatggtgcgaatcggcggcgatcgcaatgatatcacactttcaggtctcgagagcgaccacagatacctggtcacactttacggattcagcgacggtaagcacgtgggtcctgttcatgtggaggccttgacagttcctgaagaagaaaagccaagtgaaccaccaacggctactccggaacctccaatcaagccgcgactgggtgagctcacagtgaccgacgccacaccagattcattgtctctaagctggaccgtgcctgagggacagttcgaccatttcctggtgcagtaccgcaatggagatgggcagccaaaagctgtgcgcgtgccaggacacgaggagggagtcaccatttctggactggagcctgaccataagtacaaaatgaacctgtatggtttccacggggggcagcgcatggggcccgtgtccgtggtgggcgtgaccgccgccgaagaggaaactccctcccctaccgaacccagtatggaggcacccgaacccgctgaggaaccactgctgggggagctgactgtcaccgggtccagtcccgacagcctgagcttgagttggaccgtgccacagggacgcttcgactccttcacggtccagtataaagaccgggacggaagaccccaggtggtaagggtggggggcgaggaaagtgaggtgacagttggcggattagaaccagggcggaagtacaagatgcacctgtacgggttgcacgaggggcgccgcgtgggacctgtatcagccgtgggggttaccgcgccagaggaggaatcccctgacgcccctcttgccaagttgaggctcggacagatgaccgtgcgcgatatcacctcagactctttatccctcagctggacagtgccagaaggacagtttgaccactttctcgttcagttcaagaacggagatgggcaacccaaggccgttcgggtcccgggccacgaggacggagtgaccatatcgggtttggagcctgaccataagtacaagatgaatctgtatggatttcacggagggcagcgcgtgggtcctgtctctgccgtcggtctgaccgctcccgggaaagatgaagagatggctccagcatccaccgaaccacccacacccgagcccccaattaagccaaggttggaggagctgactgtgaccgacgcgacgcccgattcactttcactgtcctggaccgtgcctgaaggccaattcgatcatttccttgtgcagtataaaaacggcgacggacagccaaaagcgaccagagttcctggacatgaggatcgggtgactatctctgggctggagcccgacaataaatacaagatgaatttatatggcttccacggaggccagagagtcggcccagttagtgccataggtgtcacagccgctgaagaagagactccatcccccactgagccgtctatggaggcacctgagccccctgaagagcctcttctgggcgaacttaccgtcacggggtcaagccctgactcactttcattatcttggaccgtgccccagggcaggtttgacagtttcactgttcagtacaaagacagggacggcagaccccaggttgtgagagtcgggggggaagagagtgaggtcactgtcggggggctggagccgggccgcaaatacaaaatgcacctgtatggactccatgaggggagacgagtgggacccgtgtccacagtgggtgtgaccgcgccacaggaggacgtggacgagacacccagtccgacggagcccgggaccgaagccccagaaccgcccgaagaaccactgttgggcgagttaactgtcaccgggagttcgcccgactccttgtctttgtcttggacggtaccacagggtagattcgattcctttaccgtgcagtacaaggaccgggacggccggccgcaggccgtgcgggtgggaggccaggagtccaaggtgacggtgaggggccttgagccagggaggaaatataaaatgcacttatatgggctgcacgagggccgccgcctcgggcctgtcagtgctgtcggcgtaaccgaggacgaggcggagaccacacaggccgtaccaacaatgacacctgagcccccaataaagccaagacttggagaattaacaatgacagatgcaacgcccgactctcttagcctgtcctggacggtgcccgaaggccaattcgatcacttcctggtgcagtaccggaacggggacggtcagcctaaagccgtgagggttccaggacacgaggatggagttaccattagcgggctcgaaccagatcacaagtataagatgaatctgtatggctttcatgggggccagagggtgggtccgatctcagttatcggggtcaccgccgcagaggaggagaccccatcaccaacagagctgagcaccgaagcacctgaaccaccagaggagcctctgctgggagaactgaccgtcactggttctagccctgatagcttgtccctatcatggacgattcctcagggacatttcgacagcttcacggtgcagtataaagatcgggacgggcgcccccaggtgatgcgggtgcgcggcgaggagtccgaagtgactgtcgggggacttgaacccggacgcaagtacaaaatgcacttatacggcctgcatgaaggtagacgcgttggacctgtcagtaccgtgggcgtgactgtcccaaccactacccctgaacctcctaataagcccaggctgggagaactaactgtcaccgatgctactcccgacagcctttccctctcctggatggtgcccgaaggccagtttgatcattttctggttcagtataggaatggcgacggacagcccaaggtagtgagggtaccaggacacgaagatggagtgacaatatcaggtctggagcccgatcacaaatacaaaatgaacctctacgggtttcatgggggccagcgcgtgggccctatctccgtaatcggggtaactgcggccgaggaagagacgcctgctcctacggagcctagcaccgaggccccagagcctcctgaagaacccctgctgggcgagttaactgtcactggaagcagccccgacagtttgtccctgagctggacgataccccagggcagattcgattcatttactgttcaatataaagacagagatggcagaccccaggtggttcgagtgcgaggcgaggaaagcgaagtgactgtcggaggattggaacctggttgtaagtataaaatgcatctgtacggcctccatgagggccaacgggtggggcccgtgtcagcagtcggggtgaccgtacccaccatgactccagagccccccatcaagccgcgcctcggagagttaacagtcacggatgccaccccagattctctgtcattatcatggatggttcctgaagggcaatttgaccattttttggttcagtatagaaatggcgatgggcagcctaaagctgttagagtaccaggacatgaagatggcgtgaccataagtgggctggagcccgatcataagtataaaatgaatctgtatggcttccacggaggccaaagagtgggtcccgttagtgcaattggggtaactgaggaggagacaccaagtccaacggaaccctccacagaggccccggaggctccagaagagcccctccttggtgaactgacagttactggtagttcacctgattcactgagcctgtcctggacagttccccagggcaggttcgactcttttactgtgcaatacaaggatcgcgatgggcaaccacaggtagtgagggtgcgaggggaagagagtgaggtgaccgtgggcgggctggaacccggacggaaatacaaaatgcacctctacggcctgcatgagggccagcgtgttggtccagtgtcgaccgtgggaatcactgcacctctaccaactccgctccccgtggagcctagactcggcgagttggcagtggctgccgttaccagtgattccgttggactttcatggacagtagcccaggggccgttcgattcgtttctggtgcagtaccgggatgctcaagggcagcctcaggcagtgcctgtttcaggagacctgagggcggtagctgtgagcggtttagacccagctagaaagtacaagtttttactatttggtttgcagaacgggaagagacacggtcccgtccctgttgaagcccggacagccccagacacaaaacccagtcctagattgggggaactaaccgtgacggatgctactccagacagtgtcggattgtcttggacagtgccagagggagaatttgacagttttgtggtgcagtacaaagacaaagatgggagactgcaggtcgtccctgtagccgctaatcagagggaggtaactgttcaaggcctcgaaccctcgaggaaatatagattccttctgtacgggctttctggtagaaagcgtttggggcctatctctgcagattccaccacggctcccctggagaaggaactgcctcctcacctcggggagctcactgtggccgaggagactagctcatctctccggttaagctggactgtggcccaagggccctttgattccttcgtagtccaatacagggacaccgacgggcagccccgggctgtgcctgtggctgccgatcagaggactgtcactgtggaggatctggagcctggaaagaagtataagttcttattatacggtcttcttggaggcaaaaggttgggcccagtctcggctctgggcatgaccgccccggaggaggacactccagcccccgaacttgcgcccgaagcccctgaaccgccagaagaacctcggcttggcgtgctgacagtgacagacacaacacccgatagtatgagactgagctggagtgtggctcaagggccattcgacagttttgtagtgcaatatgaagacacaaacggacaaccccaggccctgctggtcgatggagatcagtcaaagattttaatttccggccttgagccttcaaccccctaccggttcctgctgtacggactccacgaaggaaaacgcttaggccccctttcagcagaaggaaccactggtctggcacccgccgggcaaacaagtgaggaatctagaccaaggctctctcagctgagcgtgacagacgtgaccacctcaagtttgagattgaattgggaggcccccccaggtgccttcgacagctttctgctgaggttcggcgtgccatctccttcgaccctcgagccgcatcccaggcccctgctgcagagagagctgatggtgcccggtacgcgtcacagtgcagtgttgcgggacctcaggtctggcactctttatagcctgacattatatggactgagaggacctcataaggcagattccatccagggaacagcccgaactctgagtcctgttctggaatctcctcgggaccttcagttctccgagattcgcgagacatctgcaaaagtgaattggatgcctccacccagtcgtgctgacagcttcaaagtgagctaccagctggctgatgggggcgaaccgcagtcagtgcaggttgacggccaggcgcgcacccagaaactgcaaggacttattccaggcgctagatacgaggtcactgtggtgtcagtcaggggattcgaggaaagtgaacccctgaccggcttcttaacaacagtgcccgatggccccactcaattgcgggctctgaacctaaccgagggttttgctgtgctgcactggaaacctcctcagaaccccgtcgacacttatgacgttcaagtaaccgcacctggggccccgcccttacaagccgagacacctgggtctgctgtcgactaccctctccatgatctggtcctgcacacgaactataccgctactgttcgtgggctccggggacctaacctgacaagccccgcatccatcacgtttactaccggcctcgaagctccacgtgacctggaggctaaggaggttacccctaggaccgccctgctgacctggaccgaaccacctgtgagaccagccgggtatctcttaagtttccacacacccggcggccagaaccaggagattctcttacccggcggcattacatcccaccagctattgggtctgttcccatccacgtcttataatgcacgcctgcaggctatgtggggtcagtcgctgcttcctcccgtatcaacttcatttacgaccggcgggctcaggatccccttccctcgcgactgtggggaagagatgcagaatggcgctggagcgtcacgcacctcaacaatctttctaaacggtaatagggagcgccctctaaatgtgttttgcgacatggaaacagacggagggggttggttggttttccagagacggatggatggacagacagatttctggagggattgggaagattatgcccacggttttggcaatatctccggcgaattttggctcgggaatgaagcactgcattcactgactcaggcaggagactactctatgcgcgtagatctgagagcaggcgatgaagcagtgttcgcccagtacgattcttttcacgtggactctgcggcagaatactacaggttgcaccttgaggggtaccatggcaccgctggggacagcatgtcatatcattcgggcagtgtgtttagcgcgagggaccgggaccccaactcattgctgatttcatgtgctgtcagctatcgtggagcttggtggtatagaaattgtcactatgccaatttgaacggcctttatgggtccactgtcgatcaccagggtgtcagttggtaccactggaagggctttgagtttagcgtgccattcaccgaaatgaagctgcgtccccggaattttcgttccccagctggagggggctag

SEQ ID NO: 201486 - DNA, 6450 bp, Artificial Sequence
  derived and/or modified sequence
taggctgaagaagaaacaccctcaccaacagagcccagcatggaggccccagaaccggccgaggagcctctcctgggagaattgaccgtcacaggatcctctcctgactccctgtctctgtcgtggacggttccccaggggcggttcgatagcttcacagttcaatacaaggaccgggacggtagaccccaagtggtgagggtcggaggggaggagagtgaagtgaccgtgggaggcttagagccaggaagaaagtacaaaatgcatttatatgggttacatgagggcaggcgcgtgggtccggtcagcgctgtaggtgtgacggcacctgaggaggagtctccagacgcccctctggccaagctcaggctagggcaaatgaccgtgcgggacataactagtgattcgctgtctctgagttggaccgtgcccgaggggcagtttgatcattttctggtgcagttcaaaaatggcgacgggcagcccaaggctgtgcgggtccctggtcacgaggacggcgtaacaatctcaggccttgaacccgatcataagtataaaatgaacttgtatgggtttcacggcgggcaacgtgttggccctgtgagcgcagtcggcttgacggcacctggcaaggatgaggaaatggccccggcgagtacagagccacccactcccgagccgcctattaagccacgtttggaagaattaactgtgactgacgctacaccggattcactgagcctctcctggactgtgcctgagggacagttcgaccatttcctggtgcagtataagaatggggacggacaacccaaagccacccgggtccccggccatgaagacagggtgacaattagtggtctggaacctgacaacaagtacaaaatgaacctgtacggctttcacggcgggcagagggttggtcctgtgtccgccataggcgtgaccgcagctgaggaggagactcctagccccacggagccaagcatggaagcccctgaacctcccgaggaaccactcttaggcgagttaacagtgaccggaagcagccccgactcattatcactttcttggaccgttccccagggacgttttgacagtttcacagttcagtacaaggatagggacgggagacctcaggtggttcgtgtggggggggaggagagcgaggtcacagtgggcggcctcgaacctggccgcaagtacaagatgcacctctacggacttcatgagggtcgaagagtcggaccagtgtccacagtgggcgtcactgctccccaggaggatgttgacgaaacaccaagccctactgagcctggtactgaagctcctgaacctcccgaggaaccacttctgggagagttgactgtgaccggatctagtcccgacagccttagcctcagctggaccgtgccccaagggagattcgattctttcaccgtccagtataaggatagagatggcaggccccaggcggttcgagtcgggggtcaggagtcaaaagttacagtcagagggctggaaccgggaaggaaatataagatgcacctctacggactgcacgagggacggagactgggccctgtgagtgctgttggcgtcacagaggatgaagcagaaactactcaagctgtgcccactatgacccctgagccaccgattaagcccagactcggggagttgaccatgaccgacgcgacccccgactccctctcactgtcttggactgttccagaaggacaattcgaccacttcctggtacagtacaggaacggagacggccagccgaaggcggttcgggtgccgggacacgaagacggtgtgaccatctctggactggaacctgaccacaaatataagatgaatctctacggcttccatggtggtcagcgtgtgggcccaatctctgtcacaggcgtgacggctgccgaggaggagactccctccccaacagaactgtccacagaagcaccagagccaccggaagaaccactgctgggagagctgacagtgaccgggtcctccccggattctctctccctttcttggacgataccacagggccactttgatagttttacagtgcaatacaaagatagggatggacgcccccaggtgatgagggtacgaggtgaggaatcagaggtaacagtggggggactcgagcccggacggaaatacaagatgcacctgtatgggttgcacgaaggccgtcgcgtgggtcctgtgagtaccgtgggggtgacagtccctaccacgacacccgagccacctaacaagcctcggcttggggaactcaccgtcacggacgctacaccagactccttgtcgctgtcatggatggtgcccgagggccagttcgatcattttttggtccaatacagaaatggagacggccaaccaaaggtagtgcgagtacccgggcatgaggatggtgtcactatatctggactggagccagaccataagtacaagatgaacttatacggtttccatggcggccagagggttgggccgataagcgtgatcggggtgactgcagccgaagaagagacccctgcccctacagaaccatctaccgaggctcctgaaccgcccgaagaacctttgctgggtgagttaacagtgaccggaagtagcccggatagcctgtctttgagctggactataccacaaggaaggttcgatagcttcaccgtccagtacaaagaccgtgatgggagaccacaggtggtacgtgtccgcggtgaggagtctgaggtgactgtaggtggcttagaacccgggtgcaagtataagatgcatctgtacgggctgcacgaggggcagcgggtcggcccggtgagcgccgtgggtgtgactgtgcctacaatgacaccagaaccccccattaaaccccgtcttggcgaactgaccgtgacggacgcgactcccgattcactcagtctatcgtggatggtaccagagggacagtttgatcacttcctcgtgcaatacaggaacggagacggacagcccaaggccgtcagggtgcccgggcatgaggatggagtgacaataagtgggttggaacctgatcacaagtacaagatgaacctgtatggatttcacggtggacagcgcgttggacctgtctctgccatcggggtcaccgaggaagagacgccatcacctaccgagccaagtacagaggcccccgaggcacccgaagaaccccttttaggtgaactgactgtaacaggctcctcccccgatagcttgtcactgagttggacagtcccccaggggcgcttcgattcgttcactgtgcagtacaaagaccgagacgggcaaccccaagtggttcgcgtgagaggtgaagagagcgaagtgaccgtggggggtctggagcccggaaggaagtacaagatgcacctgtacgggctgcatgaaggccaacgggtgggtcccgtgtcaaccgttggcattacagcccccctgcccacacccctgcctgtggaacctaggctgggtgaactcgccgtggcagcagtgacctccgattcagtcggcttgtcttggactgtcgcccagggaccctttgactcctttctggtccaatatcgggacgcccagggacaaccgcaagctgtgccggtgtcaggtgacctgagggcagtggcagtgtcagggctcgaccctgcaagaaagtataaatttctgctctttggtctgcagaatggaaaacgacatggccccgttcccgtcgaggccaggacggcacccgacacaaagcctagcccgcggctgggcgagctcacggtcactgacgccacaccagactcagtcggcctctcttggacagttcctgaaggggagttcgacagctttgttgtacagtataaagataaggacggtagactgcaggtggtccctgtcgcggccaaccagagggaagtcacagttcaaggcctcgaaccctctcggaagtatcgtttcttgctgtatgggttgtcggggcggaagcgactcggacctatctctgccgactccacaacagccccactcgaaaaggaactcccaccccacctcggcgaactgactgtcgcagaggagacctcatccagcttacgcctcagttggacagttgcacaaggaccttttgatagctttgtggtgcaataccgggataccgatgggcagccccgtgctgtccccgtcgcagccgaccagcggactgtcactgtcgaggatctcgagcccggtaagaaatacaagtttctgctctacggcttgctaggtgggaagcggcttggacctgtctccgctctggggatgaccgccccagaggaagatacccccgcaccggagctcgctccagaagcgcccgagcctccagaagagccacgcctcggcgtcctcacggttacagacactacccccgactcaatgaggttatcttggtctgtcgcccaggggcccttcgattcttttgtggtccaatacgaagataccaacggacagccccaagcactacttgttgatggagaccaatcaaagatcctgatttcaggcctcgaaccgtccacaccctatcgctttttgctgtacggcctgcacgagggaaagcgcctcggccctctgagtgcggaggggactactggcctcgcaccagccggacagacttccgaggaatcacggccccgcctcagccaactctcagtcacggatgtcacaacatccagtctacggttgaattgggaggccccccctggagcattcgatagctttctgcttcgatttggagtgccctctcccagtactctggaacctcacccgaggcccttactgcagcgagagttgatggtgccgggcacgcgccattcagctgtgctgcgggacctgcgttccggtacactgtacagcctaacactttatggattaagaggacctcataaagcagattccattcagggcacggcgcgtacattgtcacccgtgttggagtctccgagagacctgcagttcagcgaaattcgtgaaacgagtgcaaaagtgaactggatgccaccaccttcacgagcagattcctttaaagtgtcgtatcaactggcagatggcggagaaccacagtctgtacaggtcgacggccaagcaagaacgcagaaactgcaagggcttattccaggtgctaggtatgaggttaccgtggtgtcagtacgaggtttcgaggaatcggagcctttgaccgggttcctgactacagtgccggatggtcctacacagttaagggccctgaatttgacggaaggattcgccgtacttcattggaagcccccccagaacccggtcgacacatacgacatccaggtgaccgcccctggtgccccacccctgcaggcagaaacccctggctcagccgttgattatcccctacacgacctggttcttcacacaaattatacagcaactgtccgagggcttcggggtcctaacctcacttccccagcatccatcacatttaccaccgggctcgaggcccccagggatttggaggccaaagaggtcacaccaagaaccgccctcctgacatggactgagcctccagtgaggcccgctggctatctgctgagctttcacactccaggtggccagacccaagagatcttgctccctggagggattacatctcatcagcttctggggctgtttccatctacatcctataatgccagacttcaggcaatgtggggccagtctctgctccctcccgtctctacctcatttacaacaggtggccttagaatcccattcccgcgcgattgcggggaagagatgcagaacggtgcaggagcatcaaggactagcaccatctttttgaacgggaaccgtgagaggccactgatcgtgttttgtgacatggagacagatgggggcgggtggttggtctttcagcgtcgcatggatgggcagacggatttctggagagactgggaggactacgctcatggtttcggaaacatcagcggggagttctggctcggcaatgaggccctacattcactgactcaggcgggcgactactccatgcgcgtcgacttgcgtgctggtgatgaggcggttttcgcccagtacgacagtttccacgtggatagtgccgccgagtattatcgtttgcacctggaagggtaccacggaaccgccggtgactccatgtcttaccatagcggctctgtctttagcgcccgggaccgggatcccaacagcttactcataagttgcgctgtcagctatcgaggagcttggtggtataggaattgtcattatgctaaccttaacggcctgtatgggagcaccgttgaccatcaaggagtatcctggtaccattggaaaggctttgagttttccgtaccattcacagagatgaagttgagacccaggaatttccgttcgcctgccggcggcggttag

SEQ ID NO: 201487 - DNA, 9891 bp, Artificial Sequence
  derived and/or modified sequence
tgatcttcaccactgggattactggggactacggacgaaccacctccatccggcccgagtaccacccaaggtgcccaggccccactgctccagcagaggccacaggaactcggggagctgagggtactcggaagagacgaaacgggcaggctgagagtggtgtggaccgcgcagccagatacgttcgcctatttccagttacgcatgagggtgccagaaggacctggcgcccatgaggaggtcctacctggcgacgttaggcaggcactagtaccgccgcctcctccggggacaccctacgagctatcattgcacggggtgcctcccgggggtaagccaagtgaccccatcatatatcaggggatcatggacaaagacgaagagaaacccggaaagtccagcgggcctccccgtctaggggaactcactgtcacagatcggacatccgactctctcttgctccgctggactgtgcccgagggagaatttgattctttcgtcatccagtataaagaccgcgatgggcagccccaagtggtgcctgtagaggggccacagcggtcagctgtgatcaccagtctcgaccccggcaggaagtataagtttgtgctttacggcttcgttggcaaaaaacgtcacggacctctggtagctgaggctaaaatcctgccacagagtgacccatcacctgggacccctccccatctgggcaacttgtgggttactgacccaactcccgactcattacacttgtcctggaccgtgcccgaagggcagtttgataccttcatggttcagtaccgcgatagggacggcaggcctcaggtggtcccagtagagggtccagagagatctttcgtggtgtctagtctcgacccagatcacaagtataggtttactctttttggaatcgctaacaagaaacgctatgggcccctgaccgcagacggcactacggcacctgagcgcaaagaggagcctcctagacctgagtttctggaacaaccccttctcggggagcttactgttacaggcgttactcccgattccctgcgtctaagttggaccgtagctcagggtccctttgattcttttatggtccagtacaaggatgcacagggccagccccaggctgtacctgtcgccggcgatgaaaatgaagtcaccgttcctggactcgacccagacagaaagtataagatgaacctctatggactgcgggggcgacagagagtggggcccgaatcagtggtggcaaaaacagcccctcaggaggatgtggacgaaaccccgtcacctactgagctgggtaccgaggccccggaatcgccagaagaacctcttcttggagagttgactgttaccgggagtagccccgatagtctgagccttttctggaccgttccacagggttcattcgatagttttaccgtgcagtacaaggatcgggacgggcgtccccaggctgtgcgcgtgggcgggaaggaatctgaggtgacagtggggggattggaacctggacataagtataagatgcacctctatggtctccacgagggacagcgggtgggcccagtctccgcggtgggtgtcacggctccacagcaggaggaaacacccccagccactgaaagccccttagagccgcggcttggcgagcttacagttaccgatgtcacgcctaactccgttggcttaagttggacagtccctgaaggccaattcgatagtttcattgtgcaatacaaagacaaagacggccagccccaagtggttccggtggccgctgatcaacgtgaggtgaccgtttataatcttgagcctgaacgaaagtacaagatgaacatgtacggcctccacgacggacagagaatgggtcctcttagcgtggtgattgtgacagctcccttgcccccggcacctgcaaccgaggccagtaagcctccactggaaccccgcctgggcgaactgacagtgactgacattacacccgattctgttggccttagttggaccgtgccagaaggcgaatttgacagttttgtggtacagtacaaagatcgagatggacagcctcaggtggtcccagtggctgctgaccaacgggaagttactattccggacttggagccaagccgtaaatataagtttcttctgttcgggatccaggacgggaaacgccggtcccctgtgagtgtcgaagcgaagaccgtggcccggggcgacgccagcccaggcgcaccgcctcgcctcggtgagctctgggtgaccgatccgactccggattcactcagactttcctggaccgtccccgaagggcaattcgacagctttgtagtacagtttaaagacaaagatgggccccaggtggtcccggtggaggggcacgaaaggtccgtgaccgtcacacctctcgatgctggcaggaaatacagattcctgttgtatggtttattgggaaaaaagaggcatggaccattgaccgccgacggcacaaccgaggcccggtccgccatggacgataccggtacaaaaaggcccccaaaaccacggcttggtgaggagcttcaggtgacaacagtgacccagaattccgtgggcttgagctggaccgtgcctgaagggcaatttgattccttcgtcgttcagtacaaggatcgagacggacaaccgcaggtggtgcctgtcgagggctccttgcgagaggtatccgtgccaggcttggatccagctcataggtacaagttgctcctctacggtttgcatcacggtaaaagggtgggacccatcagcgcagttgctataactgctggcagagaggagactgagaccgaaacaacagcaccaacacccccagctccagaaccccaccttggcgaattgactgtcgaggaggcaacgagccacacactgcatctctcttggatggtcacagaaggagaatttgactctttcgaaatccagtataccgacagagacggacagctacagatggtgaggattggaggcgatagaaacgacattacattgagcggccttgaaagcgaccacagatacctcgtgacgctgtatggcttttccgacggaaaacacgttggccccgtgcacgtcgaggccctcactgtccccgaggaagaaaagccctccgagcccccaaccgccactcctgaacctcccatcaagcccagattaggggagctgacagtgaccgatgccacccctgactcactgagtctgagctggacagtgccagaagggcagttcgatcactttcttgttcagtaccggaacggggatggccagcccaaagctgtcagggtcccaggccatgaggagggggtaactatttcaggcctggagcccgaccacaagtataagatgaatctgtatggatttcatggagggcagcggatgggcccagtgtcagtggtgggcgtgacagcagcagaggaagagactccaagtcccaccgagcctagtatggaggcacctgagccagccgaagagcctctgttaggagagctgactgtgactggaagcagccccgattctctgagtctctcttggacagtgccccagggccgctttgatagcttcactgtgcaatacaaggacagagacggtcgaccacaagtcgtcagagtaggtggtgaagaatccgaagttacggtcggtggactggagccaggtaggaaatacaaaatgcacctgtatgggttacacgagggaaggcgggtgggcccggtttctgcagttggcgtcacggctcctgaggaagaaagccccgacgcgcctttggcaaagcttcgactcggacagatgacagttcgagacataacaagcgattccctaagtctgagctggacagtgcctgagggacagtttgaccacttccttgtccagttcaaaaacggagatggtcagcccaaggccgtgagagtgccaggtcatgaggacggcgtgactatatccggtctcgagcctgaccacaaatataagatgaatttgtacggattccacggcggccaacgggtgggccccgtatccgccgtcggcctgactgcgccggggaaggacgaggagatggctccagcatcaacagagcccccgacacccgaaccccctatcaagccacgcctcgaggaattaactgtgaccgacgcgacccctgatagcctgtctctgtcatggactgtaccagaaggccaattcgaccacttccttgtgcaatacaaaaacggcgatggacagcccaaagcaactagagtgcccggacacgaagatagggtgactatctctggactcgaacccgataataaatataaaatgaacctctacggatttcatggagggcagcgggtgggtcctgtaagcgccatcggtgtgactgccgctgaagaagagactccctctccaacagaaccatcaatggaggcgcccgaaccccctgaagagccactgttgggagagttaacggtgactggttcctctcccgactccctttccttaagctggaccgtgccccaggggcggttcgattcctttactgtacagtataaggaccgtgatggcagacctcaagtggttagagtgggaggtgaagagagcgaagtgaccgtcggtggacttgaaccaggcaggaagtataaaatgcatctttacggcttgcatgagggaagaagagtcgggcccgttagtacagttggagtgacagctccccaggaagacgttgacgagacgcctagcccaaccgaaccaggaaccgaggcccctgggccccctgaggagccactcctcggggagctaacagtgactggcagctcacccgacagcctgagtctatcatggactgtacctcaaggtagatttgacagctttacagtgcagtacaaagaccgcgatggtcgcccccaagccgtacgggtgggtgggcaggagtctaaagtaactgtacgtggtctggagccgggcaggaaatataagatgcatctgtacgggctccacgaaggacggcgccttggccccgtgtctgcagttggagtcaccgaagacgaggccgaaaccacgcaggcagtcccgactatgactcctgagccccccattaaaccgcgactgggagaactcaccatgacagacgctacacccgacagcctctccttgagttggactgtgcccgagggacaattcgaccatttcctggtgcaatacagaaatggagacggccaacccaaggcagtacgcgttccgggacacgaggatggcgtgacgatctccgggttagaacctgatcacaagtacaaaatgaacctctatggatttcatggtgggcaaagagttggaccaatctccgtaataggagtaaccgctgcagaggaggagacacccagtccaactgaactgtctactgaggcccccgagccgccggaggagcccctgctaggggagctcaccgtcacaggctctagccccgactcgctaagcctctcttggacaatcccccaaggtcactttgactccttcacagtgcaatacaaagacagagatgggagacctcaagtgatgcgggtgcgaggagaggagtccgaggttactgtggggggactggaaccaggccgcaaatataagatgcacttatacggcttacacgaaggccgacgcgttgggccagtgtctaccgtgggagtgacagtacccactaccacccccgaaccccctaacaagcccaggctgggggagttaacggtcaccgatgccacccccgacagcctgtccttgtcctggatggtaccagagggccagttcgatcacttcctagtgcagtatagaaacggcgatggccagccgaaggtggtgagagtgcctggtcatgaggatggagttaccatttccgggcttgaacctgatcataagtataagatgaatttgtacggcttccacggcgggcagcgagtcggtccaatctcagtcatcggcgtgaccgctgcggaagaagagactccggctccaactgaaccctccaccgaggcgcccgaaccccctgaagaaccactcctgggagagttaactgttaccggatccagtcccgactccctcagcctctcttggactatcccgcaaggaaggttcgactcttttaccgtgcagtataaggatcgcgacgggcggcctcaagtcgtgcgggtgaggggtgaggagtccgaagtgaccgtgggggggctcgaaccagggtgtaaatataagatgcacctatacggtctccacgagggccagagagtcggtcctgtaagcgctgtaggtgtgacagttcccacaatgactccagagcccccgatcaaacccagactcggcgaactaaccgtcacagatgcaacgcccgactccttgagcttgtcttggatggtcccagaagggcagtttgatcattttctggtccagtatcggaatggggatgggcagcctaaagccgtgcgcgtacccggtcacgaagacggagtgaccatctcaggcttggaaccagaccacaagtacaagatgaatctgtatgggtttcacggtggacagagagttggacctgtgtccgccattggcgtgaccgaggaggaaactccttcccctaccgagcctagtacagaggcacctgaagcccccgaggagccccttttaggggagctcactgtaactggatcatcgcccgatagcttgtccctgtcctggaccgttcctcagggcagattcgactcttttactgtacagtacaaggatagagatggtcagccccaggttgtgagagtgcgcgttgaagagtctgaggtgaccgtggggggtttggagcctggacggaagtataaaatgcatctgtacggactccatgaaggtcagcgcgtcggacccgtgtctaccgtcgggattacagctcctctgccaacgcccctccccgttgagccccggttgggagagctggctgtggccgcagttaccagcgattctgtggggttgagctggacagtcgcacaagggccattcgactcatttttagtgcagtaccgtgatgcccagggccagccccaggccgtccctgtgtccggggacttgagagccgtggccgtgtcagggttggatccagcccgcaagtataaattcctcctgttcgggttacagaacggtaaacgtcacggccctgttcctgtggaggcccggaccgctcccgatacgaagccctccccccgcttaggagagctcaccgttactgacgcaactcccgattcagtggggctgagctggaccgtcccagaaggagagtttgactcattcgtggtacagtataaagacaaagatgggcgcttgcaagtcgtgccagtcgccgctaatcagagggaagtgacggtgcagggactcgagcctagtcggaagtaccgctttctgctgtatggccttagcggcaggaagagactcgggcccatcagcgcagattccaccactgcccccctggagaaagagctcccaccccacttgggagaactgacggtagccgaggaaacttccagctcccttagattgagctggactgttgctcagggccccttcgacagcttcgtggtacagtaccgcgatacagatggccagcctcgcgctgtacctgtcgctgccgaccagcgcaccgtcacagtggaagacctggagcccggtaagaagtacaagtttttgctgtacggattgctggggggcaaacgactcggtcctgtctctgctctcggaatgaccgcaccggaggaggacacccccgcccctgagttggctccagaggcgccagagcctcctgaagagccaagactcggagtactgacggtgacagacaccacccccgattccatgcggttaagttggtctgttgcacagggaccttttgacagtttcgttgtgcagtatgaagatacaaacggccagccgcaagccttactggtggacggtgaccagtcaaaaattctcatatcaggtctcgagccatccacaccatatcggtttctactttacgggctgcatgagggcaagcgcctgggtcctctctccgccgaggggaccacaggcctggcccccgccggacagacatccgaggagagtcgccctagactgagtcagttgtccgtcactgatgtcacgacatcgtcactcaggttaaactgggaggctcctcctggtgcctttgacagctttctgctgcggttcggggtgccatctccttccactttagagccacaccccaggcccctcctgcagcgagagctcatggttcctggaactagacattcagctgtcctgcgcgacttgagatcagggacactgtacagcttgactttgtatggactgaggggaccccacaaggcggactcaatccagggcaccgccagaaccctgtctccagtactcgaatccccgcgtgacctgcagttttcagagattcgagagaccagtgcaaaggtcaattggatgccacctcctagtagggcagattcatttaaagtcagttaccagttggccgacggcggcgagcctcagtccgtgcaagtggacggtcaggcaagaactcagaaattgcagggacttatacctggagcacggtacgaagtcactgtggtgtccgtgcggggctttgaggaatctgaacctctcaccgggttcctaactaccgtccctgacgggccaacacagctgcgcgccttaaatctgactgagggattcgccgtcctgcattggaaacctccccagaaccccgtcgatacctacgacgtgcaggtaactgcccccggagccccccctctgcaggctgagacacctgggtctgcagtggattatcccctgcacgacttggtgttgcacaccaactacaccgctactgtgagaggcttacgtgggcctaatctgactagccccgccagcataacctttactaccggcctggaggcgcccagggatctggaggccaaggaggtgactcctcggactgcgctgttgacctggaccgagccgcctgttagacctgcgggttaccttctgagttttcataccccaggaggtcagaatcaggagatcttgctgccaggaggtatcacttcccaccaactcctgggcctgtttccatccacctcttacaacgcacggcttcaggctatgtggggtcaatctctgctcccccccgtgtccacctcctttaccaccgggggccttaggataccatttcctagagactgcggcgaagagatgcagaatggcgccggtgccagtaggacatctaccatcttcctcaacggcaatcgtgaacgtcccctgaatgtgttttgcgatatggaaacagatgggggcggatggcttgtctttcagaggcggatggacggtcagactgacttttggagggactgggaggattacgcacatgggttcgggaacatatcaggagagttttggcttggcaatgaggctctgcactccctcacccaggcaggcgactactccatgagagttgatctgagggctggagacgaagctgtattcgcccagtacgatagcttccacgttgactcagccgcagaatattatcgactccacttagaaggataccacgggactgccggcgacagtatgtcataccacagcggttctgtattttctgcaagagaccgggatcccaattcattgttaatatcctgcgcagtcagctacagaggggcctggtggtaccgcaactgccactatgcgaatctgaacgggctgtacgggtctaccgtggaccaccaaggcgtgtcctggtatcactggaagggctttgagttttcagtgccctttaccgagatgaagctgaggccccgtaacttccggagtcccgccggaggggggtag

SEQ ID NO: 201488 - DNA, 12669 bp, Artificial Sequence
  derived and/or modified sequence
atgatgcctgcccagtacgccctcaccagcagtctcgtgctgctagtcttgctgtccacggcccgagccgggcccttttcttctcggtccaacgtaacacttcctgccccccggccaccaccacagcctggcggccacacagtgggggccggggtggggtccccctcatcacagctttatgagcatacggtcgagggcggcgagaagcaggtggtgtttacgcataggataaaccttcccccctccaccgggtgtgggtgcccgcccggaaccgagcctccagtgctagcctcagaagtgcaggcgctgcgcgtgcgcctggagatattggaagagctggtgaaagggctgaaagaacagtgtactggcggctgttgcccggccagcgcgcaggctggaaccgggcaaacagatgtcagaaccctctgttctctgcacggggtgtttgacctttcacgttgtacctgctcctgtgagcctggatggggagggcctacctgttcagatcccaccgacgcggagataccgccctcttcccccccgagtgcgagcggtagctgtccagacgactgcaatgatcagggtcgatgcgtgcgcgggaggtgtgtatgctttccaggatatactgggccctcctgcgggtggcctagctgtcccggggattgccagggcagaggcagatgcgtacagggagtgtgcgtgtgccgggcaggtttttccggccctgactgctcacagcgctcctgtcctagagggtgcagccagcgcggtagatgcgaaggagggagatgtgtatgtgatcctgggtacactggcgacgactgcgggatgagatcatgcccaagagggtgcagccagagaggcaggtgtgaaaacgggcggtgcgtctgtaatcccggttacacaggcgaggactgcggcgtgaggtcatgtccacgaggttgctcccagagaggcaggtgtaaggatggcagatgtgtgtgcgatccaggctacacaggtgaggactgtggaactagaagttgtccctgggattgcggggaaggcggtcggtgcgtcgacggtcggtgtgtttgttggcccggctacacaggggaagattgtagcacaaggacatgccccagggattgtaggggtaggggccgctgtgaggacggggagtgtatatgcgataccgggtattctggagatgattgtggagtaagatcctgtcccggggattgcaaccagcgtggcagatgcgaggatgggagatgcgtttgctggcctggctacactggcaccgactgtggctcccgggcgtgtcctcgcgactgcaggggaagaggccggtgtgaaaacggcgtgtgcgtgtgcaatgctgggtactctggagaggattgtggtgtgcgcagctgtcccggcgattgtcggggacgagggcgatgtgagtcgggaagatgtatgtgttggcccgggtacacgggacgggattgcggaacacgcgcttgtccgggggattgtagaggccggggcaggtgtgtggacgggagatgtgtgtgcaaccctggctttacaggggaggattgtggatcacgaagatgcccgggcgattgcaggggtcacgggttgtgcgaggacggcgtgtgcgtgtgcgatgcaggatacagcggggaggattgcagcacccgatcctgcccgggtgggtgtcgcggcagagggcagtgcctggacggccggtgtgtttgtgaggacggctatagcggggaagactgtggcgtcagacagtgccctaacgactgtagccagcacggggtttgccaagacggcgtctgcatttgctgggagggctatgtgtctgaagactgttcaatccgcacctgcccaagcaattgtcacggaagggggcgatgcgaggagggccggtgcctgtgcgaccccggctatacagggcctacttgtgccaccaggatgtgccctgcagattgtcggggccggggtcggtgcgtccagggtgtctgtctttgccacgtggggtatggtggcgaggactgcggccaggaggaaccgccagctagtgcctgcccgggcggctgcggcccacgggaattgtgcagagcaggacagtgtgtatgcgtcgagggtttcagagggcccgactgtgctattcaaacatgtcccggggattgccgaggtaggggggagtgccacgatgggagctgtgtgtgtaaagatggctatgctggagaggattgcggcgaagaggtgcctactattgaagggatgagaatgcatcttcttgaagagacgacggtgcggaccgaatggaccccagcacccggacctgttgacgcctatgagattcagtttattcccactacagaaggcgccagtcctccgttcaccgctcgcgtgccatcaagtgctagtgcctacgatcagaggggcctcgcacccgggcaagagtaccaggttaccgttcgcgcactgaggggcacctcctggggcttgcctgcctcgaaaacgattactaccatgattgatggtccccaagatctgcgtgtggtggctgttacacctacgaccctggagctcggatggctgaggccccaggccgaagtggacagattcgtggtatcctatgtctcagccggtaatcagcgcgtgcggcttgaagtcccccctgaggccgacggaaccctgctaacagacctgatgccaggagttgagtatgtggtcactgttaccgcagagcgtgggcgagccgtgagttaccccgcatctgtgcgcgctaataccgggtcaagtcctctgggtctgctgggtactacagacgaaccgccacccagcgggccctcaacgacccagggtgcccaagccccactgcttcagcagcgacctcaggagttaggcgagctaagagttctcggccgtgacgagactggaaggctgagggtcgtctggacagcccagcccgataccttcgcctattttcagcttcggatgcgggtgccagaggggcccggcgctcatgaggaggtgctgccaggcgacgtgaggcaggccctcgtcccccccccccctcctgggaccccctatgaactcagtttgcatggggttccgcctggaggaaaaccctccgaccctattatctatcaaggtataatggacaaagatgaagagaaacccggaaaatcaagtggcccaccccgcttaggagagctaaccgtgaccgacagaaccagcgacagcctgttgcttaggtggacagtgcccgaaggcgagtttgactcatttgtaatccaatataaggacagggatggacagccacaagtcgtgcccgtcgagggccctcaacgttctgcagtgataactagccttgacccaggcagaaagtacaagtttgtcctgtatggtttcgttggcaagaagcgtcacggacccctggttgccgaggcgaagatccttccacagagtgatccaagcccaggaacaccacctagacttggaaacctatgggttacggaccccacacccgacagtctgcacctctcttggacagtcccagaaggccagtttgacacattcatggtccagtatcgggaccgggatggaaggccacaagtagtccccgtggagggccctgagagatcttttgttgttagcagcctggatcccgaccacaagtatcggtttaccctatttggtatcgcaaacaagaaaagatacggaccattaacagctgatggaactacagccccggagcgcaaggaagagccacctaggccggagttcctagagcaacccttgctcggtgagctcactgtaaccggcgtgaccccagatagcttgcggctgagctggacggtcgctcagggccctttcgattcattcatggtccaatacaaagacgcccagggccagccacaggcagtccccgttgctggagatgagaatgaagttacagtgccgggactggatcctgatcgaaagtataaaatgaacctgtatggattacgaggccggcagcgcgtggggcccgagtccgtggtggcgaagacagcaccccaagaggatgttgatgaaaccccgtcacctacggaactggggacagaggctccagaaagccccgaagaacccttactgggtgagctgacggtgacaggatcttcgccagacagtctgtcacttttctggactgttccacaaggtagtttcgatagtttcacggtccagtataaggatcgcgacggacggcccagagccgtcagagtgggagggaaagaatctgaagtgaccgtcggaggtctggagccgggacataagtacaagatgcatctctatggactccatgagggtcaacgtgtcggacctgtgagtgccgtcggagtgaccgccccccagcaggaggagacgcctccagcaactgagagtccactcgagcctcggctcggcgaattgaccgtaaccgacgttaccccaaacagcgtcggcctgtcttggaccgtacctgagggtcaattcgatagctttatcgtgcagtacaaagacaaagacggccagcctcaagtggtgccagtggccgccgaccagagagaagtaaccgtctacaacctcgagcccgagcgaaagtacaaaatgaatatgtacgggctccatgatggacagcgcatgggtcctctttccgtggtgattgtgacggcgcccctccctccagcgcctgctaccgaggccagcaaaccccccctagaacctcggctgggcgaactcactgtgacagatatcacccccgactcagtaggactgtcctggacagtacctgaaggggagttcgactctttcgttgtgcagtataaggatcgcgatggccagcctcaagtagtacctgttgccgccgatcagcgagaggtgactatccctgacctggaaccatctcggaagtataagtttctgctcttcggcattcaagacggtaagcgtaggtcccctgttagtgtggaggccaagacagtggcccggggcgatgcctcacccggagcacctccaaggctcggagaactgtgggttaccgatccaacgcctgactcactgaggctttcttggaccgtgcctgagggccagttcgacagctttgtggtccagtttaaggataaagacggacctcaagtagtgccggtggagggtcacgaaaggtccgttacagtcacaccgttagatgccggcagaaaatacagatttttactgtatggtttacttggcaaaaagagacacggccctctcaccgccgacggcacaaccgaggctaggagtgcaatggatgatacaggaacaaaacggccacccaagccacgtttaggagaagagctgcaagtaacaactgtaacgcagaatagcgtgggcctcagctggaccgtgcctgaaggccagtttgactccttcgtcgtccagtacaaagacagggatgggcagccccaggtggtccccgtggaagggtcgctgcgtgaagtgtccgtcccgggcctggacccggcccaccgctacaaactgcttctgtatggactacaccatgggaaacgggtgggacctatcagtgccgtggcaatcaccgccgggagggaagagaccgagactgagactaccgcgccgactccgcccgctcccgagcctcacttgggtgagctgactgttgaagaagctactagccataccctacacctttcctggatggttacagaaggcgagtttgacagttttgagattcagtacaccgaccgagacgggcaactgcaaatggtacggatcggcggagaccgcaacgatataactttatccggactggaatccgatcatcgctacttggtaaccctctacgggttttccgacggtaagcatgtcggtcccgttcacgtagaagccttaactgttccggaggaggagaaaccttccgaacctccaaccgccacaccagagccacctatcaagccccggctgggagagttgacggtcaccgatgctacccctgattctctgagcctgtcgtggaccgtgcctgagggacagttcgatcattttctcgtccagtacaggaacggcgatgggcaacctaaagctgtgagagtgcccgggcatgaagaaggcgtcaccatcagtggcctggaaccagaccacaagtacaaaatgaatctttatggtttccacgggggccagagaatggggcctgtgtctgtcgtaggagttacggccgcagaggaagaaaccccctcaccaacagaaccctccatggaagccccagaaccagcagaggagcccctccttggagagctcacggtaaccgggtccagtcctgacagcctgtccctctcatggacggttccccagggccgattcgactcattcactgttcagtataaggacagggatggtaggccacaggtggtacgtgttggaggcgaagaatctgaggtcaccgtcggaggactggagcctgggcggaagtacaagatgcatctgtatggactccatgaaggtaggcgtgtgggacccgtatcagcagtaggagtcaccgccccagaggaggagtctcctgacgcacccttggccaagctccgcttaggccagatgaccgtgcgagacatcacttctgacagcctttccctttcatggaccgtgcctgaaggtcagtttgaccacttcctggttcagtttaaaaatggcgatgggcaacctaaggctgtgagagtgcccgggcacgaagacggtgtcaccatcagtggacttgagccagatcataaatacaaaatgaacttgtacggcttccacgggggccagcgtgtaggccctgtgtctgccgtgggcctcacagcccccgggaaagatgaggaaatggcacctgcaagtacagagccccccacccccgagcctcctattaaaccaagactcgaggaactgacagttacagacgcaaccccggatagcctgtcgctgagttggacagtccccgagggacagttcgatcatttcttagttcaatacaagaacggcgacggtcagcccaaggcaaccagggtgccgggccatgaggatcgggtgacgatcagcggcctcgaacccgataataaatacaaaatgaacttgtatggcttccatggaggtcaaagggtgggacctgtaagtgccattggggttactgcagcagaagaggaaacaccaagcccaaccgagcctagtatggaggcacctgagccccccgaggagcccctcctgggcgagctcacggtgacaggatccagcccagacagcctgtcattgtcttggaccgtgcctcagggtaggttcgattcatttaccgtccagtataaggaccgggacggaaggccccaggtggtgcgggtgggaggggaagaatccgaggtgacagtgggcggcctagaacccggccgcaaatacaaaatgcacctgtatggcctccatgagggacggcgggtcggtcctgtttctacagtgggagtgaccgcaccccaggaggatgtggacgagactccaagccccacggaacctggaacagaggcccctgaacctcccgaggagccactcctgggcgagctgacagtaacgggcagcagcccagattcgctcagtctgtcttggacagtgcctcaaggtcgcttcgattcctttacggtccagtataaggatagggatggacgcccccaagcagtccgcgtcggtggccaagaatccaaagtaacggtgaggggccttgaacccggtcgcaagtacaagatgcatttgtacggtttgcatgagggcaggaggctcgggcctgtgtcagcggtgggcgtgacagaggacgaagcagagacaacccaggcggtgccgaccatgactcctgaacccccaatcaaaccacgactgggagagctgaccatgacagacgctaccccagattctctgtcccttagttggacagtcccagagggccagtttgaccattttctggtgcagtaccggaacggtgacggacaacctaaggccgtgagggtgcccgggcacgaagatggagtgactatttctgggctagaaccggatcataaatacaaaatgaatctgtatggattccacggtgggcaacgtgttgggccgatctcagtgataggcgtgactgctgccgaagaagaaactccgtctcccaccgaactgtcaactgaggcacccgagcccccagaagagcctttactgggggagctgaccgtgacaggctccagcccagacagccttagcttgtcatggacaatcccgcagggacatttcgacagttttacagtgcagtacaaagatcgggacggtcgtccgcaggttatgagggtccgcggtgaagagagtgaggtgacagttggcggtctagagccaggacgaaaatataaaatgcacctgtacgggctgcatgaaggtcgcagagtgggtcctgtgtccaccgtcggagtgactgttccaacaactacacctgaacctccaaacaagcccaggctgggggagttaacagtgacagacgccacacccgatagtctatcattgagctggatggtgcctgagggtcagttcgatcactttttggtccagtatcgcaatggcgacggccagccgaaagtggttcgggtgccagggcatgaggatggagtgactatctccggtctagagcccgaccacaagtataagatgaatctgtacggctttcacggtggtcagcgcgttggtccaatctcagtaataggcgtcactgcagcggaggaggagaccccagccccaacagagccatcaacagaggcgccagagccaccggaagagcccttgctcggagaacttaccgttaccggctcatctcctgactcgctgtctctgtcgtggactatcccccagggcaggtttgattcatttaccgtccagtacaaggatagagacggccggccccaagtcgtacgcgtgcgtggggaagaatctgaggtcaccgtaggggggctcgaacccggatgcaagtacaaaatgcacctgtatgggcttcacgagggccaacgggttggtccagtgtcggcagtgggtgtgactgtccctaccatgacccctgagccccccatcaagcccaggctgggcgagctcacggtgacagatgcaacacctgactcactcagcttgtcttggatggtaccagaaggccagttcgaccactttctagttcagtatcgcaatggggacgggcagccaaaggctgttagagtccccggacacgaagacggcgtgaccatttctggactcgagccggatcacaagtacaaaatgaacctgtatggattccacggtggccaaagagttggccctgtgtctgctatcggcgtaaccgaggaggagaccccttctcccacggagccgtccactgaagcgcccgaagctccagaagagcctctgctcggcgaacttactgttacgggttcttcccccgattccctgtctctcagctggaccgtaccccaagggcgtttcgacagctttaccgtgcagtacaaggacagggatggtcaaccccaggtggttcgagtccgcggagaggagtccgaggtaaccgttgggggtctcgagcctgggaggaagtacaagatgcacctatacgggctccatgaagggcagagggtgggtccggtctctacagtgggaattaccgcccctctgcctaccccgctgcccgtggagcccagactcggagaactcgccgtcgcggccgtgacttcagactctgtggggctgtcttggacggtagcccaaggcccgtttgactcttttctggtgcagtatcgtgacgcgcaagggcagccgcaagctgtgcccgtttcaggtgacctgcgtgctgtcgccgtatccggtctcgatcccgcaaggaaatacaaattcctgttatttggactgcaaaatggcaagagacacggtcccgtaccagtcgaggccaggactgccccagataccaaaccctcgcccagattgggtgagttgaccgtcacagacgccacaccagactctgtgggtctgtcatggactgtgcctgaaggtgagttcgactccttcgtggtgcagtacaaggataaggacggccggctccaggtggtaccagtggcagccaatcaacgcgaagtcaccgtccagggcctggagcccagccggaaataccggttcctcctgtacggacttagtggtcgtaagcggctcgggcctatctcagccgattcaaccaccgctcctctggagaaggagctccctccccacttgggggaactgacagtagctgaggaaacctcttcctctcttagactgagttggaccgttgcacagggaccgttcgacagctttgtggtacagtatcgcgacaccgatggtcagcctcgtgcggtgcccgttgctgcagatcagcgcacagtgactgtggaggatctcgagccgggcaaaaagtataaatttttactctacgggttgctgggcggaaagcggctcggcccagtgagtgcactgggcatgaccgcccccgaagaagacacccctgctccagagctggctcccgaggcacctgagcccccagaagagcccaggctcggtgttctcactgttactgataccacacccgacagcatgcgcctttcatggagcgtggcacaagggccattcgacagtttcgttgtgcagtatgaagatacgaacgggcagccccaggccctgctggtagacggcgaccagtctaagatcctgatttcagggttggaaccctctacaccataccgcttcctcctgtacgggcttcatgagggaaagaggctggggccgctgtccgccgagggaaccacaggacttgctccggccggacagacaagtgaggaaagcaggccccgcctctcacagctttcggtgacagatgtgacgacttccagcttgaggctgaattgggaagctcctccaggcgcatttgattcctttctgttgcgctttggcgtgccctcaccatccactttggagcctcaccccaggcctctgctgcaacgcgagctgatggtacctggcacccggcactctgctgtcctgcgggatttgagatcaggaacactgtattcacttactctctatgggctgcgcggaccacataaagctgattccatccaaggcacggccagaacattaagcccggtcctggaatcccccagagatttgcagttttccgaaataagggaaacttctgctaaggtaaactggatgccaccgccctctcgtgccgattcattcaaggtgtcctatcaacttgctgacggaggagaacctcagtccgtccaggttgatggccaggctcgaacgcagaaactccaggggctgattccaggagccaggtacgaggtgactgttgtctccgttcgtggatttgaagagtccgaaccgctcactggattcttgactactgtccccgatggccccacccaactcagggctctgaacctgactgaggggttcgcagttcttcactggaagccccctcagaatccagtcgatacctacgacattcaggtcacagcgccaggcgcacctccactgcaggccgagacccctgggtcagccgtggattatcctttacacgatctggttctgcacactaactatactgctacagtccgcggcttgaggggccctaatttgacaagccctgccagtatcaccttcaccacaggactggaggccccccgagatcttgaagccaaagaagtgactccaaggacggccctcttgacctggaccgaaccaccggtgcgccccgcaggttatctgcttagctttcacacaccaggaggacaaacccaggagatcctgctcccaggggggatcacttcacatcagctcctgggtctctttccttcaacatcttacaatgctaggttgcaggcgatgtggggacagtcactgctcccgccagtgtccacttcctttactacagggggcctaaggattccttttccccgggattgcggcgaagaaatgcagaacggggccggcgcatcccgcaccagcaccattttcttgaatggcaacagagagcgcccacttatagtgttctgcgatatggagacggacggcggcggatggctcgtcttccagaggaggatggacggccagacagacttttggcgtgactgggaagattatgcccacggatttggcaacatctccggcgagttctggctgggtaacgaggccctccactcccttactcaggccggagactacagcatgcgggttgaccttcgagctggcgacgaggccgttttcgctcagtatgatagctttcacgtcgattccgcagcggaatattataggctgcatctggaggggtatcacggaactgctggcgattcaatgagctatcacagtgggtccgtctttagcgcgcgcgatcgcgacccaaactcccttttaatcagttgcgcagtcagttataggggcgcctggtggtatagaaactgccattacgctaacctgaacggcctgtacggtagtacagtggatcaccaaggggtttcatggtatcactggaaaggttttgagttttctgtgcctttcaccgagatgaaactgagacccagaaatttccggagtccagctgggggcggctag

SEQ ID NO: 201489 - DNA, 1905 bp, Artificial Sequence
  derived and/or modified sequence
taatcgtcccctctcggtctcctaggcactacggatgaacctcctcctagcggtccctccacaacacagggcgcgcaggcaccacttctccagcagagaccccaagagctaggcgagctgagggtcctgggccgagatgagacggggaggctacgcgtggtgtggactgcgcagcccgacacattcgcctactttcagctgagaatgagagtgccagaagggccaggtgcccatgaggaggttcttcccggcgacgttcgccaggctctggtgcctccacctccacctgggacaccatatgaactatccttgcatggcgtccctcctggggggaaaccctcagatcctattatctatcagggcatcatggacaaggacgaagagaaacccgggaaaagctcaggaccccctaggctgggggagctgactgttacagatcggacatccgacagtctattactccgttggacagtacccgaaggggagtttgacagcttcgtgattcaatacaaggaccgggatggacagccccaagtggttcctgtggaggggccgcagcggtctgctgtgattaccagcttagatcccgggagaaagtacaaattcgttttgtatggatttgtcggcaagaaacgtcatgggcctcttgtcgcagaagctaaaatattaccccagagtgatccttctccaggaaccccccctcgattaggtaatctttgggtcactgatcctactccagattccctgcacctgagttggaccgtgcctgagggccagttcgatacattcatggtgcaatatagggacagagatggacgcccccaggttgtccccgtggaaggacctgagcggtctttcgtggtgagttcattagatccagaccataagtacagattcacgctatttggcattgctaacaagaaacgctacggccctctaactgcggacggcacaaccgccccagagagaaaagaggaacctccaaggccagagttcctggagcagcccctcctcggagagttgaccgtgacaggcgttacacctgatagcctgagactgtcttggactgtagcccaaggcccctttgactccttcatggtgcagtataaagacgcacaggggcagcctcaggctgtgcctgtggccggcgatgagaacgaggtgacagttcctggactggatcccgatagaaagtacaaaatgaacctgtatggcttgcgcggccgacagagagtcggacccgagtcagttgttgccaaaaccgccccacaggaggatgttgatgagaccccaagccccacggaactcgggaccgaagctccagagtctcctgaagaaccacttctgggggagctgacagtgactggtagcagtcccgactctcttagcctgttctggactgtcccccagggtagctttgattccttcaccgtgcagtacaaggatagagatggccgcccccgtgccgttcgggttggtgggaaggagagcgaggtgactgtgggcggtctggagcccggtcataagtataagatgcacctatatggactccatgagggacagcgagtgggtcctgtctctgccgtgggcgtcaccgccccacagcaggaagaaacccccccagctaccgaatctcctttggaacctagactgggggagctcacggtaactgacgtcacacccaatagcgtgggattgtcttggacagtgccggagggccagtttgatagcttcattgtccaatacaaagacaaagatggacagcctcaggttgtgccagtggcagccgaccagcgcgaggtgaccgtgtataaccttgaacccgaacgcaaatacaagatgaatatgtacggactccacgatgggcaacggatggggccactgtctgtggtcattgtcacctag

SEQ ID NO: 201490 - DNA, 12669 bp, Artificial Sequence
  derived and/or modified sequence
atgatgccagcccagtacgccctgaccagctctctggtgcttctggtactcctttcgaccgctcgcgcagggcctttctcaagtcgctccaatgtcacccttccggcccctcgcccacccccccagcccggcggacacacagtaggtgccggggtcgggtcaccatctagccaactatatgaacacacagtggaagggggagagaagcaggtcgtattcacccaccggataaatctgccgccttcaactggctgcggatgcccacctggcaccgagccacccgttttggccagcgaagtccaggctctgcgggttagactggagatcttggaagaactcgtcaaaggactgaaagagcagtgtacagggggctgctgtcctgcctctgcacaagctggcacaggccagactgacgttcgtactctgtgctcactgcacggcgttttcgatctgtcacgatgtacatgtagctgtgagcctgggtggggcggaccaacctgctctgatccaacagatgcggaaatccctccctcctccccaccttccgcctcagggagctgcccagacgactgtaacgatcaaggccggtgcgtgcgaggccgatgtgtgtgcttccctggctacactggaccatcatgcggttggcccagttgtccaggcgattgtcaggggcgtggaaggtgtgtccaaggcgtatgtgtttgtcgggccggcttcagcgggcctgactgttcgcagcgatcttgcccccgcgggtgtagccagaggggaaggtgtgaaggcggcagatgcgtatgtgatcctggttacaccggtgacgactgcggaatgcggtcttgtcctcgcggctgtagtcaacgtggccggtgcgagaacggacgatgcgtgtgtaatcccggttacacaggagaggactgtggggttaggtcttgcccacgggggtgcagtcagcggggacggtgcaaggacggtcggtgtgtgtgcgaccctggctatactggcgaagactgcggcacccgttcctgtccctgggattgtggcgaaggggggaggtgcgtggatggacggtgcgtctgttggcccggctataccggcgaagattgctccacgcgaacttgtccacgtgattgtagggggaggggccgctgcgaggacggcgagtgcatttgtgatacaggatactccggcgacgattgtggagtgcgcagctgtcctggagactgcaaccaacgaggtagatgcgaggatggccgatgtgtctgttggcctggatacacagggacggattgtggatcccgggcctgtcccagagactgtcgggggcgtggtagatgtgaaaacggcgtatgtgtgtgcaacgcaggttacagcggcgaagactgcggcgtcaggtcctgtccgggtgattgccgggggcgaggccggtgtgaatcaggcagatgcatgtgttggcccgggtatacaggccgagattgtggaacccgcgcttgccccggagattgccgtgggaggggtcgctgcgtggacggacggtgcgtttgcaaccccggcttcactggcgaagattgcggttcaaggcgttgtcccggcgactgccgggggcacggactgtgcgaggatggagtctgtgtgtgtgatgctggctacagtggcgaagattgcagtactcgaagttgccctggcggttgtcgtggacgagggcagtgcctcgacggccggtgtgtttgcgaggatggctattccggggaggattgtggtgtgagacaatgtcccaatgactgctctcaacatggagtgtgccaggacggggtttgtatctgctgggaaggctatgtctcggaggattgttcaatccggacttgcccatctaattgtcatggtagggggcgctgcgaagagggtcggtgtttgtgtgacccagggtacactggccctacctgcgccacccgcatgtgccccgccgactgccggggacggggtcggtgtgtacagggtgtgtgtctttgtcacgtaggttatggcggtgaggattgtggacaagaggagccccccgcctctgcttgtcccggaggatgcgggccccgggagctgtgtcgggccggtcagtgcgtgtgcgtagagggtttccggggtccagactgtgcgatacagacctgtcctggcgattgccgcgggcgaggagaatgccacgatgggtcatgtgtatgcaaagacggttacgcaggcgaggactgtggcgaagaagtccccaccatagaagggatgcgcatgcatctgcttgaggagaccactgttcgaactgagtggacacctgctcccggtccagttgacgcgtatgaaatccagtttatccctacaaccgaaggcgcctcaccgccattcacagcccgcgttccctcctccgcctcagcctacgatcaaagagggctggcccctggccaagaatatcaggtcactgtccgggctttgagaggaacctcatgggggctccctgcttcaaagacaatcaccaccatgattgacggccctcaggatctccgcgtagtggccgtgaccccaactacgctggagctcggatggttgcgcccacaagccgaggtggataggttcgtcgtgtcatacgtgagcgctgggaaccagcgggtgaggttggaagttcctccagaggctgacggcaccctcctcactgatctcatgccaggggtcgaatatgtggtgactgtgacagccgaacgcggccgcgccgtgagttatcctgcttcagtccgagccaacactggctcgtcccctctcggtcttctgggcaccacagacgaaccccccccttctgggccaagtaccactcagggagctcaggcccctctcctgcagcaacgaccgcaggagctgggggagctcagagtgcttggaagggacgaaactggccgtttgcgagtggtctggactgcccaacccgacacctttgcctacttccagctccgcatgcgggtgccggagggcccaggtgctcatgaggaggtgttgccaggtgatgtgcgccaggcactggtccctcctccaccaccaggaaccccatatgagctgagtctgcatggcgtgccccctggcggcaaacctagtgacccgataatctaccagggtataatggacaaggatgaagaaaaacctggaaagtcatctggccctcccaggctaggcgagcttactgttaccgataggacgagcgacagtctgctgcttagatggacagttcccgagggcgaattcgactctttcgttatccaatacaaagaccgagatggacaaccccaagtggttcctgttgagggaccccagcggagcgccgtgatcaccagcctcgatccgggccggaaatacaaatttgtactgtacgggttcgtgggtaaaaagcgacatggccccttagttgccgaggcaaaaattctgccccagtctgacccatctcctggtactcctcccagacttggtaacctatgggttactgatcccacgcctgatagtctgcacctatcatggactgtgcctgagggtcagtttgataccttcatggtacagtatcgcgatcgagacggccgcccgcaggtggtgccagtggagggccccgagcgcagcttcgtcgttagtagtcttgatcctgatcataaataccgctttacactttttggtattgctaataaaaaacgatacgggccactgacggccgacggaaccacggcccccgaacgtaaggaagaaccccctcatcctgaatttctggaacagcctctcctcggagagttaacagttaccggggtgacgcccgattccctgcgcctgtcatggacagtagctcaagggccattcgactcattcatggtgcagtataaagatgctcaaggacagccgcaggctgtgccagtcgccggggacgagaacgaggtaaccgtgccaggactcgaccccgaccggaaatataaaatgaatctgtacggcctaaggggccgccagagggtggggccagagtctgttgtggctaaaacagcccctcaggaggacgtggatgaaactcctagccccaccgagctgggcactgaagcgcccgaatcacccgaagagcctctcctcggagaactaacggtcacaggttcgagccctgacagtctgtccttattctggaccgtgccccaggggagtttcgatagtttcactgtacagtacaaggaccgtgatggccggccacgggccgtgagagtgggaggaaaagagtcggaagtgaccgtgggcggccttgagccgggccacaagtataagatgcatctgtatgggcttcatgagggccagcgcgttggccccgtgtctgcagtgggcgttaccgctcctcagcaggaggagacgccccctgcgaccgaatctcccctcgagccccgcttgggagagttgacagtgaccgacgtcactcctaatagcgtcgggctctcctggacagttcctgaaggacagtttgatagtttcattgtgcaatacaaggacaaggatgggcagccccaagttgtacccgtagctgctgatcaaagagaggttacagtttataatctggagccagagcggaagtacaaaatgaacatgtacgggctccacgacggccagcgaatgggccccttgagcgtggtgatcgtgacggccccactgcctcccgcacccgcaaccgaagcaagtaagccaccgctcgaaccaagactgggcgagctgacggtgaccgatatcacgcctgactccgtcggattgtcatggaccgtcccagagggggagttcgactcctttgtagtccagtacaaggacagggacggccagcctcaggtggtgccagtggcagcagatcagcgcgaggtcactatccctgatctggagccatcccggaagtacaaattcctgctgtttggcattcaagatggaaagagacgctcacccgtgtctgtcgaggcaaaaacagtagcaaggggtgacgcgtcgcctggtgcgcctcctaggctgggagagctgtgggtgaccgatccaacccctgattccctgcggctctcctggactgtacctgaggggcaattcgactctttcgtggtccagtttaaagacaaagatggcccacaagtcgttcctgtggaaggtcatgaaaggagcgtgactgtgacaccactagacgcagggagaaagtatcgcttcctgctctatggacttcttggaaagaagcggcacggcccactgactgcggacgggactaccgaagccagatcagctatggatgacacggggaccaagcgcccacctaagcccagactcggagaagaactgcaggttacaacagtaacacagaactctgttggacttagctggacggttcctgaaggccagtttgatagtttcgtggttcaatataaggaccgagacggacagccacaggtggtcccagtggaaggatccctccgagaagtatccgtcccgggccttgatccagcacatcgatataaattgttgctctatggcttacaccatggcaagagagtgggccccatcagcgccgtggctattaccgcaggcagggaagagaccgagaccgagacaacggcacctaccccccctgcaccggaacctcatctgggcgagctgactgtggaggaggccaccagtcacacgctccacttatcttggatggtaacagagggcgagttcgactcctttgaaatacagtacaccgatcgcgacgggcagctccaaatggtgagaattggaggggataggaacgacattactttaagcgggctcgaatctgatcataggtaccttgtgactctctatggattttccgatggcaagcacgtggggccggtgcacgtggaggctcttactgtgccagaagaggaaaagcctagcgagccccccacagccactcccgaacctcctatcaaacctcggctaggagagctaacagtgacagacgccactcccgattctctgtccctcagctggactgtcccggaggggcagtttgaccacttcctggtccagtacaggaacggcgatgggcagccgaaggctgttcgggtccccggccatgaagagggggttaccatttcggggctggagcctgatcacaagtacaagatgaacttatatggcttccacgggggtcagcgcatgggccctgtgtcagttgtcggagtcacggctgccgaggaggaaactccaagcccaacagagccatccatggaggcccccgagcccgccgaagagccgttgctcggcgagctgacagtgaccggcagcagccccgactccctctccttgagctggacagttccccagggtaggtttgatagctttaccgttcaatataaggaccgagatgggaggccccaagttgtaagggttggaggtgaagagtcagaagttaccgtcggcggtctggagccagggcgcaaatacaagatgcatctgtacggtcttcatgagggacgcagggtggggccagtgagtgccgtgggggtgaccgcccccgaggaggaatcccctgatgcacccctcgcaaaacttagactgggccagatgaccgtcagagatattactagcgactcgttgagtctttcgtggacggtcccagaggggcagttcgatcacttcctcgtgcagttcaagaatggcgacggacagcctaaagccgtgcgtgttcctggccatgaggacggagttacaatttccgggctggagcctgaccataaatacaaaatgaatttgtatggctttcatgggggacagcgggtggggccggtcagcgcggtcggtcttacagccccaggaaaggacgaggagatggcccctgcctccacagaaccccccacacccgagcccccgattaagccaaggctggaagaacttaccgtgacagatgcaacgcccgattcgctcagcctttcatggaccgtgcccgaagggcagtttgaccatttcctggtgcagtacaagaacggagacggccagccaaaagcaacacgagtgcctggacatgaggatagagtgacgattagtggactagagccggacaacaaatacaagatgaacctgtacggatttcacggcggccaacgggtgggtcccgtgagcgcaattggagttactgcggccgaagaagagacaccaagtcctaccgaaccttcaatggaggccccagaaccccccgaagagccacttctgggggagctgacagtcaccggatcttctccagacagtctgagcctgagttggaccgtcccacaagggcggttcgacagttttacagtgcagtataaggatagagatggccgcccccaggtggtgagagtcggtggtgaggagagtgaagttacggtggggggacttgagcctggccggaagtacaaaatgcacctatacgggctccacgagggtcgaagggttggtcctgttagcacggtgggtgtgactgctcctcaggaggacgtagatgaaactccctctcctactgagcctggaactgaagctccagagcccccagaagaacctctcttaggggaactgacagtaacaggaagctctccggacagtctgtcactgagctggaccgtcccccaaggtcgtttcgattctttcacagtgcaatataaagatagagatggtcgcccacaagcagtccgggtgggcgggcaagaaagtaaggtgaccgtgagaggtttagagccaggtaggaagtacaaaatgcacctttacggtctccatgaggggaggaggttggggccggtgtcggctgtaggagtgacagaagacgaggccgaaaccacccaggctgtgcccaccatgacacccgaacccccaatcaagcccagattgggcgaattgactatgactgatgctactcccgacagcctgtcgttatcatggaccgtacccgagggacagttcgatcattttctcgtccagtaccgcaacggtgatggacaacctaaggcggtcagggtgcctggccatgaggatggtgtgaccatttcagggttagaaccagaccataaatataaaatgaatctgtacggctttcacggcggtcagcgcgtgggccccatttctgtcatcggcgtgacggcagctgaggaagaaaccccttctccaacagaattatccactgaagcaccagaaccgcctgaagagcctctcttgggagaacttaccgtgacaggcagtagcccggattcattgagtctttcatggaccattcctcaaggccactttgactccttcactgttcagtacaaagacagggacggccggcctcaggtcatgagggtgcgcggagaggaatcggaagttaccgttgggggcctggagccgggacgaaagtacaaaatgcatctatacggcctgcacgaagggaggcgggtggggccagtctcgaccgttggggtgaccgttcccactactacccccgaaccacctaacaagcccagactcggggagctgaccgtgacagatgccacacccgattctttaagcctctcgtggatggtcccggaggggcagtttgaccattttcttgtgcaatacagaaacggggatggccaaccaaaggtggtgcgtgtgcccggccacgaagatggagtcaccatttccggcctcgagccggaccataagtacaagatgaatctgtacgggtttcacggaggacagagagtggggccgattagtgtgatcggggtgaccgctgccgaagaggagacacccgcccccaccgagcccagcacagaagcacccgagccccccgaagagcccctgctcggcgagttgacagttacagggtcgtcccctgattctctgtccctttcgtggaccatccctcagggaagatttgatagctttaccgtgcagtacaaagatagagatggtaggccgcaggtcgtccgcgtgcggggtgaagagtcagaggtgactgtgggcgggctggagcccggctgcaagtataagatgcacctgtacggtctgcacgaggggcagcgggtcggaccagtttctgctgtcggggtcaccgtaccgaccatgacccctgagccccctattaaaccccgcctgggagaattgactgtgactgatgcaactccggacagcctgagtctgagctggatggtccccgaaggacaattcgatcatttcttagtccagtatcgcaacggcgatggacagcctaaggctgttagagtgcccgggcacgaggacggcgtcaccataagcggcctcgaacccgatcataagtataagatgaacctgtacggttttcatggaggacagagggttggacccgtcagcgcgatcggcgtcacagaggaggagacaccctctcctacggagccaagtactgaggccccggaagccccagaggaacccctgttgggcgagctcacagttaccggaagttccccagatagtctatctctgtcttggaccattccccagggccgctttgacagtttcacagtgcagtacaaggatagggacggccagccccaggttgtaagagttagaggtgaggaatccgaagtaacagtagggggccttgagcccggcagaaagtataagatgcatctctatggcctgcatgaaggacaaagggtgggcccggtttccacagtgggaattactgctccgctgccaaccccactcccagtggagcccagactgggcgagctggctgtggcggctgtgacctccgacagtgtggggctctcctggaccgttgcccagggcccttttgactcatttctggtacagtatcgggacgcccaagggcaaccacaggccgtgcctgtttctggagacctgagggcggtcgccgttagtgggttggaccccgcaaggaaatataaattcttgctgttcgggctgcagaatggaaagagacacggacctgttcccgtggaggctcggaccgcccccgataccaagcctagtccacggctgggggagctcacagtaactgatgccacgcctgacagcgtggggctgtcctggactgttccagaaggagaatttgattcgtttgttgtacagtataaagataaggacgggagactacaggtagtgcccgttgctgctaatcagagagaagtgacagtgcagggtctggaacctagccgcaagtaccgctttttgttgtacggattaagtggtcggaaacgcctcgggccgatctctgcggactccactactgcccccttggaaaaagagctcccacctcacctcggtgagctgactgtggcagaggagacatcctcctccctgcggctatcttggaccgtggctcaagggcccttcgattcttttgtcgttcaatacagagatacggatggccaacctcgggctgtgccagtggccgccgaccagcggacggtcacagtcgaagacctagagcccggtaagaagtacaaatttcttctgtatggactgctggggggaaaacgtcttggacctgttagtgcactaggcatgaccgcccccgaggaagatacccccgctcccgaacttgcaccggaggcccccgagcctccagaggagcccaggttaggagtgctaactgtgactgatactactcccgactcgatgcgcctctcatggtcagtcgcgcaagggccctttgattctttcgtggttcagtacgaggacacgaatggacagcctcaggcgctgcttgttgatggggaccagtccaagatcttaataagtggtttggagccttccactccttacagatttctgctatacggacttcacgaaggaaagagactgggccctcttagtgccgaggggaccaccggactggcccctgccgggcagacgtcagaagaatctaggccaaggttgtcccagctttctgtgacagacgtcacaacgtccagtctccggctaaattgggaggctcccccgggagcgtttgacagctttctcttgaggttcggcgttccttcaccttctactcttgagcctcatcctcgccccttgcttcagagagaactgatggttccagggactcggcacagtgccgtactgcgggatctcaggtctgggacgctatactcgctgacgctgtacggccttagaggtcctcacaaggccgattccattcaaggcaccgctcgcaccctgagccccgttctggagagccctagggatctgcagttcagtgaaattagggaaactagcgcaaaggtgaattggatgcctccaccatccagggcagattcatttaaagtgtcctaccaactggccgatggcggagagccccaatccgtgcaagtcgacggccaggcccggacacagaaattacaaggacttatcccaggcgcacgatatgaagtaacagttgtgtccgtgcgggggtttgaagagtctgaaccccttaccgggttcctgactacggtcccagacggccccacacagctgcgggccctgaatctgaccgaggggttcgccgtgttacattggaaaccccctcagaatcctgttgatacctatgacatccaggtcactgctcccggagccccaccactgcaggcggaaactcccgggagtgccgtggactacccgctgcatgacctggtgctacatacaaactatacggccacagtgcgaggactgagggggccaaatttaacctcaccagctagtatcacattcactactggtctggaggcgccccgtgatctggaagcaaaagaagtcaccccaagaacggccctgcttacctggactgaaccccccgtgcgaccggccggctacctgcttagcttccatacgccggggggccaaacacaagagatactgctcccaggcgggatcacgtcccatcaactactgggtctttttccttccacctcatataatgctagactgcaggcaacatggggccaaagcttgctcccccctgtcagtacctcttttacgactggaggtctgcgtatccctttccctcgagactgtggcgaagaaatgcagaacggcgccggcgctagccggacaagcactatatttttaaacgggaaccgggagcgcccattgaacgtgttctgtgatatggaaactgacggaggcggatggctggtatttcaacgacgtatggacggacagacagatttttggcgcgactgggaagactatgcccacggctttggcaacatcagtggagagttttggctcggaaacgaagctctacactcactgacgcaggccggtgactattcgatgcgtgtcgaccttcgcgcaggcgatgaggctgtattcgcgcagtacgattcgtttcatgtggactccgcagctgagtactaccgcctccatcttgagggatatcatgggaccgcgggcgatagtatgagttaccatagtggatctgttttcagcgcaagggaccgggacccaaattccctcctgatcagctgtgccgtgagctataggggcgcatggtggtaccggaactgtcactacgctaacctgaatggactttacggaagtacagtggatcaccagggcgtgtcatggtaccactggaaggggttcgaattctctgtgccattcacagaaatgaaactgcgtccgcgcaacttccggtcccccgccggggggggttag

SEQ ID NO: 201491 - DNA, 6843 bp, Artificial Sequence
  derived and/or modified sequence
atgatgccagcccagtacgctctcacaagcagcctagtactgctggtcctcctgagtacggcccgggccggaccttttagtagtaggagcaacgttactctgccagctccacgccctcctcctcaacccggcggccacacggtgggagccggagtcggatctccctctagtcagctgtatgagcacaccgttgagggaggtgagaagcaagtcgtcttcactcaccgaatcaatctccccccaagtaccggttgcgggtgccctccaggcacagagccgcccgtgctagcttctgaagttcaggcactgcgggtccgcctagagattttggaagaattggtgaaagggctgaaagaacaatgcactgggggctgttgccccgcttcagcacaagccggtactggtcagacagacgtaaggaccctttgcagtttacatggagtgtttgatttgtccagatgcacgtgcagctgcgagcctgggtggggcggcccaacatgcagcgacccaaccgatgctgaaatccccccatcttccccacccagtgcgagcggcagctgtcctgatgattgtaacgaccaagggcggtgcgttagagggagatgtgtgtgttttccaggatataccggaccatcctgcggctggccctcctgcccaggcgattgtcaggggcgagggagatgcgtgcagggcgtgtgtgtctgccgcgcaggcttctccggtccagactgcagccagaggtcctgtccaagaggctgttcccagagaggacgatgtgagggagggagatgcgtgtgtgaccctggttacaccggtgatgattgtggaatgagatcatgtcctcgaggctgtagccagaggggccgttgtgagaacggcagatgcgtgtgcaacccgggctacacaggagaggattgcggggtacggtcctgcccaagaggatgcagtcaaagaggacggtgtaaggacggcagatgtgtctgtgatcctggatatacaggtgaagattgcggtacacgcagctgcccttgggactgtggagaaggcggtcgctgtgtggatggtaggtgcgtatgctggccaggctacaccggtgaagactgctctaccaggacatgcccacgggattgccgagggcgggggcggtgcgaagatggagagtgcatctgcgacaccggatatagcggagacgactgtggagttaggagctgccctggggattgtaatcaacgtgggcgttgcgaggacgggaggtgtgtgtgttggcccgggtacaccggtacagactgcgggtcccgtgcttgtccgagggattgccggggccggggcaggtgtgagaatggggtgtgtgtctgtaacgctggctactctggggaggattgcggcgtccgctcttgccccggcgattgccgcggacgcgggcgatgtgagagtggaagatgtatgtgttggcccggctacacaggaagggactgtggcaccagagcatgccccggagactgtcgcgggcgtgggcgctgcgtggatggtcgctgcgtttgtaatccagggtttacaggtgaagattgcgggtcgcggaggtgccctggcgactgccgcggccacggactctgtgaggatggcgtgtgtgtgtgtgacgcagggtacagcggcgaagactgttccacccgctcctgtccggggggctgccgggggagaggacagtgtctggacgggcggtgtgtttgtgaggacggctactctggtgaggattgtggagtccggcaatgtcctaacgactgctctcagcacggcgtgtgtcaagacggcgtttgtatctgctgggagggttatgtgtcagaagactgttccatccggacctgcccaagtaattgccacggccgcggtagatgtgaggaaggccgatgcttgtgtgatccaggctataccggtcctacgtgcgccacacgtatgtgccccgcagactgcagaggaagaggccgctgtgtgcagggcgtttgtctgtgccacgtcgggtatgggggggaagattgtggccaggaggagccccccgcgagtgcctgcccaggtgggtgcgggccgcgcgaactatgccgcgcaggacagtgcgtctgcgtggaaggtttcaggggaccagactgtgccatacagacctgtcccggtgactgccgagggcgaggtgagtgccacgatggatcttgtgtatgtaaggacggctacgcaggggaggattgtggcgaggaggtgcctactatcgaaggaatgaggatgcaccttctcgaagagactactgtccggactgagtggacccccgcaccgggccctgttgacgcctacgaaatccagttcatccctaccacagaaggcgcctctcccccatttaccgccagggttccatcatcagcctccgcatacgatcagcggggtctggctcctggacaggagtaccaagtaactgtgagagccttgcgggggacctcatgggggctgccggcaagtaaaacaatcaccacaatgatagatggccctcaggatcttcgagttgtggctgtcacccctacgaccctggagctgggctggttaagaccacaggctgaggttgacagattcgtggtgtcatacgtgagcgcgggtaatcagcgagtgcgtctggaagttcccccagaagccgacggcacactgctgaccgatctgatgccaggcgtggagtatgtagtgacggtcaccgcggaacgcggacgggcggtcagttatccggccagcgtgagggccaacacaggcagcagtcctctgggcctgctcggaaccaccgacgaaccccctccctctggcccttctacaacacaaggcgcccaggcccccctgctgcagcagcggccgcaggagcttggggaactgagagtactagggcgcgacgagaccggccgtctgagagtggtatggaccgcccagcccgataccttcgcctattttcagctgagaatgcgtgtgccagaagggccaggggctcatgaggaagtgctccctggagacgtgaggcaggccctcgtgccaccccccccacccggcaccccctacgaattgtccctccatggcgtccctccagggggcaagccttcggatcccatcatatatcagggcattatggataaagatgaagaaaaacctggaaagagctctggccctccacgcctgggggagctgaccgtgaccgatcggacctcagactcattgctgcttcgctggacggtgcccgaaggagaattcgatagctttgtcatacagtataaagacagagatggacagcctcaggtcgtgcccgtcgaaggtccccaacgaagtgcagtcattacaagcctggacccaggccggaaatataagtttgtgctgtatgggttcgtgggcaagaagcgtcatggacccttggtcgccgaggcgaagatcctgcctcagtccgatccgtctcctgggacaccaccacatctcgggaatctgtgggtgaccgatcctacaccagacagcttacatctgagttggacagtacctgaggggcaatttgacacattcatggttcaatacagagatagagatggcaggccccaggtggtgccagtggaaggcccagaacgctcctttgtggtttcctcactggacccagatcataaatataggttcacgctgttcggcatcgctaacaaaaagaggtatggccccctgaccgccgacggaactacagcacctgagcgaaaggaagagccccctcgccctgaatttctcgagcagcctctgcttggtgagctgactgtcacaggcgtgactccagactccctcagactgagttggactgttgcacaaggacccttcgactcctttatggtacagtacaaggatgctcagggccagcctcaggcagtgccggttgcgggggacgaaaacgaagtaaccgttccagggctcgaccccgaccgaaagtataaaatgaatctctacggtttacgaggcaggcagagggtcggacccgagtccgtggtagccaaaaccgctcctcaagaagacgtggatgagactccctctcccaccgaattgggaacggaggcacccgagtccccagaagagcctctcctgggtgaactgactgtgaccggatcctcccctgattccctgtctcttttctggaccgtgccgcaggggtcgttcgattctttcaccgtccagtacaaggaccgggacggtaggccacgtgcagttcgggttggcggcaaggaatccgaggtgaccgttggaggacttgaaccaggccacaaatataaaatgcatctctacggactgcacgaaggccagcgggttggacctgtcagtgcagtcggcgtgacggcccctcagcaggaagagactccacctgctacggaaagccccctggagcctcgcctcggtgagctaactgtaacagacgtaacccccaatagtgtcggattatcgtggactgtccccgaaggccagttcgatagctttattgttcagtacaaggataaggacggccaaccacaggttgtgccagtcgccgccgaccagagggaagtcactgtctataatttagagcccgagcggaagtacaaaatgaatatgtacgggctgcatgatggacagcgcatgggtccgctgtccgtagtgattgtgacagcccctctcccccctgccccggcgacagaagctagcaaaccaccgctggaacctaggctgggagaactgaccgtcacggatataacccccgacagcgttggattaagttggaccgttcctgaaggggagttcgacagctttgttgtccaatataaggaccgggacggtcaaccccaggtagttcctgttgctgccgatcagcgtgaagtaaccatcccagacttagagccctcccgaaagtacaaattcctgctgtttggaatccaagacggcaagcgccgttcgcctgtgtcagtagaggcgaaaacagtggcgaggggagatgcctctcccggagctcctcctagacttggtgagctgtgggtgacggaccctaccccagacagcctgaggctgagctggactgttcccgagggacagttcgactcattcgtggtgcagtttaaggacaaggacggtccccaggtggtccccgtagaggggcacgagcggtctgttacggttacacctcttgacgcaggtcgcaaatacagatttctactgtatggtctactcggaaagaaacgccacggaccgctgacagccgatgggacgacagaggctcgatcagctatggatgatactgggactaagcgccccccaaagcctaggctcggagaagaactccaagttacaaccgtcacccaaaattctgtgggcttgtcctggaccgtacctgaggggcagttcgactcattcgtggttcagtacaaggatcgcgatggccagccacaggtcgtccctgtggagggaagtctccgggaagtgtccgtgccagggttggaccccgctcatagatataagttgttgctgtacggactccaccacggaaagagggtggggccaatcagtgcagtggcaatcacagctggtagagaagaaacagagacagagaccaccgcccctacgcctccagcaccggagccacatctcggtgagttgacagtggaagaggctaccagtcataccctccatctgtcttggatggttactgaaggcgagttcgattcattcgaaattcagtacacggaccgggacggccaactgcagatggtcaggattggcggggaccgcaacgacattaccctgagcggcttagaatcggaccatagatacttggtgactctgtacggattctcagacggcaaacacgtgggccccgtgcacgtcgaggccctcacagtaccggaggaagagaagccctccgaacctcctactgctaccccagaaccgcctataaagccaaggctcggagaactgactgttacagacgccacgcctgattcactgtctctgtcttggactgtgccagagggccagttcgatcacttcctagtgcagtaccggaatggcgacgggcagccgaaggctgttcgggtgcctgggcacgaagagggagtaacaatttcagggctggaaccagatcacaagtacaagatgaatctctacggttttcacggaggtcagagaatgggtccagtgtcggtcgtgggcgttaccgcagctgaagaggagacaccaagccctacggagccaagtatggaggccccggaacctgccgaggagccacttctaggcgagctgacagtcactggctccagtccggactccctcagcctgagctggacagttcctcagggacgttttgattccttcacagtacagtacaaggatagggacgggagacctcaggtcgtccgcgttggaggcgaggagagcgaagttaccgtggggggcctcgagccgggtcgcaagtataagatgcacctgtacggcctgcacgaggggcggcgcgttggacctgtaagtgctgtgggtgtgaccgcacccgaagaggaatctcccgacgcccccttggcgaaacttaggctcggtcaaatgacggtgcgagacatcacatctgattcattgagcctgagttggactgtgcctgagggccaattcgatcactttttagtccagttcaagaatggcgatggacaacccaaagcggtgagggtgcccggacacgaggatggagtcaccattagcgggttggaacctgatcataaatacaagatgaatctttatggcttccatggcggtcagagagttggacctgtttcagcagtaggtttaacgtag

SEQ ID NO: 201492 - DNA, 654 bp, Artificial Sequence
  derived and/or modified sequence
gcccccggaaaggacgaagaaatggcacccgccagcacagagccccctacccctgagccacccattaaaccaaggctagaggagctgactgtgaccgacgccacaccggacagtctatccctatcatggacggtcccagaagggcagtttgaccatttcttagttcaatacaagaacggagacggccagccaaaggctacgcgggtccccgggcacgaagacagagtcacaatttccggactcgagccagacaataagtacaagatgaacctctacggtttccacggaggccagcgagtcgggccagtatcagctattggcgttacggctgcagaggaagaaaccccctcccctactgaaccaagtatggaagccccagaaccacctgaagagccgttgctgggggagttaactgtcaccggatccagccctgactctctgtctctctcttggactgtaccccagggccggttcgactcattcactgtccaatacaaagaccgtgacggccgacctcaggttgtccgagtcggcggcgaagaatccgaggtcaccgttggcggcttggaacctggtcggaaatacaaaatgcatctctacggactgcatgagggccgccgcgtgggccccgtcagcaccgtgggagtgacatag

SEQ ID NO: 201493 - DNA, 12729 bp, Artificial Sequence
  derived and/or modified sequence
atgatgcccgcgcaatatgcccttacatcctccctggtattgctggttctcctgagcactgcacgggccggccccttctcaagtcgcagtaatgttactttgcccgctcctagacctcccccccagccaggcggccataccgtgggagccggcgtaggatcacctagtagccaactctacgagcacaccgtggagggaggtgagaaacaggtggtctttacccatcgaattaacttgcctccatccaccgggtgcggatgtccacctggtacggaacctccagtgttagcaagtgaagtgcaagcactcagagtgcggctggaaatactggaagaactggtgaagggactgaaagagcagtgcacaggaggatgctgtcccgcgagcgcgcaggctggcaccggacagaccgatgttcgaactctctgcagcttgcatggagtttttgacctgagccggtgcacatgctcctgtgagcccggctggggcgggcctacatgctccgaccctaccgacgctgagattccgccttctagccctccaagtgcctcaggctcctgtcccgacgattgtaacgaccagggcagatgcgttagaggacgctgcgtgtgcttccctggctatactggaccctcttgcggctggccatcctgtcccggagattgccaggggcgtggacgctgcgtgcagggcgtctgtgtctgccgcgctggtttctccggtcctgactgttcacagcggtcctgtccccgaggctgctctcagagaggaaggtgtgagggtgggagatgcgtatgtgatccaggatacacaggagacgactgtggcatgcggtcatgtccaagaggttgttcccagcgaggtcggtgtgaaaatggccggtgtgtttgcaaccccggctacactggggaagactgtggtgtgcggtcgtgcccccggggctgcagccagaggggtagatgcaaagacgggcggtgtgtttgcgacccgggttatactggcgaggattgcggcacgcgtagttgtccatgggactgtggcgaaggcggaagatgcgtggacggcagatgtgtatgctggccagggtataccggcgaagactgttccactcgcacctgccccagagattgcaggggccggggccgctgtgaagatggcgaatgtatttgtgacaccgggtactccggagacgattgcggcgtgcgctcctgcccgggagattgcaaccagcgaggcagatgtgaagatggtcggtgtgtttgttggcccggatacactggcacagattgtggatccagggcatgtcctcgagactgtcgcgggcgggggcgctgcgaaaacggtgtgtgcgtctgcaatgccggatacagtggtgaggactgcggagtgcggtcttgcccaggagactgtagggggagaggtcgctgtgaatcaggacggtgtatgtgttggcccggctatacaggtcgtgactgtggcaccagagcctgtcccggtgactgccgcgggagagggaggtgtgtcgatggaaggtgtgtctgcaatcccggcttcaccggcgaggactgtggctcccgaaggtgccccggtgactgtcgcggtcacggcctctgtgaggatggggtctgtgtgtgtgacgcaggatattccggggaagattgttcgacaagatcctgtccgggggggtgtcggggccgaggtcagtgtctggacggtcgctgcgtgtgcgaggatggctattcaggcgaagattgcggtgtgcgacagtgtcccaacgattgttctcaacacggtgtgtgtcaggatggcgtctgcatctgttgggaaggatatgtgagcgaggactgctccatcagaacttgcccatctaattgccatggaagaggaagatgtgaggagggaaggtgtctatgtgatcctggctataccggccctacctgtgcaactcgtatgtgtccagcggattgcagaggtcgtggacgctgtgtccaaggagtgtgcctatgtcacgtgggctatgggggtgaggactgcggtcaggaggagcccccagccagcgcatgtcccggagggtgcggcccccgagagttatgtcgggccggccagtgcgtgtgtgtggaaggctttcgcgggcccgactgcgccatccagacctgccctggcgattgtcggggccggggtgagtgtcatgacggtagttgcgtctgcaaagatggatatgcgggtgaagattgtggcgaggaggtgccaacaatagagggcatgcggatgcacctgctggaggagacaaccgtccgtactgaatggactccggctccaggaccagtcgatgcttacgagatccaattcattcccacaactgagggcgcaagtccacctttcaccgctcgagtgccttctagcgccagcgcttacgaccagcgagggttagccccagggcaggaatatcaggtaacggtgcgcgcattgcggggaacatcctggggattacctgcctctaaaactattacaacaatgatcgatggtccccaggatctgcgcgtggtggccgttacgcctacaactctcgagcttggttggttaaggccccaggctgaagtcgaccgcttcgtagtctcatacgttagcgcgggtaaccaacgtgttagactggaggttcctcccgaagctgacggcacactgctaaccgatttgatgcccggagtcgagtatgtcgtaactgtgacggcggagcggggtagggccgtctcgtacccagcatctgtgcgcgcgaacaccggctcgtcccctttgggcctgcttgggacgaccgacgaaccacctccttctggaccatctactactcaaggcgctcaggctccccttctgcagcaacggccacaagagctgggcgagctccgggtgctgggtcgggatgaaacagggagactgagagtggtctggacagctcagccagatacattcgcatactttcaactcagaatgcgcgtgccagaaggcccaggagctcacgaagaggtactccctggtgacgtgcgacaggccctcgtgcccccccctcctcctggtactccttatgaactctccttgcacggggtcccacccggcggcaaaccctccgatccgatcatctaccagggcattatggacaaagacgaggagaagccaggtaagagctcgggacccccgagactcggggaactgactgtgactgaccgtaccagtgattcacttctgctgaggtggacggtccccgagggcgagttcgactctttcgtgattcaatacaaggaccgagacggacaacctcaggtggtgccggtcgaaggcccgcagaggtctgctgtgatcaccagtctggacccaggcaggaaatataaattcgtgctctacggctttgtggggaagaagcgccatgggccactggtagccgaagcgaaaatcctcccgcagtccgacccatcacctggcacccccccgcgcctgggtaacctctgggtaacggatcccactccggacagtctgcatttgagctggactgtgcccgaaggccagttcgacactttcatggtccagtaccgagaccgggacgggcgaccccaggtcgttcctgtagagggcccggagcggtcatttgttgtctcttctctggaccctgaccacaagtaccgcttcaccctgttcgggatagctaataagaagcggtatgggccattgaccgcagacgggaccacagctccggaacggaaagaggaacctcccagacccgaattccttgagcagcctctgctgggggaactgactgtgaccggcgtgacaccagattccctaagattgtcatggaccgttgcccaaggcccgttcgattcctttatggtccagtataaggatgcccaaggacagcctcaagccgtgcccgtagcaggtgacgagaacgaagtgacagttcctggattagatcccgacaggaaatataagatgaatctgtatgggctgagaggccggcagcgggtgggaccagagtccgtggtagcaaagactgcaccccaagaggacgtggacgagacaccttcacccaccgagctcggcaccgaggcccctgaatcgccagaggagcctctactcggggagttgactgtcactgggagctcccccgatagtctgtcgctgttttggacagttcctcaaggatcgttcgatagcttcaccgtgcagtacaaggatagagacgggcggcctcgtgcagtacgtgtcggagggaaagaatctgaagtaaccgttggtggactagagcccggacataagtacaagatgcatctctatggcctgcacgagggtcagcgtgtggggcccgtgtcagcggtgggggtgacagctccgcagcaagaagagacaccacctgcaacggaatccccgttagagcctagattaggagagctgacagtgaccgacgtgaccccaaatagcgttggactgtcatggaccgtgccggaggggcagtttgactcatttattgtccagtacaaagacaaggatggacagccccaggttgtcccagtcgccgctgatcagcgagaggtaaccgtctataacttagaacctgaacgcaaatacaagatgaacatgtatggtttgcacgatgggcagaggatgggtcctctctcggtcgtgatcgtcacagcccccttacctccagccccggccactgaagcgtcaaaacctcccctggagcctcggctgggagagctaacggtgaccgacattaccccggattcagtgggcctgtcatggaccgtgccagaaggagaatttgattcctttgtggtgcagtacaaagatcgcgatggtcaaccccaggtcgtgcccgtggcagcagaccagcgggaggtgactattcccgatctggaaccgagccgcaagtataagttcctcctgttcgggatccaggatggcaaaagacggagtccagtgtccgttgaggcgaaaaccgtggctaggggagacgcttctcctggagcaccacccagactgggcgagctctgggtgactgaccccacgcccgattctttacgtctatcatggacagtgcccgagggtcagttcgactccttcgttgtacaatttaaggataaggatggcccacaggtagtcccagtggaaggccacgagcgcagcgtcacagtaaccccactggacgcagggcgcaaatatcgttttttgttgtatgggctgctggggaaaaaacgacacggcccacttacggccgacggtacgactgaggccaggtctgcgatggatgatactggcaccaagagaccccccaaaccgagactgggagaggagctgcaggttacaaccgttacccagaattctgtaggcttatcttggaccgtgccagagggtcagttcgatagcttcgtggtgcagtataaggacagggatgggcagccacaggtggtccctgtcgagggtagcctaagagaagttagcgtgcccgggctggaccccgctcatcgttataagctgttgctgtacgggcttcatcatgggaagcgagtaggcccgatctctgctgttgcgattacagccgggagggaggagacggagactgagaccaccgctcctacaccaccggcaccagaaccacaccttggtgaactgactgtggaagaggccacaagccatacacttcatctgtcttggatggtgacagagggcgaattcgattcatttgagatccagtatacagatagagacggccagttgcagatggtgcgcattggcggtgacaggaacgatatcacactgtctggcctggagagcgatcatcgatacctggtgacactgtatggatttagtgacggtaaacatgtaggaccagtgcatgtagaggctctgaccgtcccagaggaagagaagccaagcgaaccaccaaccgctacgcccgaacctcctatcaaacctaggctcggcgagctaacagtgactgacgccacacctgactcgctttccctatcttggacagtcccagaaggccaatttgaccattttttggtacaatatcgcaatggcgacggccagcccaaagctgttcgggtgcctggccatgaggaaggcgtgacaattagcggactggagccagaccacaagtacaaaatgaatctgtatggtttccacggaggacagcgcatgggtcctgttagcgtggtgggggtcacagcagctgaggaggaaactccttctcctacagagccgtctatggaggcccctgaaccagcagaggagcctttgcttggcgagctcacagtgaccggctcctctcctgacagtctttctctgtcgtggacagttccccagggtcgcttcgactcatttaccgtgcagtacaaggatcgggatgggcgtccgcaggttgtgagagtcggtggggaagagtccgaggttaccgtcggaggtttagaaccaggccggaagtacaagatgcacctgtatgggctgcacgagggacgtcgcgttggacccgtgtcagccgttggggtgaccgcacctgaggaggagtcaccagatgcacctctcgcaaagctgcggttgggtcaaatgactgtgcgcgacataacctccgactctctgagcttgtcatggactgtgccagagggacagtttgaccattttttagtgcagttcaaaaacggagatgggcagcccaaagccgtgcgagtccccggccatgaggatggagtgactatcagcggtcttgagccagatcataaatacaaaatgaacctgtacggattccatggtggccagcgggtgggacctgtgagtgctgtgggactgactgctcctggaaaggatgaggagatggccccggcatcaacagaaccacctacccctgaaccccccatcaagcctcggctcgaggagctcactgtgacagatgcaacccctgatagtctaagccttagctggactgtgccagaaggtcagttcgaccactttctggtgcagtataaaaacggggacggccagccgaaggccactcgggtacccggacacgaggacagagtgaccatctccggtctcgaacctgacaacaaatacaagatgaatttgtatggatttcatgggggccagcgggtcggaccagtttccgcgatcggcgtgaccgctgcagaagaggagaccccttcacccacagagccaagcatggaggccccagagcctccagaggaacccctgctgggagagctgaccgtgactggctccagccccgattccctttccctcagttggacagtgcctcagggtagatttgatagtttcaccgtccaatacaaggaccgagatggccgcccacaggtggtgagggttgggggagaggagtctgaagtcactgttggcggccttgagccgggccgcaaatataagatgcacctgtacggactgcacgagggtaggcgggtgggtcctgtgtccacagtgggggtcaccgcaccccaggaagacgtagatgaaaccccttctcccaccgaaccaggaactgaggccccggagccacctgaagaacccctgttgggggagctcactgttaccggaagctctcccgactctctttccttatcctggactgtgccgcagggccggtttgatagcttcactgtgcaatacaaggatagagacggacgaccgcaggctgtccgtgttggggggcaagagtctaaagtaaccgttcggggtttggagccagggaggaaatacaagatgcacttatacggcctgcacgagggccggcggttaggcccagttagtgcagtaggggtgaccgaggacgaggccgaaacgacacaagccgtgcctactatgacacctgaacctcccattaagccaaggctgggagaactcaccatgacggacgccacgcctgattccctgtccttgtcttggaccgtgcccgagggacagttcgatcacttcctagtgcagtacagaaacggcgatggacagcccaaagccgtcagagtccctggacacgaggacggagttaccatctccgggctcgagcctgatcacaagtataagatgaacctgtatggcttccatggcgggcagcgtgtaggccccataagtgtgatcggggtcaccgccgccgaggaggagactccttctcctacagagctaagcacggaggcccctgaacccccagaggaacctttgctcggcgagctaacagttaccgggagctcacctgacagcctttcgctgtcatggacaatccctcaaggacactttgactccttcacggtgcagtacaaggacagagatggaaggccccaggtgatgagggtcagaggagaagaaagtgaagtgaccgtcggggggctggagccaggccgaaagtacaagatgcacttgtacggactgcatgaaggtaggcgcgttggccctgttagtaccgtcggtgtgactgaagacgaggccgagaccactcaggctgtaccaactaccacgcctgaaccccctaacaagcctcggctgggcgagctcacagtgaccgacgctacaccagattcattaagcctgagctggatggtgcctgagggacagttcgatcacttcctggttcagtatcgtaatggagatggccagcctaaggtcgtccgagtgcccggccacgaggatggagttacgatttctggactggaacccgatcacaagtacaaaatgaatctgtacggctttcatggcgggcaaagagtcgggcctatttccgtgatcggagtaactgctgcagaggaggaaacgcctgccccgaccgagcccagtaccgaagctccagaaccaccagaggagccactgctaggcgaactgacggtgacggggtcttcgccagacagcctgtccttgtcatggacaatccctcagggcagatttgattcgtttaccgtccaatacaaggacagagatggcagacctcaggtggtgagagttcgcggcgaagaatcagaggtcacagtgggcggactggaacccggctgcaaatataaaatgcacctctacgggttacacgagggacaacgggttggacccgtttcagccgttggggtgactgcccctaaagatgaggcagagactacccaggccgtgcccaccatgacacctgaaccacccattaaaccacgattgggagagctcactgtaactgacgccacccctgatagtctgtctctcagctggatggtcccggaaggtcagttcgatcactttctggttcagtatcgtaatggagatggccagcccaaggccgtgcgtgtccccggacacgaagatggggtgaccatctctggactggagccagatcataaatacaaaatgaatctttatgggtttcacggaggccagagagtaggtcctgtctcagcaattggcgtgaccgaggaggagacgcccagcccaaccgaaccctctaccgaagcacccgaggccccagaggagcccctgctgggagaactgactgttactgggtcttcccccgattccctttctttgagttggactgttcctcagggcaggttcgattcctttaccgtccaatacaaagaccgcgatgggcagccacaggtggtgagagtgagaggtgaggaaagcgaggtgacagtcggcggactagagcctggcaggaaatacaaaatgcacctgtacggcctgcatgaggggcagcgggtaggacctgtgtctacagtggggataacggctcccctgccgacacccctgcccgtcgagccccggctgggcgagctcgctgtggccgctgtcacatccgactccgtgggcctcagttggacagtagctcaaggaccattcgactctttcctagtccagtaccgcgatgcccaggggcagccacaggccgtgcccgtaagcggggacctcagagccgtcgcggtgtctggcctggatcctgcccgaaaatataaatttttgttgttcgggctccagaacggtaagcgtcatggtccagtgcccgtggaggcacgaactgcacccgatacaaaaccaagtccacgccttggagagctcacagtgacagatgccactccagatagtgtagggctgagttggacagtgcccgaaggagaattcgactcattcgtggtgcaatataaggacaaggatggtcgactacaggttgtgccagtggccgctaaccaaagggaagtgactgttcaaggccttgaaccctccaggaaatataggtttctgttatacggattgagcggccgtaagagattgggccccatatctgcagatagcacgactgccccattggagaaggagctgccaccccacctcggagaattaacagtagctgaagagactagtagcagtctgcggctgagctggacagtggcccaagggccctttgatagttttgtggtccagtatcgcgacaccgatggacaaccccgcgctgtgcccgtcgccgcagatcagaggaccgtgacagtcgaagatttggaacccgggaagaaatataagtttctgttgtatggcctgctaggcgggaaaagattggggcccgtatcagctctgggaatgaccgcccccgaggaggatacccccgcacccgaattagcacccgaggctcctgagccaccggaggaacctcggttgggcgttctgactgtgaccgataccacgccagattctatgcgcctctcctggtcggtggcccagggcccgttcgactctttcgtggtgcaatacgaggacaccaatggccagccacaggctttgctggtggacggagaccagtctaaaatcctaatctccggcttagagccttcgacgccttacagatttctcctgtacggacttcacgaaggcaaaaggctggggcccctaagcgccgaggggacaaccggacttgccccagcagggcagactagcgaagagtcccgaccgagactaagccaactttcagtcactgatgtcaccacctcatcccttaggctaaattgggaagccccacctggcgcatttgattcatttcttctgcgatttggagtccctagcccaagcacgctagaacctcatccgaggcctctcctgcagagggaactcatggtgcctggcactagacattcagcagtcttacgagacctgaggtctgggacactctactcattgaccctgtatggcctgagagggcctcataaggccgactctatccagggaacagcacgcaccctgagccccgttctggaaagcccccgcgacctccaattcagcgagatccgggagactagcgcaaaagtcaactggatgccaccaccctccagagcggacagttttaaagtgagctaccagctagccgatggaggggagccacagtccgtgcaggtggatggacaggccagaactcagaagctacaaggcctgatcccgggggctcggtacgaggtgactgtggtgtccgtccgcggctttgaggagagcgaaccactcactggtttcctgacaactgtgccagatgggcccacgcagctgagagctctcaacctcacagaaggatttgcagttctgcattggaagcctccccaaaaccccgtggatacttatgatattcaagtcacagcccccggtgcacctccactccaggcggaaacaccaggaagcgcagtcgactatcctcttcacgacctggtcctgcatacaaattacactgccacagtacgcggacttcggggtccaaacctgacaagtcccgcatctatcaccttcactactggtctcgaggccccaagagatttggaagcgaaagaggtcacaccacgcacggctctgcttacctggaccgagcctcccgtgaggcccgccgggtatctgcttagctttcacacccctgggggacaaactcaggagatactgttgccaggtggcattacatctcaccaactcctgggcttatttccttccacctcctacaatgcccggctgcaggctatgtggggccagagcctactgccgccagtttccacctcctttacaactggcggcctgcgaatcccatttccccgagactgtggagaagagatgcagaatggagccggtgcgtctcgcaccagcacaatctttctcaacgggaacagggaacgccccctgattgttttctgtgacatggagacagatggcggtggctggcttgtcttccagaggcggatggacggtcagaccgacttttggagagactgggaggactacgctcacggtttcgggaacatttctggcgagttctggctcggaaacgaggccctgcattctttgacccaagccggagactatagcatgcgtgtggatctgcgggctggagatgaagccgtgttcgcacaatacgactccttccacgttgattcagccgctgagtattaccgtctgcatttggagggctaccacggcacagcaggagacagcatgagctatcactccggctcggtgttctccgcacgggatcgcgaccctaacagcctgctgatctcctgcgccgtctcttatcgaggcgcatggtggtaccggaattgtcactatgccaatctgaacggcttgtatggctctacagtagatcaccagggtgtctcttggtatcactggaaggggttcgaattctccgtgcccttcacagaaatgaagctgcgtccgcgcaactttcgcagccccgccggcgggggatag

SEQ ID NO: 201494 - DNA, 12729 bp, Artificial Sequence
  derived and/or modified sequence
atgatgcctgcccaatatgcgctaacctcttctctggtcttattagtgctgctgtcaacggctcgagctggtccctttagtagtcgaagcaatgtaacacttcctgcccctcggccacccccccaaccagggggacataccgtcggggcaggcgtcggcagtccatcatcacagctctacgagcatacagttgagggaggtgagaagcaagtcgtcttcacccatcgcatcaatcttcctcccagcaccggttgtggctgcccccccggtaccgagcctcccgttctagcttcagaagtgcaggccctcagagtccgtctggagattctcgaggaactggtgaaaggtctaaaagaacagtgcactgggggctgctgtcctgcgagcgcccaggcaggcactggtcagacggatgtgcggacattatgcagtttgcacggggtattcgatctctctcggtgtacttgcagctgtgagcctggctggggcggacccacgtgttctgaccctacagacgcggagatccccccatcatcccctccatcggcgagtggaagttgtcccgacgattgtaacgaccagggcaggtgcgtacgcggccgatgtgtctgctttccaggatacactggccctagttgcggctggccatcttgcccgggagattgtcagggacgagggagatgtgtgcagggcgtgtgcgtgtgcagagccggtttttccggccccgactgctctcagagaagctgccccagaggctgttctcaacgaggtaggtgtgaaggcggccgatgcgtgtgtgacccaggctatacaggagacgactgcgggatgcggagctgtccaagggggtgctctcagcgcgggagatgtgaaaatggacggtgcgtgtgcaacccaggctacgctggagaagattgtggtgtgaggtcatgtccgagagggtgctcacaacgggggcgctgtaaggacggcagatgtgtctgtgaccctggctatacaggagaggattgcggtacacgttcctgcccatgggattgcggggaaggcggtcggtgtgtggacggacggtgtgtatgctggcccggatacaccggtgaggattgcagtaccaggacttgccctcgagactgtaggggaaggggccgctgcgaagacggtgaatgtatttgtgacactggctatagcggcgatgactgcggggtacgttcatgtcccggcgattgcaaccagaggggacggtgtgaggatggacggtgtgtctgttggcccggatacaccggaacagattgcggctctcgggcatgcccccgggactgcagaggaagaggcagatgcgaaaacggtgtgtgcgtatgtaacgccgggtactctggagaggactgcggagtgaggtcctgtcccggcgactgtcgggggaggggacgttgtgaatctggaagatgtatgtgctggcctggatataccggaagagactgtggaacacgtgcctgcccgggcgattgcaggggacgcggaaggtgcgtggacggtagatgtgtgtgcaaccctggcttcacaggagaggactgcggcagcaggcgatgcccaggggactgccgcggccacggcctgtgtgaggatggagtttgcgtctgtgatgctggatatagtggcgaggattgttctacgagatcctgtccaggcgggtgcaggggcagaggccagtgcctagacgggaggtgcgtgtgtgaggatggctactccggcgaggactgtggcgtgcgccaatgtcccaacgactgctctcaacacggcgtgtgccaagatggtgtctgtatctgttgggaaggctacgtgtccgaggattgcagcattaggacatgcccatccaattgccacggacgaggaaggtgtgaggagggtcgatgcctgtgcgatcccggatacaccggccccacctgcgccacacgaatgtgtcctgccgattgccgcgggcgagggcgctgtgtacaaggagtctgcctttgtcatgttgggtacgggggcgaagattgtgggcaggaggaaccaccggcctctgcctgtccaggaggttgcggacctcgggagctctgtcgggccggtcagtgcgtgtgcgttgagggtttccgtgggcccgattgtgcgattcagacctgtccaggggattgcagagggagaggggaatgtcacgatggatcatgcgtgtgtaaagatggatatgcaggagaagattgtggagaggaggtgcccacgattgaaggcatgagaatgcacctgctagaagaaaccactgtgcggacggaatggactccagcccctggacctgttgacgcctatgagattcaattcatcccaacgaccgagggcgcatcccctccttttaccgcgcgcgtgccctcatccgcctctgcctacgatcaacgtggcttagcaccgggacaggagtaccaggtcactgtcagggcgctccgcggcacaagctggggactacctgcctccaaaactattacaactatgatagacgggccacaggacctccgggtagtcgcggtgacccctaccacactggaattgggctggcttcggccccaagctgaggtggaccgattcgtggtgtcgtacgtgagcgcggggaaccagcgggttcgcctcgaagtccctccagaagccgacggaaccctgctgaccgacctcatgcccggcgtggagtacgtggtcactgtaacggcagagagagggcgtgctgtttcttatccagcttccgtccgtgcgaacacagggtcttccccactgggcctgcttggcaccacagacgaaccccccccgtccggcccaagtacaacacaaggagctcaggcccctttactccaacagcgcccacaggaacttggagagttgagggtgcttggccgggatgaaactggcagactgcgggtggtgtggacagcgcaacctgacacattcgcctactttcagctccgtatgcgcgtgcccgagggtccaggagcccacgaggaggttctaccaggggacgtccggcaggccctcgtccctccaccccctcccggtaccccctacgagctctctctccacggcgttcccccagggggcaagccgagcgaccccatcatctaccagggcataatggataaggatgaagaaaaacccggaaagagctcaggtcccccaagactcggggagctgaccgtgaccgatcggacatccgactctctcctgttaaggtggaccgtccctgagggcgagttcgactctttcgtgatccagtacaaagacagagacgggcagccccaggttgtccccgtcgagggacctcaacgcagcgctgtcattacctcccttgatccaggtagaaaatacaagtttgtgctgtatgggttcgttggtaagaagcgccatggcccactcgtggccgaagcgaaaatattgcctcagtccgatccttctccgggcactccgccacatctgggtaacttatgggtgacagaccccacgccagatagtctgcatttgtcatggaccgtgccggagggccagttcgacacttttatggttcagtatcgtgacagagatgggcgcccgcaggtggtcccagtcgaagggccagagagaagctttgtggtgagcagcctcgacccagatcataagtacaggtttaccctatttggcatcgcaaataaaaagcgatacggcccgctcaccgctgacggcacaaccgccccagagagaaaagaggagccccctaggcccgagtttctagagcagcccttgctcggggagctaacggtaaccggagtgacccctgattccctcagactgtcctggaccgtggctcaggggccattcgattcctttatggtgcaatataaggatgcccagggacagccgcaggccgtccctgtagccggcgatgaaaatgaagtcacagttcccggtctagatccggatcgtaaatacaagatgaacctgtacggactgagaggaaggcagcgggtcggcccagagtcagtagtggctaagaccgccccccaggaagatgtagatgagaccccttctccgaccgagcttggcactgaggccccagagagcccagaagagcccctcctcggcgaattgaccgtcaccggcagctcccccgacagcttgagcctattctggacggtacctcaaggctctttcgattcctttaccgtccagtacaaggatcgcgatggacgccctagggcagtccgggttggagggaaggaatcagaagtgaccgtgggtggcctagagccagggcataaatacaagatgcacctgtatggtctgcatgagggacagcgtgtgggaccggtatctgccgtgggggtaaccgccccacaacaggaggaaacacctcctgctactgaaagtcctttggagccaaggctgggcgagctgacggtaacagatgtcaccccaaattcagtgggcctgtcatggacagtccctgagggccagttcgacagctttattgtacagtacaaggataaggacggccagcctcaggttgtgcccgtcgccgctgaccaacgagaagtcaccgtctacaaccttgagcccgagaggaagtacaaaatgaacatgtacggtcttcacgacggtcagaggatgggccccctatccgtggtgattgtgacagcaccgctcccacctgcccccgcaactgaggccagcaagccaccactggagcctcggctaggtgagctcaccgtcacggacatcacccccgactccgtgggactgagctggactgttcctgagggcgagtttgatagtttcgtggttcagtacaaagaccgggacggacagcctcaggtagtgcccgtggccgctgaccagagagaagtgactatcccagatttggaaccctcccgcaaatataaattcctcttgttcggcattcaggatggtaaaaggaggtcacctgtgagcgttgaggcaaagaccgtcgcccgtggtgacgcgtcgcccggcgccccaccccgccttggagaattatgggtgactgatcccacacccgattctctcagattgtcatggactgtccccgaggggcaatttgactccttcgtcgtgcagttcaaggacaaggatgggcctcaagtagtccctgtcgagggacatgagcgcagtgtaaccgttacacccttggatgctggacgtaagtaccgattcctgttgtatggcctgcttggtaaaaagagacacgggcccctcacggcagacggcactacagaggcaagatccgccatggatgataccggtaccaagcgaccacccaagcctaggctgggagaagagctgcaggtgactacagtcacccaaaactccgttgggttgtcttggacagtgcctgagggccagtttgactcctttgtggtccagtataaggaccgggacgggcagccacaggtcgttccggtggagggctctctccgagaggtgagcgttcccggattggacccagctcataggtataaactcctgctgtacggccttcatcatggcaagcgagtaggccccatttcagcggtggctatcacggctggtcgggaggaaaccgagaccgagaccactgccccaacacccccggcccctgagccccacctcggagaactaactgtcgaagaggccacgagccataccctccacctgtcttggatggtgacagagggagaattcgattccttcgagatccaatatactgatcgcgatggtcagcttcagatggtgcggattggtggagatcgcaacgatatcacgctctctggcttagagtctgaccacagatacctggttacactgtacgggttttcagatggtaagcacgtgggtccagtgcatgttgaggccttaaccgtgcctgaagaggagaagccaagtgaacctcccaccgctacccccgaaccacctatcaaaccccggttgggggagcttaccgtgactgacgccacccctgactcactcagtctttcatggacggtgcctgaagggcaattcgatcactttctggtgcagtatcggaacggggacggccagcccaaggcagtgcgggttccgggacacgaagagggcgtgaccatcagcgggttggaacccgatcacaagtataaaatgaatctctacggtttccatggaggacaacgtatgggaccagtcagcgttgtcggtgttaccgccgccgaagaggaaactccgtctcccacagaaccctctatggaggccccagagccggccgaggaacctctgctcggcgaactcacagtcacgggatccagccccgacagtctctcacttagctggacggtacctcagggccgctttgatagctttactgtgcagtacaaggatagagatggccggccccaggtagtccgagtgggcggggaagagagcgaggtgacagtagggggtctggagcccggaagaaagtacaaaatgcacctgtacggtctgcacgagggtagaagagtaggtcccgtcagcgccgtcggggtgactgcgcccgaggaggagtctccagacgcacccctggccaaattgcgccttggtcagatgactgttcgggacatcacctcagacagtctatcgctgtcctggaccgtcccggaaggccaatttgatcactttcttgttcagtttaagaatggggatggccaacccaaggcggtgcgagtccctggccacgaagatggtgtaactatcagcggactggagccggaccataagtataaaatgaacctgtatggctttcatggcggccagcgagtcggtcctgtgagtgcggtaggtttaactgctcccgggaaggatgaggaaatggctccagcatctacagagccacctactcctgagccgcccattaagcctagactcgaagagttgacggtcacagatgcaacgcccgacagtctgagtttgtcatggactgttccggagggccaatttgaccattttctagtgcagtataaaaacggggatgggcagcccaaagccacccgggttcccggccacgaagacagagtgactatttctggtctcgaacctgacaataaatacaaaatgaacctgtacggtttccacggggggcaacgggtggggcctgtgtcagcgatcggcgtgactgcagcggaggaggaaacacccagtcccaccgaaccttctatggaagcccccgagccacccgaggagccactgctaggcgaattgacggttacagggagtagtccagactccctttccctgtcttggactgtacctcaaggccgctttgactctttcaccgtgcagtataaggatcgtgatggccggcctcaggtggtgagagtaggcggcgaagagtcggaggtcactgtcggcgggctagagcccgggcgtaagtataagatgcacctatacggcctgcatgaaggccgacgcgtggggccagtaagcacagtgggagtcacagcccctcaagaagatgttgatgaaaccccttcacctacagagccgggcacagaggcccccgaaccgccggaagaacctcttcttggcgagttgaccgtcacaggttcgagtcccgatagcctgagcttgagctggaccgtcccgcagggccgattcgacagctttacggtgcaatacaaggatcgggacggccggccgcaagctgtcagagtgggcggccaggagtccaaagtgacggtgaggggcttagaacccgggcgaaagtacaaaatgcacctgtacggactgcacgaggggcgccggctgggacctgtgtccgccgtaggagtgacagaggatgaggccgagaccactcaggccgtgcccactatgacgcccgaaccgcctatcaaaccaagattgggagagctgaccatgaccgacgcaacacccgactcactgagtctgtcctggaccgttccggagggacaattcgatcattttctggttcagtaccgaaacggtgacggtcaacccaaggcagtccgggtgccaggtcatgaggacggcgtcaccataagcgggctggaacctgaccacaagtacaaaatgaatctgtacgggtttcatggggggcagagagtaggccctatcagcgttattggtgtcacagcagcggaggaagagacaccaagccccaccgaactgtctaccgaagcacctgaaccacctgaggaacctctgttgggggagctgaccgttactggctctagccccgactcgctgagtctgtcatggaccatcccgcagggccacttcgactcttttactgtccagtataaggatcgagatggcagaccccaagttatgagagtgaggggcgaggaaagcgaggtgacagtcgggggcctggagcctggaagaaagtataagatgcacctctacggattgcatgagggaagacgtgtgggccccgtatcaactgtaggggtgacagaggatgaggccgaaaccacacaggcggtcccaacaaccacgccagaacccccaaataagccccggcttggtgaacttactgtcacagacgccaccccagactctttatcactgtcctggatggtaccggagggacagttcgatcatttcctagtgcagtatcgcaacggggacggacaacctaaggtagtcagagtgcccggccatgaggacggggtgaccatatccggtctggaacccgaccataaatataagatgaacttatatggctttcatgggggtcagagagtaggtccaatttctgtgattggggtaactgctgccgaggaggagaccccggcacctacagagcccagcactgaagcaccagagcctcctgaagagccccttctcggcgaattgactgtcaccgggtcatctcctgattcactttcactatcttggacgatcccacaaggccggtttgattcatttacagtccagtacaaggacagggacggccggccacaggtagtccgagtgcggggggaagaatcggaggtcacggttggagggttggagcctggctgcaagtacaaaatgcatctatacgggctccacgaaggccagagggttggccctgtgtccgctgtgggcgtgaccgcgcccaaagacgaagccgagactacccaggcagtgccaacaatgactcccgaaccacccattaaaccccgactgggggaattgactgttaccgacgcaaccccagattctttgtctctgtcctggatggtacctgagggccaatttgatcatttccttgtccagtatcggaatggagacggtcagcccaaagctgtgagagtccccgggcacgaggatggtgtgacaataagtggtctcgagccagaccacaaatataaaatgaacctctacggcttccatggtggccaacgggtagggcccgtaagtgctatcggcgtgaccgaggaggagacaccttcccctaccgaaccgagcacagaggcccctgaagcccctgaggagccccttctcggagagctcaccgttaccgggagttcgcccgacagtttgtcattgagctggactgtccctcagggccgtttcgactctttcaccgtgcagtataaagacagagacggccagccacaggttgtgagggtgagaggtgaagaaagtgaggtcacagtggggggactcgagcccgggcgtaagtacaaaatgcatttgtacggcctccacgaaggccaaagagtgggcccagtctccacagttggcattaccgcccctttgcctaccccacttcccgttgagcctaggctcggcgagcttgccgtagcagctgtaacatccgacagcgttggactgtcctggacggtggcacagggtcctttcgactcattcctcgtgcagtaccgggacgctcagggacagccacaagcggttccagttagtggcgatctcagggctgtggccgtgagtggcctagaccccgcacggaaatacaagtttctgctgttcggccttcagaatggaaaacgccacggtccagtcccagtggaggcccgaacagccccagacactaaaccgagtccgagacttggggaactgacagtgactgacgccactcctgatagtgtgggtctctcctggacagtgccagagggcgaattcgacagtttcgtggtgcagtacaaggacaaggatgggaggcttcaggtcgtgcccgtggctgcaaaccagagggaagtgactgtgcagggccttgagccttcccgcaagtatagattcctactgtatgggctgtctgggaggaagcgcctggggcccatttcagccgattcaacgacagcaccactagagaaggagctgccaccacatctgggggaactcacagtagcagaagagacctcttctagtttaagactgtcctggaccgtggcgcagggaccctttgactcctttgtcgtgcagtatcgcgacacggatggacaacctcgagccgttcccgtagccgctgatcagagaacagtaacggttgaagacctggaacccggcaagaagtataaatttctgctgtatggtctcttaggcggtaaaaggctggggcccgttagtgccctggggatgaccgccccagaagaggacacccccgcccccgaattggctcctgaggctcccgaacccccggaagagccacgcctgggagtccttaccgtgaccgatacaactcccgactcaatgagactgtcatggtccgtggcacaaggccccttcgactccttcgtcgtgcagtatgaggacacaaatgggcagcctcaggctctgctggtggatggtgatcagtccaaaatcctgatttccggactggagcccagtacgccatatcgttttctgctgtatgggctgcatgaaggtaagaggctgggaccactgagcgcagaaggaaccacaggattggcccctgctggacagacgagtgaggaatccagacctagactctctcagctgtccgtgactgatgtaaccacaagttccctgcgcctaaactgggaggcaccacccggtgctttcgacagcttcctcctgcgtttcggggtcccatctcctagtacacttgaaccacatcccaggcccctgttgcaacgggagctgatggtgccaggaacccggcatagcgccgtgctgagggatttgcggtccgggaccctctattcactgacgctctacggccttagggggccgcacaaagccgactcaatccagggtaccgctcgtacactgtccccggtattagagtctccccgcgatttacagttcagtgaaattagagagactagcgccaaggtgaattggatgccccctccatcacgcgctgactcttttaaggtcagctatcagcttgcagatgggggcgagccccagtctgtgcaagtggacgggcaggcacgcacacagaaactgcagggcctgatccccggcgctcgttacgaagtaacggtggtgtccgtaaggggatttgaggagagtgagccccttaccggttttctgactaccgttccggatgggcctacgcagcttagggcattgaatctgacagagggctttgcagtgcttcattggaagccaccacagaacccagtggatacttacgacgtgcaggtcaccgccccaggtgcccccccactgcaggccgagactcctggaagcgctgtggactaccctctgcatgatttggttctacataccaactacactgccaccgtacggggtttacgtggtcctaacctgacctcacccgcttccatcactttcactaccggactggaggccccaagagacctggaagcgaaggaagtgactcccagaacggctctgctgacatggactgagccccctgtcagaccagctgggtaccttcttagtttccatacgccaggtggacagaaccaggaaatcctcctgcctgggggtatcactagccaccaactgctcggtctgtttccatctacctcctataacgcacggctacaggcaatgtggggtcaatctttgctcccgcccgtttctacttcttttacaacaggagggttaaggatccctttccctcgagactgcggcgaagaaatgcagaacggcgcgggagcaagcaggacctcgacaattttcttaaacggcaacagagaacgccctttgaacgtgttctgcgacatggaaacggacggcgggggctggctggtgttccaacggcgcatggacgggcagaccgatttttggagagattgggaagattacgctcacgggtttgggaatatcagcggcgaattctggctaggcaatgaggctctacactcactgacccaggccggagactacagtatgcgtgtcgatctgagagcgggcgatgaagctgtgttcgcccaatatgatagcttccacgtggacagtgccgctgagtactatcgcctccacctggaagggtaccatggtactgccggagactccatgtcctatcacagcggctctgtgttctcggctcgcgacagagatcccaattctcttctgatttcgtgcgcagtttcttataggggagcatggtggtataggaattgtcactacgctaatttgaacgggctgtatggatctaccgtggatcaccaaggggtctcttggtatcattggaagggcttcgagttttctgttccctttacggaaatgaaacttcgaccccgcaacttccgctccccagctggtggcggctag

SEQ ID NO: 201495 - DNA, 843 bp, Artificial Sequence
  derived and/or modified sequence
atggtaaccgagggcgagttcgatagttttgagatccagtacactgaccgagatgggcaactgcagatggtaagaataggtggtgatcgcaatgatatcacactgagcgggctggaaagtgaccacaggtacctggtgacactctatggcttctcagatgggaagcacgttggaccagttcacgtcgaagcgttgacagtgcccgaggaggaaaagccttcagagccccctaccgccacgcctgaaccccctatcaaaccgcgactgggtgaactgacagtcactgacgctacccccgactccctctccctctcgtggactgtcccagagggccagtttgatcattttttagtgcaatatcgaaacggcgatggtcagcctaaggccgtccgggtgcctggacacgaagagggcgtcaccatatccgggctggagcctgaccacaagtataaaatgaacctatatgggtttcatgggggacagaggatggggccagtgtccgtcgtgggggtgaccgccgctgaagaagaaacaccctcgcccaccgaaccctctatggaagctcctgagcctgccgaggagcccttattaggtgaactgaccgttactggttctagccctgattcactaagcctcagctggacagtgcctcagggccgcttcgactcctttactgtgcagtacaaagatagggacggtagaccccaggtcgtccgcgtaggtggggaagagtccgaggtcaccgtgggcgggctcgaacccgggaggaaatataaaatgcacttgtatggacttcacgagggaagaagagtgggtccagtttccgcagtgggcgtgacatag

SEQ ID NO: 201496 - DNA, 12729 bp, Artificial Sequence
  derived and/or modified sequence
atgatgcccgcccagtatgcgttaaccagtagtctggtcctactcgtcctcttgagtacagcaagagcaggcccgttctcctcgcggagcaacgtcacactccccgcgcctcgtcctcctccccaacccggtgggcacacagtgggcgccggggtgggctcccccagctctcagctctacgagcatacagtggagggcggagagaagcaagtggtttttacccataggatcaaccttcctccatccaccggatgcggttgtccacccggcaccgagccacccgtcctggcttctgaggtacaggcgttgagagtgagactcgagattcttgaggaattagtgaaaggtctaaaagagcaatgcaccggcggctgctgccccgcaagcgcccaggccggcacaggacagacagatgtaagaacactctgcagtctccacggcgtcttcgacctgtcgcgctgcacctgcagctgcgagccaggatggggtggccccacatgttccgaccctacggacgcagagatcccccccagctcccctccatccgcctcgggttcctgtcccgacgactgcaatgaccagggaaggtgcgtgaggggccggtgtgtgtgtttccccggatatacgggtcccagttgcggctggcccagctgcccaggcgactgtcaaggccgtggccggtgcgttcagggagtgtgtgtgtgtagggcaggtttcagcggaccggattgttcccagcgcagttgcccacgcgggtgttctcagcgtgggcgctgtgagggcggacggtgtgtgtgcgaccccggatacactggcgatgactgtggcatgcgctcttgcccccgtgggtgtagtcagcggggccgctgtgagaacgggcgctgtgtttgtaatccaggctacactggcgaggactgcggcgtccggtcctgtcctcggggttgcagtcaaagagggcggtgcaaagacggcaggtgtgtgtgcgacccgggctatactggggaggactgtggaacgcgtagctgtccttgggattgcggggaaggcggccggtgtgtggatggaagatgtgtctgctggcccggttacactggagaggattgctctacgagaacatgcccaagggattgccgagggcgcggcaggtgcgaggatggcgagtgtatctgtgacaccgggtacagtggcgatgattgtggcgttcgctcttgccctggggattgtaaccagcggggtaggtgcgaggatggccgctgcgtctgttggccagggtatacagggactgattgtggctctcgggcttgccctcgcgactgtaggggcagaggcagatgtgagaatggggtttgtgtgtgtaacgctggctactctggagaggattgtggtgtgcggagctgtcctggcgactgccgcggcagaggtagatgcgaatccgggcgctgcatgtgttggccagggtacaccggccgtgattgtggaacaagggcgtgtcccggtgactgtcgcggccggggaaggtgcgtggatggcagatgcgtctgtaacccaggcttcaccggagaggattgcggaagcaggagatgtccaggcgattgtaggggacacgggttatgtgaagacggagtctgtgtgtgtgatgcagggtactcgggcgaagattgcagcacaaggagctgtcctggggggtgcagaggaagagggcagtgtctggacggccgctgcgtatgtgaggatggttattcaggagaagattgtggggttagacagtgtcccaatgactgcagccagcacggcgtttgtcaggatggggtgtgtatctgctgggagggttatgtgtccgaagactgtagcatcaggacctgccctagcaactgccacggacgagggagatgcgaagagggcaggtgtctatgcgatccaggatacactgggcctacgtgcgccacaagaatgtgtccagctgactgccgcggcagagggaggtgtgtacagggtgtatgtttgtgccatgtcgggtacggcggcgaggactgtggtcaagaggagcctcccgctagtgcatgtcccggcggttgtggaccaagggaactgtgccgcgccggtcagtgtgtctgtgtcgaaggatttcgcggacccgactgtgccatccagacgtgccctggcgattgccgcggtaggggcgaatgccacgatggctcctgtgtgtgtaaagatggctacgccggcgaagattgtggggaggaggtgcctactatcgagggcatgagaatgcatctgttggaggaaactacagtgcgcaccgaatggacccctgctccggggccagtcgatgcatatgaaatccagttcatcccaactaccgaaggtgcctcgccacccttcacagcaagagtgccgagctctgcctccgcatacgaccagcggggattagcccctggacaagagtaccaagtgactgtgcgcgctcttcggggcacctcatgggggctgcctgcctccaagacaattactaccatgattgatggcccacaagacttgagagtggtggcagtgacccccacaaccctggagctgggctggttacgcccccaagccgaggtggatcgtttcgttgtgagttacgtgtcagctggaaatcagagagttcgccttgaggtgcctcccgaagctgacggcacccttctaaccgacctgatgcccggggttgaatacgtggtcactgtaaccgccgagcgcgggagggccgtgtcctaccccgcaagcgtgcgagcaaacaccggctccagtccgctcggcctactgggaacaacagatgaaccacctccctccggtccaagtactactcagggcgcccaggcgcctttactgcaacaacggccacaggagctcggagaactgagagtactgggtcgggacgaaaccggccggctgagagttgtgtggaccgcacaaccagatacctttgcctatttccagctcagaatgagggtcccagagggtcctggggcccacgaggaggtcctccctggagacgtgaggcaggctctcgtgcctccgccaccccccggaacgccgtacgaactcagtctgcatggtgtgcctcccggagggaagcctagcgacccaattatctatcaaggtatcatggacaaggacgaggaaaagcccggcaagtcttctggtccgccacggctgggcgagctcaccgttaccgatcgaaccagcgactccctgctgctgcgctggaccgtgcctgagggcgagtttgactcttttgttatccagtataaagatcgcgatgggcagccacaggtcgtacccgtagaaggtccccagcggagtgcagttatcaccagtttggaccctgggcggaaatacaaattcgtcctctatgggttcgtgggtaaaaagcggcatggccctttggtggctgaagccaagatcttgccacaatctgacccatctcccggtactccaccacgcctaggcaatttgtgggtaaccgaccctacgccagactctctgcatctgagttggacagtgcccgaaggtcaatttgacacatttatggtgcagtatcgggatcgggacggtcggccacaggtggtcccagtcgaaggacctgagcggtccttcgtcgtttcctcactcgatccagaccataaataccggttcaccctcttcggcatcgccaataagaagcgctatggcccactgacagctgacgggactacagcacccgagcgcaaagaagaacctccacaccccgagttcttggaacagccactgctcggcgaactgactgtgacaggcgtcacccccgattcgttgcgcctgtcttggacagtagctcagggcccctttgatagctttatggtccaatacaaggacgcccaaggccaaccccaggctgtgccagtggccggcgacgaaaatgaagtcacggtcccaggcctggatccggaccgtaagtacaaaatgaatttgtatgggcttaggggcagacagagggtgggccctgagagcgtcgtggcgaagacagcacctcaggaagacgtggatgagactccctcccctaccgagttggggacggaagccccggagtcacccgaggaacctctattgggcgaattaaccgttaccggctcctcaccagattcattatcactcttttggactgtgccacagggatccttcgatagttttactgtccagtataaggaccgggatgggagaccaagagcggtccgggtcggaggaaaagaatccgaggtgactgtgggcggtttagagcctgggcataaatacaagatgcatctgtacgggctccacgagggccagagagtgggacctgtgagtgctgttggcgtcacagccccacaacaggaggagaccccgcctgcgacagaaagtccactggagccaagattgggagagctgaccgtgacggacgtgacgccaaactctgttggactgtcatggactgttcctgaaggacagttcgactcctttatcgtacagtacaaggacaaggacggccaaccacaggtagtgccagttgccgccgatcaaagggaagtcaccgtctataatcttgagccagaacggaaatacaagatgaacatgtatggcctgcatgatggacagaggatgggtccactgagcgtcgtcatcgtaacagcacccctgccccctgctccggctaccgaggcatctaagccgccgctggagccgagactcggggagctgaccgtcactgatattacacccgactcggttggattatcctggactgtgccagagggagagttcgattcctttgtcgtgcaatacaaagatcgggatggccaaccacaggttgtccccgtagctgccgaccagagagaggtcactataccggacctggagcctagtcgtaagtacaaattcctgttgttcgggatccaggacgggaagagacggagtcccgtttccgtggaggcgaagaccgtggcaagaggtgacgccagccctggcgcccctcctcgtctgggggaactgtgggtcactgaccctacacccgactcactcaggttaagctggaccgtccctgaaggacaattcgattcctttgtcgtgcagtttaaggataaagatgggccccaggtagtacctgtggaaggacatgaacgctctgttaccgtgactcctctcgacgcgggccggaagtatcgcttcctgctgtacggcttattgggcaaaaaaaggcatgggcctttgactgcagacggaacaaccgaggccaggtccgccatggatgacacgggcaccaaaagaccgcccaagcctcggctcggtgaagaactgcaggtaaccactgtgacgcaaaattcagtgggcctgtcatggacagtgcctgagggacagttcgacagcttcgtagtgcagtacaaagatcgggacgggcagccacaggtggtcccagtagaaggctcactgcgtgaagtctctgtcccaggactcgaccccgcacatcgctacaagcttctgctgtatggtctccaccacggcaaacgggtgggccccatctctgccgtggcgatcacagctggaagggaggagacggaaaccgaaaccaccgcgccaactccacctgcgccagagccacacctgggggaactgactgttgaggaagccaccagtcacacattacatctaagctggatggtgacagaaggcgagttcgattcttttgaaatccagtacactgatagagacggccaattgcaaatggtgagaatcgggggcgatcggaatgacatcacacttagcggtttggagtcggaccatcgctaccttgttaccttatatggattttcagatggtaagcatgtaggccctgtccatgtcgaggcgctgacagtaccagaggaggaaaagcccagcgagcctccgacggctacccccgaaccccctataaaaccacggctgggagagctcaccgttacggacgcaacccctgatagtctaagtttgtcttggaccgtgcccgaaggacaatttgaccattttctcgtgcagtaccggaacggggatgggcagccaaaggctgtgagggtccccggccacgaagagggtgtaacgatctctgggctcgaaccagatcataaatacaagatgaacctctatggtttccatggaggccagcgcatgggtcccgtctcagtggtcggcgtgaccgctgcagaagaggagaccccctctcctactgaaccatctatggaggcaccagaacccgcagaagagccacttctgggcgaactgactgtgacagggagtagccccgacagtctgagcttgagctggacagttcctcagggacgttttgactcatttaccgtacaatacaaagaccgcgacggacggccacaggtggttcgggtaggcggtgaagaaagcgaggtgacggtgggaggcctggagcccggccggaagtataaaatgcacctatacggcctacacgagggaagacgcgtcgggcccgtgtccgcggtcggcgtgacggctcccgaggaggaaagtccagacgcccccttagcaaaacttaggctcgggcaaatgaccgtcagggatattacctcagatagcctctcactctcttggaccgtgccagaagggcaattcgaccactttctcgtccaattcaagaatggggacggtcaaccaaaagccgtgcgtgtgccaggccacgaggatggggtgacaataagcgggttagaacctgatcacaagtataagatgaacctctacgggtttcacgggggccagcgcgtaggacccgtgtctgccgttgggctgactgcacccggtaaagacgaggagatggctcctgccagtaccgagcccccgacgcccgagcctccaataaaaccccgactggaggagctgacggtcactgatgctacaccggactctctttctctgagttggaccgtcccggagggacagttcgaccactttctggtgcagtacaagaatggcgatgggcaacccaaggccacacgggtcccagggcatgaagacagagtaacaattagtgggctggagcctgataacaaatacaagatgaatctgtacggcttccacggcggtcagcgtgtcggcccagttagcgctatcggggtcacggctgcagaggaagagacccccagccctacagaaccttcaatggaagctccggaaccccccgaggagcctctgcttggagagctgacagtcacgggctcctcacctgattctctgtcactctcgtggaccgtgccacagggcagattcgactcattcaccgttcagtataaggatagggatggtaggccgcaggtcgtgcgagtgggaggagaggagtctgaggtcaccgttggcggcctggagcctggtaggaagtacaagatgcacctttacgggctccacgaagggagaagagttggccccgtctctactgttggagttacagcacctcaagaggacgtcgacgaaacgccttccccaacagagccgggaactgaagcaccagagccacctgaagagccactcctaggcgagctgacagtgactggtagcagccccgatagcctatctctgtcttggacggttccccaggggcgcttcgactcgttcactgtacagtacaaagacagagacgggcgtcctcaagcggtgcgggtgggtggtcaggagagtaaggttactgttagaggtctcgagccaggaagaaagtataagatgcacttgtatggcttgcatgaaggacggcgtttgggacccgtttccgcagtgggcgtaacggaggacgaggccgagacaacccaggccgtcccgactatgacacctgaacccccaatcaagccacggctcggggagctcaccatgacagatgcgacgcctgactccctgtctttgtcctggaccgtccccgaggggcagtttgaccactttctggtgcagtatagaaatggcgacgggcaacccaaagctgtcagagtccctggacacgaggatggggttaccatcagcggactggaacccgaccacaagtataaaatgaatctctacgggttccacggcggacagcgggtcggtccgataagcgtgatcggggtgaccgcagccgaagaagagactccatccccaacagaattgtccaccgaggctccagaaccacctgaagagccactcctaggagagctgacggtgaccggcagcagcccagattctctcagtctgtcatggacaatcccccagggacacttcgattcattcactgtccagtataaagacagggacggacgcccccaggttatgcgagtcaggggcgaggaaagtgaggtgaccgtgggcggccttgagccagggaggaaatacaaaatgcatctgtacggactgcatgagggccgtagggtgggcccagtttcaacggttggagtgaccgaggatgaggctgaaacgactcaggcagtaccgacaaccacgcctgaaccgccaaacaagccgcggctgggagagctcacagtgaccgatgccacaccggatagcctgtctctcagctggatggtccctgaaggacagtttgatcacttcctggtccagtaccggaacggagatggacagcccaaagtggtgagagtgccagggcacgaagacggagtgactattagtgggttggaacccgatcacaagtataagatgaacttgtatgggtttcacggggggcagcgagtcggaccgatctccgttatcggggtgaccgccgcagaggaggaaacacccgcccccaccgagccatccaccgaggcccccgagccacctgaagagcctctcctgggagagctaactgtgacgggttcatctcctgactcactcagcctctcctggaccattccccagggccgcttcgattcatttaccgtgcagtacaaagatagagacgggcgccctcaggtggtgcgcgtaaggggagaggaatccgaggtaaccgtagggggattagaaccgggctgtaagtacaagatgcatctgtatggcttgcatgagggacagcgggtgggacccgtttccgccgtcggtgtgacagctcccaaagatgaagccgagactacacaagccgttcctactatgacccccgaacctcccatcaaacctagactaggggaactgacggtcactgatgcgacccctgactcactttccttaagctggatggtgcccgagggccagttcgatcatttcctggtccaataccgcaatggagacggccagccaaaagccgtgagggtgccaggacatgaggacggggtcacaatctcggggctcgaaccagaccataagtacaagatgaacctgtacgggttccacggcggacagagggtgggcccggtgtccgctattggcgtgaccgaggaagaaacaccctctcccacggaaccgtctacggaagcacccgaagctcctgaggaacccctcctgggagagctaacagtcactgggtccagccctgatagcctgtctctgagttggacaattccgcaggggcgcttcgatagtttcactgtccagtacaaagaccgagacggccagccacaggtcgtccgtgtaaggggagaggaaagcgaggtaacagtgggtggcctggaacccggcaggaaatacaagatgcatctctatggactacatgagggccagagagtgggacctgtgagcaccgttggcatcacggccccgttgcctactcctctgcccgtggaaccccggctcggggagcttgctgtggcagccgtaaccagcgatagtgtcggcctctcctggacagtagctcaagggccatttgattccttcctcgtgcagtatagggatgcccaagggcagccacaagccgttccagtttctggagacctaagagccgtggctgtaagtggcctggatccagctagaaagtacaagttcttactttttggtcttcagaacggcaagcgccacggacctgttcctgtcgaagccagaactgcaccggacaccaaacccagcccgcgccttggcgagcttaccgtcaccgacgcgaccccagactctgttgggctatcatggacagtgcccgagggtgaattcgactcattcgtggtgcaatataaagacaaggacggtcgtctgcaggtagttcccgtggccgctaaccagcgcgaggttactgtccagggtctggagccttcacggaaatatcgatttctcctctatggtctgagcggcaggaaaagactgggcccaatctccgctgattctaccacggccccacttgagaaggagctcccacctcatctcggcgaattaaccgtggccgaggagacttccagtagcctgaggctgtcctggacagttgcgcagggaccatttgacagctttgtggtgcagtatcgagatacagacggtcagccacgggccgtgcctgtggcagcggatcaacggacagttaccgtagaggaccttgaacctggcaagaaatacaagttcctgctttatggcctcctggggggcaaacgccttggacccgtttccgcactgggcatgactgcccctgaggaagacacacctgcgccggagttagctccagaggccccagagccccctgaggaacctcggcttggcgttcttacggtgacagatacaacgccagacagcatgagattgtcatggagtgtggcccaggggccctttgactcattcgttgtacaatacgaagacactaatggacagcctcaggctctgctcgtcgatggagaccaaagtaagattctgatatctggactggaacccagcacgccatacagatttctgttgtacgggttgcatgagggcaagcggctgggaccactgtcagccgagggcaccaccggactggcccctgcgggccaaacctctgaagagtcccgtccacgtctttcccaactctccgttactgacgtgaccacatcttcactacggctgaactgggaagcaccacctggcgcttttgactccttcctcctgcgttttggcgtcccatctccttccaccctggagcctcacccaagaccactgctgcaaagagagctcatggttcccggcacacgacactcggcagtcctgcgtgaccttcgcagcggtacgctatatagtctgactttgtacggtttgaggggaccacacaaagccgattctatacagggcactgcccgcacactctctcctgtcctagaatcccctagggacctccagttttccgagattagggaaacaagcgcaaaagtgaattggatgccccctccaagcagggccgattcattcaaagtgagctatcagctggcagacgggggagagccccagtcagtacaggtagatggccaagcccgaacgcagaagttacagggcctcatccccggagcaaggtacgaggtgaccgtggtgtccgtcagaggattcgaagagagtgagcctctgacaggcttcctgactaccgtgcccgacgggcccacccagctgcgcgccttaaacctcaccgagggattcgccgttctgcattggaagcccccgcagaatcctgtggatacctacgacatccaagttacagctcctggagcgcctccactccaggccgagacccctgggagcgctgtggattaccctttacacgacctcgtccttcataccaattatacggccacggtcagaggtctgcgcgggcccaacctgaccagccccgcgtctattacattcaccacagggcttgaagccccgcgcgacctggaagcaaaagaggtcacacccagaaccgcattgctgacctggacagaaccaccagtcagacccgccggctacctgctgtcattccataccccaggcgggcagactcaagagatcttgctgcctgggggcattacgtcacaccagcttcttggcttatttccatctacctcatataacgccaggctgcaggccacttgggggcagtctcttcttccaccagtgagtacttcctttaccaccggggggctcagaatccccttcccacgcgactgcggcgaggaaatgcagaacggggccggtgcctccaggacttccaccattttcctgaatggcaatcgagaaaggcctttaaacgtgttttgcgatatggaaacagatggggggggttggctcgtttttcagaggaggatggatggccagacagatttctggcgagactgggaggactatgctcatgggttcggcaatatctccggcgaattctggctcggcaatgaggctctgcatagtttgacccaggcaggcgattattccatgcgggtcgatctgcgggcgggcgacgaggccgtttttgcacagtatgattcttttcacgttgatagcgctgccgaatattacagactgcatctggagggctaccacggaacagccggagacagcatgtcctatcactcgggaagcgttttctccgcaagggacagagacccaaatagtctccttatctcctgcgctgtaagttatcgcggagcttggtggtacaggaactgccattatgccaatctgaacggcttatatggtagcacggtagaccaccagggagtcagctggtatcactggaaagggttcgagttttcagtaccttttacagagatgaagttgcggccgaggaacttcagatctcctgcgggaggcggatag

SEQ ID NO: 201497 - DNA, 654 bp, Artificial Sequence
  derived and/or modified sequence
gccccaggaaaggatgaggagatggctcccgcctcaaccgagccccccacaccagaacctccaattaaaccgcgcctggaggaactcacagttactgacgccacgccggattctctctcgctgagctggacagtgcccgagggtcagttcgaccactttctggtgcagtataaaaatggagacggccagccgaaggctacacgggtccccggccacgaagatcgggtgacgatcagcgggctcgagcctgacaacaagtataagatgaacctctatggattccatggcggacagcgcgtgggaccagtcagtgctatcggcgttaccgccgccgaagaggaaaccccgagccccacagagcccagtatggaagctcctgagccacctgaagaacccctgttgggcgaactgactgtgactggtagtagtccagatagcctaagcctctcttggacggtgcctcaagggcggtttgattcttttacggttcagtacaaggacagggacggtcgcccccaggtggtacgcgtcggaggagaagagagcgaagtgaccgtcgggggactcgagccaggccgcaaatacaagatgcacctgtacggactgcacgaaggaaggagagtgggccccgttagcaccgtgggcgtcacctag

SEQ ID NO: 201498 - DNA, 942 bp, Artificial Sequence
  derived and/or modified sequence
actgagccaggtacagaggctcccggaccgccagaggagccgcttctgggcgagctaacagtcacaggatcttcccctgactcactgtcattaagctggacagtgccgcagggacgtttcgactcattcactgtgcagtacaaagatcgcgatggaagaccacaggccgttcgcgtgggtggtcaagaaagcaaggtgacagttcgggggctggagcccggcaggaagtacaagatgcacctgtatggcctgcatgagggccggcggctgggtccggtttcggcggtgggcgtgactgaagacgaagcagagactactcaagccgtgcctacaatgacacccgaaccaccaatcaaaccccggctaggggagctcaccatgacagacgcgaccccagacagcctttctctctcgtggacagtgcccgaaggacagtttgatcatttccttgtgcagtaccggaacggtgatggtcagcccaaagcagtcagggtgcctggtcatgaggacggcgttaccatctcaggcttggagcctgatcacaagtataaaatgaacctctacgggtttcacggcgggcagcgagttggtccgatatccgtgatcggagtcacagctgcggaggaggagacgcccagtcccaccgaattgtctactgaggctcctgagcctcccgaggaaccgctgcttggtgaattgaccgttaccggaagcagccccgacagcttatctttaagctggacgataccccagggacatttcgacagcttcacggtccaatataaggatcgagatggcaggccccaggtgatgcgagtgaggggcgaggaaagtgaggtgacggtgggggggctcgagcctggtagaaaatataaaatgcatttgtacggactgcacgaagggcggagggtgggccctgtgtctaccgtgggggtgacatag

SEQ ID NO: 201499 - DNA, 942 bp, Artificial Sequence
  derived and/or modified sequence
atgacacctgagcctccaattaagccccggctgggcgagttaaccatgacggacgccacccctgacagcctgtctttaagctggactgtgccagaaggccagttcgaccatttcctcgtgcagtaccgaaatggagacgggcagccaaaggcagtccgggtcccaggtcacgaggacggtgttacaatctcgggactcgagcctgatcacaaatacaagatgaacttgtatggctttcatggcggtcaacgcgtcggccctatttctgtaacgggcgtgaccgcagcagaggaggaaaccccctcccccactgaactgtcaaccgaagccccagagccccctgaagagcccctcctaggagagctgaccgttaccggatcttcccccgactctctctcactcagctggacaattcctcagggccacttcgatagcttcaccgtccagtataaagacagagacggtagaccgcaggtcatgcgggttagaggagaggagagcgaagtaaccgtgggcggcttggagccgggtagaaagtacaaaatgcatctttatggattacacgagggtagaagagtgggaccggttagcaccgtgggagtcactgcccccgaagacgaagaggaagagacccccgccccaaccgagcccagcacagaggccccggagccacccgaagaaccccttctgggcgagctgacagtgactgggtcgtcacctgacagcttgagtctgtcatggaccattccacagggtcggtttgactcttttactgtgcagtacaaggacagagatggccgaccccaagttgtacgcgtgcgaggggaagaatcagaggtaacagtgggcgggctcgagcctggttgcaaatacaagatgcacctgtatggcctgcatgagggacaacgggtgggacctgtgagtgccgtgggtgtcacatag

SEQ ID NO: 201500 - DNA, 1281 bp, Artificial Sequence
  derived and/or modified sequence
gctggcgaggattgtggagaagaggttcctacaattgaagggatgcgaatgcatctgttggaagagacaacagttcgaaccgagtggactccagcgccaggcccggtcgatgcctatgagattcaatttatccctacgactgagggcgcctccccccccttcactgcgcgggtgccgagtagtgcatctgcttacgaccagagaggattagccccaggtcaggaataccaggtcaccgtgcgcgcgctccgaggaactagttgggggctccccgctagtaagacaataactactatgatagatggaccacaggaccttcgagtggtggccgtgacgcctaccacactggaactcggttggctgcgtcctcaggctgaagtggacagatttgtggtaagttacgtgagcgctggcaatcaaagagttcgacttgaggtccctcccgaggcagacggaaccctcctcaccgacttgatgcctggcgtggagtacgtagtcacagtgactgctgagaggggacgggcagtcagttaccctgccagcgtgcgcgctaataccgggtcatcacctttgggtcttctgggtaccaccgacgagcctcctccgtcaggtcctagcactacccagggtgcacaggcaccactactccagcaacgcccacaagagcttggtgaactgcgcgttttgggcagagatgagacaggcaggctacgggttgtttggaccgcccagcccgacacttttgcatatttccaactccgaatgcgagtaccggaaggcccaggagcccatgaggaagtcttacctggggatgtgaggcaggccctggtgcccccacctccccctggcacaccctacgagctgtccctccatggcgtaccaccgggcggcaagccctccgacccaataatctaccagggaatcatggataaagatgaggagaaacctggcaaatccagcgggcccccacggcttggagagctgaccgttacagaccgaacctcggatagcctgctgttgcgatggactgttcctgaaggagagtttgattcatttgtaatacagtacaaggatcgtgacgggcaacctcaggtggtccctgtcgagggcccacagcgctccgccgttataacatccttagatccgggccgcaaatacaaatttgtgctgtatggtttcgttggcaaaaagagacatggcccactggtcgctgaagccaagattctacctcagagcgaccccagcccaggcactccgcctcaccttggcaatctgtggtag

SEQ ID NO: 201501 - DNA, 2598 bp, Artificial Sequence
  derived and/or modified sequence
ctgtatgggttgagaggtaggcagcgcgtcggcccagagagcgtggttgcaaagaccgccccacaggaggacgtggatgaaactccgtcacctacggagcttggtacagaggctccagaaagtcccgaggagcccctgttgggagaattaacggttacaggctccagcccagactcactcagcttgttctggacagttcctcagggctcgttcgacagttttacggtgcagtacaaagatagagacggcagacccagagccgtgcgggtcggcggaaaagagtccgaggttactgtcgggggactggagcctggccacaaatacaagatgcacttgtatggcctccacgagggccagcgtgtgggacccgttagcgctgtgggcgtgaccgctccacagcaggaggagactcctcccgcaacagagtctcccctcgagccgcgtctgggagaactcacagtcaccgacgtcacccccaattccgttgggctctcctggactgttcctgagggtcagtttgactcatttattgtgcaatacaaagataaggacggtcaacctcaggttgtgcctgtggcagccgaccagagggaggttaccgtgtacaacctcgaacccgaacggaaatataagatgaacatgtacggcctgcacgacgggcagaggatgggaccccttagcgtggttatagtgacagcacccttaccgcccgctcccgcaacggaggccagcaaacccccattggaacccagattaggtgagctgactgtgactgatataacacctgactctgttggactgtcatggaccgtgccggagggggaattcgacagctttgtggtacagtataaagaccgagatggccagcctcaagtggtgccagtagctgccgatcagagagaagtcactatcccagatctggaaccgtctcgaaaatataagtttctcctgtttgggattcaggatggcaagcggcggtctcccgtgtccgtggaagccaaaacagtggctagaggggacgcgtctccaggcgcccctccgaggctgggcgagctctgggtgaccgacccaactcccgactcgctcagactgtcttggaccgtgcctgagggccagttcgatagctttgtagtgcagttcaaggacaaggatggcccccaagtcgtgccggtggaaggacacgaaagatccgttaccgttacgccactggacgcagggcggaagtatcgctttttgctgtatggactcctgggaaaaaaacgacatggtcccctgaccgcggatgggaccaccgaggccagatccgctatggacgacaccggcacgaagcggcctcccaaaccaaggctgggtgaagaactgcaggtcaccacggttacgcaaaactctgtggggctgagttggacagtccctgagggccagttcgacagttttgtggttcagtacaaagatagggacggacagccacaggtggttccagtggagggatccttgcgtgaagtgtcggtacccggcctggatccagcccaccgttataagttacttctgtacggtctgcaccacggaaagagagttggacccatcagtgcagtcgctattaccgccggccgtgaggaaacagaaactgaaacaaccgcccctacaccccccgcccctgagcctcacttgggagagctgacagtggaagaagctaccagtcatacgctgcacctttcatggatggtcacagagggagaattcgattcttttgagatccagtacaccgaccgggacggccagctgcagatggtgcgcataggcggagatcggaacgatattacgcttagtggtttagaatctgaccacaggtacctggtgaccttgtacggctttagcgatggaaaacacgtaggtccagtacatgtagaggccctgactgtgcctgaggaagaaaagccatcggagccacccacggccactccagagccacctattaaaccacggctgggggaattgaccgtgaccgacgcaacacccgacagccttagcctgtcttggacggtgcctgaaggccagtttgatcacttcctggtgcagtaccggaatggagatggacagccgaaggctgtgagagtccccggacacgaagaaggggtgaccatatcaggtctcgaaccagaccacaaatacaagatgaacctttatggattccatggcgggcagcgcatggggcctgtctcagtggtgggcgtgacagcagcggaagaggagacgccatccccgaccgagcccagtatggaggctcctgaaccagctgaagagcctttgctcggcgagctcactgtgactggcagttctcctgattctctgtcattgagttggactgtgccacaaggaagattcgactccttcaccgtgcaatacaaggaccgtgacggacgcccgcaggtagtaagagttggcggagaagagagcgaagtcacagtggggggcctggagccaggtcgaaagtacaaaatgcatctctatggacttcacgagggcaggcgagtcggccctgtctctgcagttggcgttaccgcgccagaggaggagagtcccgatgcccccttggcatag

SEQ ID NO: 201502 - DNA, 12669 bp, Artificial Sequence
  derived and/or modified sequence
atgatgcctgcccagtatgccctgaccagcagcctggtgctgctggtgctgctgagcacagcccgggccggccccttcagcagccgcagcaatgtgaccctgcctgccccccggcccccaccccagcccggcggccacacagtgggcgctggggtgggcagccccagcagccagctgtatgagcacacagtggagggcggggagaagcaggtggtgttcacccaccgcatcaacctgccccccagcacaggctgcggctgccccccaggcacagagccccctgtgctggccagcgaggtgcaggccctgcgggtgcggctggagatcctggaggagctggtgaagggcctgaaggagcagtgcaccggcggctgctgcccagccagcgcccaggccggcaccggccagacagatgtgaggaccctgtgcagcctgcacggcgtgtttgacctgagccgctgcacctgcagctgtgagcccggctggggcggccccacctgcagcgaccccacagatgctgagatcccccccagcagcccccccagcgccagcggcagctgcccagatgactgcaatgaccagggccgctgtgtgcggggccgctgtgtgtgcttccctggctacacaggccccagctgtggctggcccagctgccctggggactgccagggccggggccgctgtgtgcagggcgtgtgtgtgtgcagagctggcttcagcggccctgactgcagccagaggagctgcccccggggctgcagccagaggggccgctgtgagggcggccgctgtgtgtgtgaccccggctacacaggagatgactgtggcatgaggagctgcccccggggctgcagccagaggggccgctgtgaaaatggccgctgtgtgtgcaaccctggctacgccggggaggactgtggggtgcgcagctgcccccggggctgcagccagaggggccgctgcaaggatggccgctgtgtgtgtgaccccggctacacaggagaggactgtggcaccaggagctgcccctgggactgtggggagggcggccgctgtgtggatggccgctgtgtgtgctggccaggctacaccggggaggactgcagcaccaggacctgcccccgggactgccggggccggggccgctgtgaagatggagagtgcatctgtgacaccggctacagcggagatgactgtggggtgcgcagctgccctggggactgcaaccagaggggccgctgtgaagatggccgctgtgtgtgctggccaggctacacaggaacagactgtggcagccgggcctgcccccgggactgccggggccggggccgctgtgaaaatggagtgtgtgtgtgcaatgccggctacagcggggaggactgtggggtgcgcagctgccctggggactgccggggccggggccgctgtgagagcggccgctgcatgtgctggccaggctacacaggccgggactgtggcacccgggcctgccctggggactgccggggccggggccgctgtgtggatggccgctgtgtgtgcaaccctggcttcaccggggaggactgtggcagccgccgctgccctggggactgccggggccacggcctgtgtgaagatggagtgtgtgtgtgtgatgctggctacagcggggaggactgcagcaccaggagctgccctgggggctgccggggccggggccagtgcctggatggccgctgtgtgtgtgaagatggctacagcggggaggactgtggggtgcggcagtgccccaatgactgcagccagcacggcgtgtgccaggatggagtgtgcatctgctgggagggctacgtgtctgaggactgcagcatccgcacctgccccagcaactgccacggccggggccgctgtgaggagggccgctgcctgtgtgaccccggctacacaggccccacctgtgccaccaggatgtgcccagctgactgccggggccggggccgctgtgtgcagggcgtgtgcctgtgccacgtgggctatggaggagaggactgtggccaggaggagcccccagccagcgcctgccctgggggctgcggcccccgggagctgtgccgggccggccagtgtgtgtgtgtggagggcttccggggccctgactgtgccatccagacctgccctggggactgccggggccgcggggagtgccatgatggcagctgtgtgtgcaaggatggctatgctggggaggactgtggggaggaggtgcccaccatcgagggcatgaggatgcacctgctggaggagaccaccgtgaggacagagtggaccccagcccctggccctgtggatgcctatgagatccagttcatccccaccacagaaggagccagcccccccttcaccgcccgggtgcccagcagcgccagcgcctatgaccagaggggcctggcccctggccaggagtaccaggtgacagtgcgggccctgcggggcacctcctggggcctgcctgccagcaagaccatcaccaccatgattgatggcccccaggacctgcgggtggtggccgtgacccccaccaccctggagctgggctggctgcggccccaggccgaggtggacagatttgtggtgtcctatgtgtctgctggcaaccagagggtgcggctggaggtgcccccagaggctgatggcaccctgctgacagacctgatgcctggggtggagtatgtggtgacagtgacagctgagcggggccgggctgtgtcctacccagcctctgtgcgggccaacacaggcagcagccccctgggcctgctgggcaccacagatgagcccccaccttctggccccagcaccacccagggcgcccaggcccccctgctgcagcagaggccccaggagctgggggagctgcgggtgctgggcagagatgagaccggccgcctgcgggtggtgtggacagcccagcctgacacctttgcctacttccagctgaggatgagggtgcctgagggccctggggcccacgaggaggtgctgcctggagatgtgcggcaggccctggtgcccccacctcctcctggcaccccctatgagctgagcctgcatggagtgcccccaggcggcaagcccagcgaccccatcatctaccagggcatcatggacaaggatgaggagaagccaggcaagagcagcggccccccccggctgggggagctgactgtgacagacaggaccagtgacagcctgctgctgcgctggacagtgcctgagggggagtttgacagctttgtgatccagtacaaggacagagatggccagccccaggtggtgcctgtggagggcccccagaggtctgctgtgatcaccagcctggaccccggcaggaagtacaagtttgtgctgtatggctttgtgggcaagaagagacatggccccctggtggccgaggccaagatcctgccccagagcgaccccagccctggcaccccaccccacctgggcaacctgtgggtgacagaccccaccccagacagcctgcacctgtcctggacagtgcctgagggccagtttgacaccttcatggtgcagtacagagacagagatggccggccccaggtggtgcctgtggagggccctgagaggagctttgtggtgagcagcctggaccctgaccacaagtaccgcttcaccctgtttggcatcgccaacaagaagagatatggccccctgacagcagatggcaccacagcccctgagaggaaggaggagccccccaggcctgagttcctggagcagcccctgctgggggagctgactgtgactggagtgaccccagacagcctgcggctgtcctggacagtggcccagggcccctttgacagcttcatggtgcagtacaaggatgcccagggccagccccaggccgtgcctgtggccggagatgaaaatgaggtgacagtgcccggcctggaccctgacaggaagtacaagatgaacctgtatggcctgcggggccggcagagggtgggccctgagagcgtggtggccaagacagccccccaggaggatgtggatgagacccccagccccacagagctgggcacagaggcccctgagagccctgaggagcccctgctgggggagctgactgtgacaggcagcagcccagacagcctgagcctcttctggacagtgccccagggcagctttgacagcttcaccgtgcagtacaaggacagagatggccggcccagggctgtgcgggtgggcggcaaggagagcgaggtgacagtgggcggcctggagcccggccacaagtacaagatgcacctgtatggcctgcacgagggccagagggtgggccctgtgtctgctgtgggcgtgacagccccccagcaggaggagaccccaccagccacagagagccccctggagccccggctgggggagctgactgtgacagatgtgacccccaacagcgtgggcctgtcctggacagtgcctgagggccagtttgacagcttcatcgtgcagtacaaggacaaggatggccagccccaggtggtgcctgtggccgctgaccagcgggaggtgacagtgtacaacctggagcctgagaggaagtacaagatgaacatgtatggcctgcatgatggccagaggatgggccccctgtctgtggtgattgtgacagcccccctgcccccagccccagccacagaggccagcaagccacccctggagccccggctgggggagctgactgtgacagacatcaccccagacagcgtgggcctgtcctggacagtgcctgagggggagtttgacagctttgtggtgcagtacaaggacagagatggccagccccaggtggtgcctgtggccgctgaccagcgggaggtgaccatcccagacctggagcccagcaggaagtacaagttcctgctgtttggcatccaggacggcaagagaagaagccctgtgtctgtggaggccaagacagtggcccggggagatgccagccctggggccccaccccggctgggggagctgtgggtgacagaccccaccccagacagcctgcggctgtcctggacagtgcctgagggccagtttgacagctttgtggtgcagttcaaggacaaggatggcccccaggtggtgcctgtggagggccacgagaggtctgtgacagtgacccccctggatgctggcaggaagtaccgcttcctgctgtatggcctgctgggcaagaagagacatggccccctgacagcagatggcaccacagaggcccggagcgccatggatgacaccggcaccaagaggcctcccaagccccggctgggggaggagctgcaggtgaccaccgtgacccagaacagcgtgggcctgtcctggacagtgcctgagggccagtttgacagctttgtggtgcagtacaaggacagagatggccagccccaggtggtgcctgtggagggcagcctgcgggaggtgtctgtgcccggcctggaccctgcccaccgctacaagctgctgctgtatggcctgcaccacggcaagagggtgggccccatctctgctgtggccatcacagctggccgggaggagacagaaacagagaccacagcccccaccccaccagcccctgagccccacctgggggagctgactgtggaggaggccaccagccacaccctgcacctgtcctggatggtgacagaaggagaatttgacagctttgagatccagtacacagacagagatggccagctgcagatggtgagaattggaggagacagaaatgacatcaccctgagcggcctggagagtgaccaccgctacctggtgaccctgtatggcttcagtgatggcaagcacgtgggccctgtgcacgtggaggccctgactgtgcctgaggaggagaagcccagcgagcccccaacagccaccccagagccccccatcaagccccggctgggggagctgactgtgacagatgccaccccagacagcctgagcctgtcctggacagtgcctgagggccagtttgaccacttcctggtgcagtacagaaatggagatggccagcccaaggctgtgcgggtgcccggccacgaggagggcgtgaccatcagcggcctggagccagaccacaagtacaagatgaacctgtatggcttccatggaggccagaggatgggccctgtgtctgtggtgggcgtgacagctgctgaggaggagacccccagccccacagagcccagcatggaggcccctgagcctgctgaggagcccctgctgggggagctgactgtgacaggcagcagcccagacagcctgagcctgtcctggacagtgccccagggccgctttgacagcttcaccgtgcagtacaaggacagagatggccggccccaggtggtgcgggtgggcggggaggagagcgaggtgacagtgggcggcctggagcccggcaggaagtacaagatgcacctgtatggcctgcacgagggccggcgggtgggccctgtgtctgctgtgggcgtgacagcccctgaggaggagagcccagatgcccccctggccaagctgcggctgggccagatgacagtgcgggacatcaccagtgacagcctgagcctgtcctggacagtgcctgagggccagtttgaccacttcctggtgcagttcaagaatggagatggccagcccaaggctgtgcgggtgcccggccatgaagatggagtgaccatcagcggcctggagccagaccacaagtacaagatgaacctgtatggcttccacggcggccagagggtgggccctgtgtctgctgtgggcctgacagcccctgggaaggatgaggagatggccccagccagcacagagccccccaccccagagccccccatcaagccccggctggaggagctgactgtgacagatgccaccccagacagcctgagcctgtcctggacagtgcctgagggccagtttgaccacttcctggtgcagtacaagaatggagatggccagcccaaggccaccagggtgcccggccatgaagatagagtgaccatcagcggcctggagccagacaacaagtacaagatgaacctgtatggcttccatggaggccagagggtgggccctgtgtctgccatcggcgtgacagctgctgaggaggagacccccagccccacagagcccagcatggaggcccctgagcccccagaggagcccctgctgggggagctgactgtgacaggcagcagcccagacagcctgagcctgtcctggacagtgccccagggccgctttgacagcttcaccgtgcagtacaaggacagagatggccggccccaggtggtgcgggtgggcggggaggagagcgaggtgacagtgggcggcctggagcccggcaggaagtacaagatgcacctgtatggcctgcacgagggccggcgggtgggccctgtgtccacagtgggcgtgacagccccccaggaggatgtggatgagacccccagccccacagagcccggcacagaggcccctgagcccccagaggagcccctgctgggggagctgactgtgacaggcagcagcccagacagcctgagcctgtcctggacagtgccccagggccgctttgacagcttcaccgtgcagtacaaggacagagatggccggccccaggccgtgcgggtgggcggccaggagagcaaggtgacagtgcggggcctggagcccggcaggaagtacaagatgcacctgtatggcctgcacgagggccgccgcctgggccctgtgtctgctgtgggcgtgacagaagatgaggccgagaccacccaggccgtgcccaccatgaccccagagccccccatcaagccccggctgggggagctgaccatgacagatgccaccccagacagcctgagcctgtcctggacagtgcctgagggccagtttgaccacttcctggtgcagtacagaaatggagatggccagcccaaggctgtgcgggtgcccggccatgaagatggagtgaccatcagcggcctggagccagaccacaagtacaagatgaacctgtatggcttccacggcggccagagggtgggccccatctctgtgattggagtgacagctgctgaggaggagacccccagccccacagagctgagcacagaggcccctgagcccccagaggagcccctgctgggggagctgactgtgacaggcagcagcccagacagcctgagcctgtcctggaccatcccccagggccactttgacagcttcaccgtgcagtacaaggacagagatggccggccccaggtgatgagggtgcggggggaggagagcgaggtgacagtgggcggcctggagcccggcaggaagtacaagatgcacctgtatggcctgcacgagggcagaagagtgggccctgtgtccacagtgggcgtgacagtgcccaccaccaccccagagccccccaacaagccccggctgggggagctgactgtgacagatgccaccccagacagcctgagcctgtcctggatggtgcctgagggccagtttgaccacttcctggtgcagtacagaaatggagatggccagcccaaggtggtgcgggtgcccggccatgaagatggagtgaccatcagcggcctggagccagaccacaagtacaagatgaacctgtatggcttccatggaggccagagggtgggccccatcagcgtcatcggcgtgacagctgctgaggaggagaccccagcccccacagagcccagcacagaggcccctgagcccccagaggagcccctgctgggggagctgactgtgacaggcagcagcccagacagcctgagcctgtcctggaccatcccccagggccgctttgacagcttcaccgtgcagtacaaggacagagatggccggccccaggtggtgcgggtgcggggggaggagagcgaggtgacagtgggcggcctggagcccggctgcaagtacaagatgcacctgtatggcctgcacgagggccagagggtgggccctgtgtctgctgtgggcgtgacagtgcccaccatgaccccagagccccccatcaagccccggctgggggagctgactgtgacagatgccaccccagacagcctgagcctgtcctggatggtgcctgagggccagtttgaccacttcctggtgcagtacagaaatggagatggccagcccaaggctgtgcgggtgcccggccatgaagatggagtgaccatcagcggcctggagccagaccacaagtacaagatgaacctgtatggcttccacggcggccagagggtgggccctgtgtctgccatcggcgtgacagaggaggagacccccagccccacagagcccagcacagaggcccctgaggcccctgaggagcccctgctgggggagctgactgtgacaggcagcagcccagacagcctgagcctgtcctggacagtgccccagggccgctttgacagcttcaccgtgcagtacaaggacagagatggccagccccaggtggtgcgggtgcggggggaggagagcgaggtgacagtgggcggcctggagcccggcaggaagtacaagatgcacctgtatggcctgcacgagggccagagggtgggccctgtgtccacagtgggcatcacagcccccctgcccacccccctgcctgtggagccccggctgggggagctggccgtggccgctgtgaccagtgacagcgtgggcctgtcctggacagtggcccagggcccctttgacagcttcctggtgcagtacagagatgcccagggccagccccaggccgtgcctgtgtctggggacctgcgggctgtggccgtgtctggcctggaccctgccaggaagtacaagttcctgctgtttggcctgcagaatggcaagagacatggccctgtgcctgtggaggccaggacagccccagacaccaagcccagcccccggctgggggagctgactgtgacagatgccaccccagacagcgtgggcctgtcctggacagtgcctgagggggagtttgacagctttgtggtgcagtacaaggacaaggatggccgcctgcaggtggtgcctgtggccgccaaccagcgggaggtgacagtgcagggcctggagcccagcaggaagtaccgcttcctgctgtatggcctgagcggcaggaagaggctgggccccatctctgctgacagcaccacagcccccctggagaaggagctgcccccccacctgggggagctgactgtggccgaggagaccagcagcagcctgcggctgtcctggacagtggcccagggcccctttgacagctttgtggtgcagtacagagacacagatggccagcccagggctgtgcctgtggccgctgaccagaggacagtgacagtggaggacctggagcccgggaagaagtacaagttcctgctgtatggcctgctgggcggcaagaggctgggccctgtgtctgccctgggcatgacagcccctgaggaggacaccccagcccctgagctggcccctgaggcccctgagcccccagaggagccccggctgggcgtgctgactgtgacagacaccaccccagacagcatgaggctgtcctggagcgtggcccagggcccctttgacagctttgtggtgcagtatgaggacaccaacggccagccccaggccctgctggtggatggagaccagagcaagatcctgatcagcggcctggagcccagcaccccctaccgcttcctgctgtatggcctgcacgagggcaagaggctgggccccctgtctgctgagggcaccaccggcctggccccagctggccagaccagcgaggagagccggccccggctgagccagctgtctgtgacagatgtgaccaccagcagcctgcggctgaactgggaggcccctcctggggcctttgacagcttcctgctgcgctttggagtgcccagccccagcaccctggagccccacccccggcccctgctgcagcgggagctgatggtgcccggcaccaggcacagcgctgtgctgcgggacctgcggagcggcaccctgtacagcctgaccctgtatggcctgcggggcccccacaaggctgacagcatccagggcacagcccggaccctgagccctgtgctggagagcccccgggacctgcagttcagcgagatccgggagaccagcgccaaggtgaactggatgcccccacccagcagagctgacagcttcaaggtgtcctaccagctggctgatggaggagagccccagagcgtgcaggtggatggccaggcccggacccagaagctgcagggcctcatccctggggcccgctatgaggtgacagtggtgtctgtgcggggctttgaggagagcgagcccctgaccggcttcctgaccaccgtgcctgatggccccacccagctgcgggccctgaacctgacagagggctttgctgtgctgcactggaagccaccccagaaccctgtggacacctatgatgtgcaggtgacagcccctggggccccacccctgcaggccgagaccccaggcagcgctgtggactaccccctgcatgacctggtgctgcacaccaactacacagccaccgtgcggggcctgcggggccccaacctgaccagccctgccagcatcaccttcaccaccggcctggaggccccccgggacctggaggccaaggaggtgacccccaggacagccctgctgacctggacagagccccctgtgcggcctgctggctacctgctgtccttccacacccctgggggccagaaccaggagatcctgctgcccggcggcatcaccagccaccagctgctgggcctcttccccagcaccagctacaatgcccggctgcaggccatgtggggccagagcctgctgccccctgtgtccaccagcttcaccactggaggcctgcgcatccccttcccccgggactgtggggaggagatgcagaatggagctggggccagcaggaccagcaccatcttcctgaatggaaaccgggagcggcccctgaatgtgttctgtgacatggagacagatggcggcggctggctggtgttccagaggaggatggatggccagacagacttctggagggactgggaggactatgcccacggctttggaaacatctctggagagttctggctgggcaatgaggccctgcacagcctgacccaggccggggactacagcatgagggtggacctgcgggctggagatgaggccgtgtttgcccagtatgacagcttccacgtggacagcgctgctgagtactaccgcctgcacctggagggctaccatggaacagctggggacagcatgagctaccacagcggcagcgtcttcagcgcccgggaccgggaccccaacagcctgctgatcagctgtgctgtgtcctacagaggagcctggtggtacagaaactgccactacgccaacctgaatggcctgtatggcagcacagtggaccaccagggcgtgtcctggtaccactggaagggctttgagttctctgtgcccttcacagagatgaagctgcggcccaggaacttccgcagccctgctgggggcggctag

SEQ ID NO: 201503 - DNA, 6450 bp, Artificial Sequence
  derived and/or modified sequence
tgagctgaggaggagacccccagccccacagagcccagcatggaggcccctgagcctgctgaggagcccctgctgggggagctgactgtgacaggcagcagcccagacagcctgagcctgtcctggacagtgccccagggccgctttgacagcttcaccgtgcagtacaaggacagagatggccggccccaggtggtgcgggtgggcggggaggagagcgaggtgacagtgggcggcctggagcccggcaggaagtacaagatgcacctgtatggcctgcacgagggcagaagagtgggccctgtgtctgctgtgggcgtgacagcccctgaggaggagagcccagatgcccccctggccaagctgcggctgggccagatgacagtgcgggacatcaccagtgacagcctgagcctgtcctggacagtgcctgagggccagtttgaccacttcctggtgcagttcaagaatggagatggccagcccaaggctgtgcgggtgcccggccatgaagatggagtgaccatcagcggcctggagccagaccacaagtacaagatgaacctgtatggcttccatggaggccagagggtgggccctgtgtctgctgtgggcctgacagcccctgggaaggatgaggagatggccccagccagcacagagccccccaccccagagccccccatcaagccccggctggaggagctgactgtgacagatgccaccccagacagcctgagcctgtcctggacagtgcctgagggccagtttgaccacttcctggtgcagtacaagaatggagatggccagcccaaggccaccagggtgcccggccacgaggacagagtgaccatcagcggcctggagccagacaacaagtacaagatgaacctgtatggcttccacggcggccagagggtgggccctgtgtctgccatcggcgtgacagctgctgaggaggagacccccagccccacagagcccagcatggaggcccctgagcccccagaggagcccctgctgggggagctgactgtgacaggcagcagcccagacagcctgagcctgtcctggacagtgccccagggccgctttgacagcttcaccgtgcagtacaaggacagagatggccggccccaggtggtgcgggtgggcggggaggagagcgaggtgacagtgggcggcctggagcccggcaggaagtacaagatgcacctgtatggcctgcacgagggcagaagagtgggccctgtgtccacagtgggcgtgacagccccccaggaggatgtggatgagacccccagccccacagagcctggaacagaggcccctgagcccccagaggagcccctgctgggggagctgactgtgacaggcagcagcccagacagcctgagcctgtcctggacagtgccccagggccgctttgacagcttcaccgtgcagtacaaggacagagatggccggccccaggccgtgcgggtgggcggccaggagagcaaggtgacagtgcggggcctggagcccggcaggaagtacaagatgcacctgtatggcctgcacgagggccggcggctgggccctgtgtctgctgtgggcgtgacagaagatgaagctgagaccacccaggccgtgcccaccatgaccccagagccccccatcaagccccggctgggggagctgaccatgacagatgccaccccagacagcctgagcctgtcctggacagtgcctgagggccagtttgaccacttcctggtgcagtacagaaatggagatggccagcccaaggctgtgcgggtgcccggccatgaagatggagtgaccatcagcggcctggagccagaccacaagtacaagatgaacctgtatggcttccatggaggccagagggtgggccccatctctgtgactggagtgacagctgctgaggaggagacccccagccccacagagctgagcacagaggcccctgagcccccagaggagcccctgctgggggagctgactgtgacaggcagcagcccagacagcctgagcctgtcctggaccatcccccagggccactttgacagcttcaccgtgcagtacaaggacagagatggccggccccaggtgatgagggtgcggggggaggagagcgaggtgacagtgggcggcctggagcccggcaggaagtacaagatgcacctgtatggcctgcacgagggccggcgggtgggccctgtgtccacagtgggcgtgacagtgcccaccaccaccccagagccccccaacaagccccggctgggggagctgactgtgacagatgccaccccagacagcctgagcctgtcctggatggtgcctgagggccagtttgaccacttcctggtgcagtacagaaatggagatggccagcccaaggtggtgcgggtgcccggccatgaagatggagtgaccatcagcggcctggagccagaccacaagtacaagatgaacctgtatggcttccacggcggccagagggtgggccccatctctgtgattggagtgacagctgctgaggaggagaccccagcccccacagagcccagcacagaggcccctgagcccccagaggagcccctgctgggggagctgactgtgacaggcagcagcccagacagcctgagcctgtcctggaccatcccccagggccgctttgacagcttcaccgtgcagtacaaggacagagatggccggccccaggtggtgcgggtgcggggggaggagagcgaggtgacagtgggcggcctggagcccggctgcaagtacaagatgcacctgtatggcctgcacgagggccagagggtgggccctgtgtctgctgtgggcgtgacagtgcccaccatgaccccagagccccccatcaagccccggctgggggagctgactgtgacagatgccaccccagacagcctgagcctgtcctggatggtgcctgagggccagtttgaccacttcctggtgcagtacagaaatggagatggccagcccaaggctgtgcgggtgcccggccatgaagatggagtgaccatcagcggcctggagccagaccacaagtacaagatgaacctgtatggcttccatggaggccagagggtgggccctgtgtctgccatcggcgtgacagaggaggagacccccagccccacagagcccagcacagaggcccctgaggcccctgaggagcccctgctgggggagctgactgtgacaggcagcagcccagacagcctgagcctgtcctggacagtgccccagggccgctttgacagcttcaccgtgcagtacaaggacagagatggccagccccaggtggtgcgggtgcggggggaggagagcgaggtgacagtgggcggcctggagcccggcaggaagtacaagatgcacctgtatggcctgcacgagggccagagggtgggccctgtgtccacagtgggcatcacagcccccctgcccacccccctgcctgtggagccccggctgggggagctggccgtggccgctgtgaccagtgacagcgtgggcctgtcctggacagtggcccagggcccctttgacagcttcctggtgcagtacagagatgcccagggccagccccaggccgtgcctgtgtctggggacctgcgggctgtggccgtgtctggcctggaccctgccaggaagtacaagttcctgctgtttggcctgcagaatggcaagagacatggccctgtgcctgtggaggccaggacagccccagacaccaagcccagcccccggctgggggagctgactgtgacagatgccaccccagattctgtgggcctgtcctggacagtgcctgagggggagtttgacagctttgtggtgcagtacaaggacaaggatggccgcctgcaggtggtgcctgtggccgccaaccagcgggaggtgacagtgcagggcctggagcccagcaggaagtaccgcttcctgctgtatggcctgagcggcaggaagaggctgggccccatctctgctgacagcaccacagcccccctggagaaggagctgcccccccacctgggggagctgactgtggccgaggagaccagcagcagcctgcggctgtcctggacagtggcccagggcccctttgacagctttgtggtgcagtacagagacacagatggccagcccagggctgtgcctgtggccgctgaccagaggacagtgacagtggaggacctggagcccgggaagaagtacaagttcctgctgtatggcctgctgggcggcaagaggctgggccctgtgtctgccctgggcatgacagcccctgaggaggacaccccagcccctgagctggcccctgaggcccctgagcccccagaggagccccggctgggcgtgctgactgtgacagacaccaccccagacagcatgaggctgtcctggagcgtggcccagggcccctttgacagctttgtggtgcagtatgaggacaccaacggccagccccaggccctgctggtggatggagaccagagcaagatcctgatcagcggcctggagcccagcaccccctaccgcttcctgctgtatggcctgcacgagggcaagaggctgggccccctgtctgctgagggcaccaccggcctggccccagctggccagaccagcgaggagagccggccccggctgagccagctgtctgtgacagatgtgaccaccagcagcctgcggctgaactgggaggcccctcctggggcctttgacagcttcctgctgcgcttcggcgtgcccagccccagcaccctggagccccacccccggcccctgctgcagcgggagctgatggtgcccggcaccaggcacagcgctgtgctgcgggacctgcggagcggcaccctgtacagcctgaccctgtatggcctgcggggcccccacaaggctgacagcatccagggcacagcccggaccctgagccctgtgctggagagcccccgggacctgcagttcagcgagatccgggagaccagcgccaaggtgaactggatgcccccacccagcagagctgacagcttcaaggtgtcctaccagctggctgatggaggagagccccagagcgtgcaggtggatggccaggcccggacccagaagctgcagggcctcatccctggggcccgctatgaggtgacagtggtgtctgtgcggggctttgaggagagcgagcccctgaccggcttcctgaccaccgtgcctgatggccccacccagctgcgggccctgaacctgacagagggctttgctgtgctgcactggaagccaccccagaaccctgtggacacctatgacatccaggtgacagcccctggggccccacccctgcaggccgagaccccaggcagcgctgtggactaccccctgcatgacctggtgctgcacaccaactacacagccaccgtgcggggcctgcggggccccaacctgaccagccctgccagcatcaccttcaccaccggcctggaggccccccgggacctggaggccaaggaggtgacccccaggacagccctgctgacctggacagagccccctgtgcggcctgctggctacctgctgtccttccacaccccaggcggccagacccaggagatcctgctgcccggcggcatcaccagccaccagctgctgggcctcttccccagcaccagctacaatgcccggctgcaggccatgtggggccagagcctgctgccccctgtgtccaccagcttcaccaccggcggcctgcgcatccccttcccccgggactgtggggaggagatgcagaatggagctggggccagcaggaccagcaccatcttcctgaatggaaaccgggagcggcccctcatcgtgttctgtgacatggagacagatggcggcggctggctggtgttccagaggaggatggatggccagacagacttctggagggactgggaggactatgcccacggcttcggcaacatcagcggggagttctggctgggcaatgaggccctgcacagcctgacccaggccggggactacagcatgagggtggacctgcgggctggagatgaagctgtgtttgcccagtatgacagcttccacgtggacagcgctgctgagtactaccgcctgcacctggagggctaccacggcacagctggggacagcatgagctaccacagcggctctgtgttcagcgcccgggaccgggaccccaacagcctgctgatcagctgtgctgtgtcctacagaggagcctggtggtacagaaactgccactacgccaacctgaatggcctgtatggcagcacagtggaccaccagggcgtgtcctggtaccactggaagggctttgagttctctgtgcccttcacagagatgaagctgcggcccaggaacttccgcagccctgctgggggcggctag

SEQ ID NO: 201504 - DNA, 9891 bp, Artificial Sequence
  derived and/or modified sequence
tgaagcagccccctgggcctgctgggcaccacagatgagcccccaccttctggccccagcaccacccagggcgcccaggcccccctgctgcagcagaggccccaggagctgggggagctgcgggtgctgggcagagatgagaccggccgcctgcgggtggtgtggacagcccagcctgacacctttgcctacttccagctgaggatgagggtgcctgagggccctggggcccacgaggaggtgctgcctggagatgtgcggcaggccctggtgcccccacctcctcctggcaccccctatgagctgagcctgcatggagtgcccccaggcggcaagcccagcgaccccatcatctaccagggcatcatggacaaggatgaggagaagccaggcaagagcagcggccccccccggctgggggagctgactgtgacagacaggaccagtgacagcctgctgctgcgctggacagtgcctgagggggagtttgacagctttgtgatccagtacaaggacagagatggccagccccaggtggtgcctgtggagggcccccagaggtctgctgtgatcaccagcctggaccccggcaggaagtacaagtttgtgctgtatggctttgtgggcaagaagagacatggccccctggtggccgaggccaagatcctgccccagagcgaccccagccctggcaccccaccccacctgggcaacctgtgggtgacagaccccaccccagacagcctgcacctgtcctggacagtgcctgagggccagtttgacaccttcatggtgcagtacagagacagagatggccggccccaggtggtgcctgtggagggccctgagaggagctttgtggtgagcagcctggaccctgaccacaagtaccgcttcaccctgtttggcatcgccaacaagaagagatatggccccctgacagcagatggcaccacagcccctgagaggaaggaggagccccccaggcctgagttcctggagcagcccctgctgggggagctgactgtgactggagtgaccccagacagcctgcggctgtcctggacagtggcccagggcccctttgacagcttcatggtgcagtacaaggatgcccagggccagccccaggccgtgcctgtggccggagatgaaaatgaggtgacagtgcccggcctggaccctgacaggaagtacaagatgaacctgtatggcctgcggggccggcagagggtgggccctgagagcgtggtggccaagacagccccccaggaggatgtggatgagacccccagccccacagagctgggcacagaggcccctgagagccctgaggagcccctgctgggggagctgactgtgacaggcagcagcccagacagcctgagcctcttctggacagtgccccagggcagctttgacagcttcaccgtgcagtacaaggacagagatggccggccccaggccgtgcgggtgggcggcaaggagagcgaggtgacagtgggcggcctggagcccggccacaagtacaagatgcacctgtatggcctgcacgagggccagagggtgggccctgtgtctgctgtgggcgtgacagccccccagcaggaggagaccccaccagccacagagagccccctggagccccggctgggggagctgactgtgacagatgtgacccccaacagcgtgggcctgtcctggacagtgcctgagggccagtttgacagcttcatcgtgcagtacaaggacaaggatggccagccccaggtggtgcctgtggccgctgaccagcgggaggtgacagtgtacaacctggagcctgagaggaagtacaagatgaacatgtatggcctgcatgatggccagaggatgggccccctgtctgtggtgattgtgacagcccccctgcccccagccccagccacagaggccagcaagccacccctggagccccggctgggggagctgactgtgacagacatcaccccagacagcgtgggcctgtcctggacagtgcctgagggggagtttgacagctttgtggtgcagtacaaggacagagatggccagccccaggtggtgcctgtggccgctgaccagcgggaggtgaccatcccagacctggagcccagcaggaagtacaagttcctgctgtttggcatccaggacggcaagagaagaagccctgtgtctgtggaggccaagacagtggcccggggagatgccagccctggggccccaccccggctgggggagctgtgggtgacagaccccaccccagacagcctgcggctgtcctggacagtgcctgagggccagtttgacagctttgtggtgcagttcaaggacaaggatggcccccaggtggtgcctgtggagggccacgagaggtctgtgacagtgacccccctggatgctggcaggaagtaccgcttcctgctgtatggcctgctgggcaagaagagacatggccccctgacagcagatggcaccacagaggcccggagcgccatggatgacaccggcaccaagaggcctcccaagccccggctgggggaggagctgcaggtgaccaccgtgacccagaacagcgtgggcctgtcctggacagtgcctgagggccagtttgacagctttgtggtgcagtacaaggacagagatggccagccccaggtggtgcctgtggagggcagcctgcgggaggtgtctgtgcccggcctggaccctgcccaccgctacaagctgctgctgtatggcctgcaccacggcaagagggtgggccccatctctgctgtggccatcacagctggccgggaggagacagaaacagagaccacagcccccaccccaccagcccctgagccccacctgggggagctgactgtggaggaggccaccagccacaccctgcacctgtcctggatggtgacagaaggagaatttgacagctttgagatccagtacacagacagagatggccagctgcagatggtgagaattggaggagacagaaatgacatcaccctgagcggcctggagagtgaccaccgctacctggtgaccctgtatggcttcagtgatggcaagcacgtgggccctgtgcacgtggaggccctgactgtgcctgaggaggagaagcccagcgagcccccaacagccaccccagagccccccatcaagccccggctgggggagctgactgtgacagatgccaccccagacagcctgagcctgtcctggacagtgcctgagggccagtttgaccacttcctggtgcagtacagaaatggagatggccagcccaaggctgtgcgggtgcccggccacgaggagggcgtgaccatcagcggcctggagccagaccacaagtacaagatgaacctgtatggcttccatggaggccagaggatgggccctgtgtctgtggtgggcgtgacagctgctgaggaggagacccccagccccacagagcccagcatggaggcccctgagcctgctgaggagcccctgctgggggagctgactgtgacaggcagcagcccagacagcctgagcctgtcctggacagtgccccagggccgctttgacagcttcaccgtgcagtacaaggacagagatggccggccccaggtggtgcgggtgggcggggaggagagcgaggtgacagtgggcggcctggagcccggcaggaagtacaagatgcacctgtatggcctgcacgagggccggcgggtgggccctgtgtctgctgtgggcgtgacagcccctgaggaggagagcccagatgcccccctggccaagctgcggctgggccagatgacagtgcgggacatcaccagtgacagcctgagcctgtcctggacagtgcctgagggccagtttgaccacttcctggtgcagttcaagaatggagatggccagcccaaggctgtgcgggtgcccggccatgaagatggagtgaccatcagcggcctggagccagaccacaagtacaagatgaacctgtatggcttccacggcggccagagggtgggccctgtgtctgctgtgggcctgacagcccctgggaaggatgaggagatggccccagccagcacagagccccccaccccagagccccccatcaagccccggctggaggagctgactgtgacagatgccaccccagacagcctgagcctgtcctggacagtgcctgagggccagtttgaccacttcctggtgcagtacaagaatggagatggccagcccaaggccaccagggtgcccggccatgaagatagagtgaccatcagcggcctggagccagacaacaagtacaagatgaacctgtatggcttccatggaggccagagggtgggccctgtgtctgccatcggcgtgacagctgctgaggaggagacccccagccccacagagcccagcatggaggcccctgagcccccagaggagcccctgctgggggagctgactgtgacaggcagcagcccagacagcctgagcctgtcctggacagtgccccagggccgctttgacagcttcaccgtgcagtacaaggacagagatggccggccccaggtggtgcgggtgggcggggaggagagcgaggtgacagtgggcggcctggagcccggcaggaagtacaagatgcacctgtatggcctgcacgagggccggcgggtgggccctgtgtccacagtgggcgtgacagccccccaggaggatgtggatgagacccccagccccacagagcccggcacagaggcccctggccccccagaggagcccctgctgggggagctgactgtgacaggcagcagcccagacagcctgagcctgtcctggacagtgccccagggccgctttgacagcttcaccgtgcagtacaaggacagagatggccggccccaggccgtgcgggtgggcggccaggagagcaaggtgacagtgcggggcctggagcccggcaggaagtacaagatgcacctgtatggcctgcacgagggccgccgcctgggccctgtgtctgctgtgggcgtgacagaagatgaggccgagaccacccaggccgtgcccaccatgaccccagagccccccatcaagccccggctgggggagctgaccatgacagatgccaccccagacagcctgagcctgtcctggacagtgcctgagggccagtttgaccacttcctggtgcagtacagaaatggagatggccagcccaaggctgtgcgggtgcccggccatgaagatggagtgaccatcagcggcctggagccagaccacaagtacaagatgaacctgtatggcttccacggcggccagagggtgggccccatctctgtgattggagtgacagctgctgaggaggagacccccagccccacagagctgagcacagaggcccctgagcccccagaggagcccctgctgggggagctgactgtgacaggcagcagcccagacagcctgagcctgtcctggaccatcccccagggccactttgacagcttcaccgtgcagtacaaggacagagatggccggccccaggtgatgagggtgcggggggaggagagcgaggtgacagtgggcggcctggagcccggcaggaagtacaagatgcacctgtatggcctgcacgagggcagaagagtgggccctgtgtccacagtgggcgtgacagtgcccaccaccaccccagagccccccaacaagccccggctgggggagctgactgtgacagatgccaccccagacagcctgagcctgtcctggatggtgcctgagggccagtttgaccacttcctggtgcagtacagaaatggagatggccagcccaaggtggtgcgggtgcccggccatgaagatggagtgaccatcagcggcctggagccagaccacaagtacaagatgaacctgtatggcttccatggaggccagagggtgggccccatcagcgtcatcggcgtgacagctgctgaggaggagaccccagcccccacagagcccagcacagaggcccctgagcccccagaggagcccctgctgggggagctgactgtgacaggcagcagcccagacagcctgagcctgtcctggaccatcccccagggccgctttgacagcttcaccgtgcagtacaaggacagagatggccggccccaggtggtgcgggtgcggggggaggagagcgaggtgacagtgggcggcctggagcccggctgcaagtacaagatgcacctgtatggcctgcacgagggccagagggtgggccctgtgtctgctgtgggcgtgacagtgcccaccatgaccccagagccccccatcaagccccggctgggggagctgactgtgacagatgccaccccagacagcctgagcctgtcctggatggtgcctgagggccagtttgaccacttcctggtgcagtacagaaatggagatggccagcccaaggctgtgcgggtgcccggccatgaagatggagtgaccatcagcggcctggagccagaccacaagtacaagatgaacctgtatggcttccacggcggccagagggtgggccctgtgtctgccatcggcgtgacagaggaggagacccccagccccacagagcccagcacagaggcccctgaggcccctgaggagcccctgctgggggagctgactgtgacaggcagcagcccagacagcctgagcctgtcctggacagtgccccagggccgctttgacagcttcaccgtgcagtacaaggacagagatggccagccccaggtggtgcgggtgcgggtggaggagagcgaggtgacagtgggcggcctggagcccggcaggaagtacaagatgcacctgtatggcctgcacgagggccagagggtgggccctgtgtccacagtgggcatcacagcccccctgcccacccccctgcctgtggagccccggctgggggagctggccgtggccgctgtgaccagtgacagcgtgggcctgtcctggacagtggcccagggcccctttgacagcttcctggtgcagtacagagatgcccagggccagccccaggccgtgcctgtgtctggggacctgcgggctgtggccgtgtctggcctggaccctgccaggaagtacaagttcctgctgtttggcctgcagaatggcaagagacatggccctgtgcctgtggaggccaggacagccccagacaccaagcccagcccccggctgggggagctgactgtgacagatgccaccccagacagcgtgggcctgtcctggacagtgcctgagggggagtttgacagctttgtggtgcagtacaaggacaaggatggccgcctgcaggtggtgcctgtggccgccaaccagcgggaggtgacagtgcagggcctggagcccagcaggaagtaccgcttcctgctgtatggcctgagcggcaggaagaggctgggccccatctctgctgacagcaccacagcccccctggagaaggagctgcccccccacctgggggagctgactgtggccgaggagaccagcagcagcctgcggctgtcctggacagtggcccagggcccctttgacagctttgtggtgcagtacagagacacagatggccagcccagggctgtgcctgtggccgctgaccagaggacagtgacagtggaggacctggagcccgggaagaagtacaagttcctgctgtatggcctgctgggcggcaagaggctgggccctgtgtctgccctgggcatgacagcccctgaggaggacaccccagcccctgagctggcccctgaggcccctgagcccccagaggagccccggctgggcgtgctgactgtgacagacaccaccccagacagcatgaggctgtcctggagcgtggcccagggcccctttgacagctttgtggtgcagtatgaggacaccaacggccagccccaggccctgctggtggatggagaccagagcaagatcctgatcagcggcctggagcccagcaccccctaccgcttcctgctgtatggcctgcacgagggcaagaggctgggccccctgtctgctgagggcaccaccggcctggccccagctggccagaccagcgaggagagccggccccggctgagccagctgtctgtgacagatgtgaccaccagcagcctgcggctgaactgggaggcccctcctggggcctttgacagcttcctgctgcgctttggagtgcccagccccagcaccctggagccccacccccggcccctgctgcagcgggagctgatggtgcccggcaccaggcacagcgctgtgctgcgggacctgcggagcggcaccctgtacagcctgaccctgtatggcctgcggggcccccacaaggctgacagcatccagggcacagcccggaccctgagccctgtgctggagagcccccgggacctgcagttcagcgagatccgggagaccagcgccaaggtgaactggatgcccccacccagcagagctgacagcttcaaggtgtcctaccagctggctgatggaggagagccccagagcgtgcaggtggatggccaggcccggacccagaagctgcagggcctcatccctggggcccgctatgaggtgacagtggtgtctgtgcggggctttgaggagagcgagcccctgaccggcttcctgaccaccgtgcctgatggccccacccagctgcgggccctgaacctgacagagggctttgctgtgctgcactggaagccaccccagaaccctgtggacacctatgatgtgcaggtgacagcccctggggccccacccctgcaggccgagaccccaggcagcgctgtggactaccccctgcatgacctggtgctgcacaccaactacacagccaccgtgcggggcctgcggggccccaacctgaccagccctgccagcatcaccttcaccaccggcctggaggccccccgggacctggaggccaaggaggtgacccccaggacagccctgctgacctggacagagccccctgtgcggcctgctggctacctgctgtccttccacacccctgggggccagaaccaggagatcctgctgcccggcggcatcaccagccaccagctgctgggcctcttccccagcaccagctacaatgcccggctgcaggccatgtggggccagagcctgctgccccctgtgtccaccagcttcaccactggaggcctgcgcatccccttcccccgggactgtggggaggagatgcagaatggagctggggccagcaggaccagcaccatcttcctgaatggaaaccgggagcggcccctgaatgtgttctgtgacatggagacagatggcggcggctggctggtgttccagaggaggatggatggccagacagacttctggagggactgggaggactatgcccacggctttggaaacatctctggagagttctggctgggcaatgaggccctgcacagcctgacccaggccggggactacagcatgagggtggacctgcgggctggagatgaggccgtgtttgcccagtatgacagcttccacgtggacagcgctgctgagtactaccgcctgcacctggagggctaccatggaacagctggggacagcatgagctaccacagcggcagcgtcttcagcgcccgggaccgggaccccaacagcctgctgatcagctgtgctgtgtcctacagaggagcctggtggtacagaaactgccactacgccaacctgaatggcctgtatggcagcacagtggaccaccagggcgtgtcctggtaccactggaagggctttgagttctctgtgcccttcacagagatgaagctgcggcccaggaacttccgcagccctgctgggggcggctag

SEQ ID NO: 201505 - DNA, 12669 bp, Artificial Sequence
  derived and/or modified sequence
atgatgcctgcccagtatgccctgaccagcagcctggtgctgctggtgctgctgagcacagcccgggccggccccttcagcagccgcagcaatgtgaccctgcctgccccccggcccccaccccagcccggcggccacacagtgggcgctggggtgggcagccccagcagccagctgtatgagcacacagtggagggcggggagaagcaggtggtgttcacccaccgcatcaacctgccccccagcacaggctgcggctgccccccaggcacagagccccctgtgctggccagcgaggtgcaggccctgcgggtgcggctggagatcctggaggagctggtgaagggcctgaaggagcagtgcaccggcggctgctgcccagccagcgcccaggccggcaccggccagacagatgtgaggaccctgtgcagcctgcacggcgtgtttgacctgagccgctgcacctgcagctgtgagcccggctggggcggccccacctgcagcgaccccacagatgctgagatcccccccagcagcccccccagcgccagcggcagctgcccagatgactgcaatgaccagggccgctgtgtgcggggccgctgtgtgtgcttccctggctacacaggccccagctgtggctggcccagctgccctggggactgccagggccggggccgctgtgtgcagggcgtgtgtgtgtgcagagctggcttcagcggccctgactgcagccagaggagctgcccccggggctgcagccagaggggccgctgtgagggcggccgctgtgtgtgtgaccccggctacacaggagatgactgtggcatgaggagctgcccccggggctgcagccagaggggccgctgtgaaaatggccgctgtgtgtgcaaccctggctacaccggggaggactgtggggtgcgcagctgcccccggggctgcagccagaggggccgctgcaaggatggccgctgtgtgtgtgaccccggctacacaggagaggactgtggcaccaggagctgcccctgggactgtggggagggcggccgctgtgtggatggccgctgtgtgtgctggccaggctacaccggggaggactgcagcaccaggacctgcccccgggactgccggggccggggccgctgtgaagatggagagtgcatctgtgacaccggctacagcggagatgactgtggggtgcgcagctgccctggggactgcaaccagaggggccgctgtgaagatggccgctgtgtgtgctggccaggctacacaggaacagactgtggcagccgggcctgcccccgggactgccggggccggggccgctgtgaaaatggagtgtgtgtgtgcaatgccggctacagcggggaggactgtggggtgcgcagctgccctggggactgccggggccggggccgctgtgagagcggccgctgcatgtgctggccaggctacacaggccgggactgtggcacccgggcctgccctggggactgccggggccggggccgctgtgtggatggccgctgtgtgtgcaaccctggcttcaccggggaggactgtggcagccgccgctgccctggggactgccggggccacggcctgtgtgaagatggagtgtgtgtgtgtgatgctggctacagcggggaggactgcagcaccaggagctgccctgggggctgccggggccggggccagtgcctggatggccgctgtgtgtgtgaagatggctacagcggggaggactgtggggtgcggcagtgccccaatgactgcagccagcacggcgtgtgccaggatggagtgtgcatctgctgggagggctacgtgtctgaggactgcagcatccgcacctgccccagcaactgccacggccggggccgctgtgaggagggccgctgcctgtgtgaccccggctacacaggccccacctgtgccaccaggatgtgcccagctgactgccggggccggggccgctgtgtgcagggcgtgtgcctgtgccacgtgggctatggaggagaggactgtggccaggaggagcccccagccagcgcctgccctgggggctgcggcccccgggagctgtgccgggccggccagtgtgtgtgtgtggagggcttccggggccctgactgtgccatccagacctgccctggggactgccggggccgcggggagtgccatgatggcagctgtgtgtgcaaggatggctatgctggggaggactgtggggaggaggtgcccaccatcgagggcatgaggatgcacctgctggaggagaccaccgtgaggacagagtggaccccagcccctggccctgtggatgcctatgagatccagttcatccccaccacagaaggagccagcccccccttcaccgcccgggtgcccagcagcgccagcgcctatgaccagaggggcctggcccctggccaggagtaccaggtgacagtgcgggccctgcggggcacctcctggggcctgcctgccagcaagaccatcaccaccatgattgatggcccccaggacctgcgggtggtggccgtgacccccaccaccctggagctgggctggctgcggccccaggccgaggtggacagatttgtggtgtcctatgtgtctgctggcaaccagagggtgcggctggaggtgcccccagaggctgatggcaccctgctgacagacctgatgcctggggtggagtatgtggtgacagtgacagctgagcggggccgggctgtgtcctacccagcctctgtgcgggccaacacaggcagcagccccctgggcctgctgggcaccacagatgagcccccaccttctggccccagcaccacccagggcgcccaggcccccctgctgcagcagaggccccaggagctgggggagctgcgggtgctgggcagagatgagaccggccgcctgcgggtggtgtggacagcccagcctgacacctttgcctacttccagctgaggatgagggtgcctgagggccctggggcccacgaggaggtgctgcctggagatgtgcggcaggccctggtgcccccacctcctcctggcaccccctatgagctgagcctgcatggagtgcccccaggcggcaagcccagcgaccccatcatctaccagggcatcatggacaaggatgaggagaagccaggcaagagcagcggccccccccggctgggggagctgactgtgacagacaggaccagtgacagcctgctgctgcgctggacagtgcctgagggggagtttgacagctttgtgatccagtacaaggacagagatggccagccccaggtggtgcctgtggagggcccccagaggtctgctgtgatcaccagcctggaccccggcaggaagtacaagtttgtgctgtatggctttgtgggcaagaagagacatggccccctggtggccgaggccaagatcctgccccagagcgaccccagccctggcaccccaccccggctgggcaacctgtgggtgacagaccccaccccagacagcctgcacctgtcctggacagtgcctgagggccagtttgacaccttcatggtgcagtacagagacagagatggccggccccaggtggtgcctgtggagggccctgagaggagctttgtggtgagcagcctggaccctgaccacaagtaccgcttcaccctgtttggcatcgccaacaagaagagatatggccccctgacagcagatggcaccacagcccctgagaggaaggaggagccccccaggcctgagttcctggagcagcccctgctgggggagctgactgtgactggagtgaccccagacagcctgcggctgtcctggacagtggcccagggcccctttgacagcttcatggtgcagtacaaggatgcccagggccagccccaggccgtgcctgtggccggagatgaaaatgaggtgacagtgcccggcctggaccctgacaggaagtacaagatgaacctgtatggcctgcggggccggcagagggtgggccctgagagcgtggtggccaagacagccccccaggaggatgtggatgagacccccagccccacagagctgggcacagaggcccctgagagccctgaggagcccctgctgggggagctgactgtgacaggcagcagcccagacagcctgagcctcttctggacagtgccccagggcagctttgacagcttcaccgtgcagtacaaggacagagatggccggcccagggctgtgcgggtgggcggcaaggagagcgaggtgacagtgggcggcctggagcccggccacaagtacaagatgcacctgtatggcctgcacgagggccagagggtgggccctgtgtctgctgtgggcgtgacagccccccagcaggaggagaccccaccagccacagagagccccctggagccccggctgggggagctgactgtgacagatgtgacccccaacagcgtgggcctgtcctggacagtgcctgagggccagtttgacagcttcatcgtgcagtacaaggacaaggatggccagccccaggtggtgcctgtggccgctgaccagcgggaggtgacagtgtacaacctggagcctgagaggaagtacaagatgaacatgtatggcctgcatgatggccagaggatgggccccctgtctgtggtgattgtgacagcccccctgcccccagccccagccacagaggccagcaagccacccctggagccccggctgggggagctgactgtgacagacatcaccccagacagcgtgggcctgtcctggacagtgcctgagggggagtttgacagctttgtggtgcagtacaaggacagagatggccagccccaggtggtgcctgtggccgctgaccagcgggaggtgaccatcccagacctggagcccagcaggaagtacaagttcctgctgtttggcatccaggacggcaagagaagaagccctgtgtctgtggaggccaagacagtggcccggggagatgccagccctggggccccaccccggctgggggagctgtgggtgacagaccccaccccagacagcctgcggctgtcctggacagtgcctgagggccagtttgacagctttgtggtgcagttcaaggacaaggatggcccccaggtggtgcctgtggagggccacgagaggtctgtgacagtgacccccctggatgctggcaggaagtaccgcttcctgctgtatggcctgctgggcaagaagagacatggccccctgacagcagatggcaccacagaggcccggagcgccatggatgacaccggcaccaagaggcctcccaagccccggctgggggaggagctgcaggtgaccaccgtgacccagaacagcgtgggcctgtcctggacagtgcctgagggccagtttgacagctttgtggtgcagtacaaggacagagatggccagccccaggtggtgcctgtggagggcagcctgcgggaggtgtctgtgcccggcctggaccctgcccaccgctacaagctgctgctgtatggcctgcaccacggcaagagggtgggccccatctctgctgtggccatcacagctggccgggaggagacagaaacagagaccacagcccccaccccaccagcccctgagccccacctgggggagctgactgtggaggaggccaccagccacaccctgcacctgtcctggatggtgacagaaggagaatttgacagctttgagatccagtacacagacagagatggccagctgcagatggtgagaattggaggagacagaaatgacatcaccctgagcggcctggagagtgaccaccgctacctggtgaccctgtatggcttcagtgatggcaagcacgtgggccctgtgcacgtggaggccctgactgtgcctgaggaggagaagcccagcgagcccccaacagccaccccagagccccccatcaagccccggctgggggagctgactgtgacagatgccaccccagacagcctgagcctgtcctggacagtgcctgagggccagtttgaccacttcctggtgcagtacagaaatggagatggccagcccaaggctgtgcgggtgcccggccacgaggagggcgtgaccatcagcggcctggagccagaccacaagtacaagatgaacctgtatggcttccatggaggccagaggatgggccctgtgtctgtggtgggcgtgacagctgctgaggaggagacccccagccccacagagcccagcatggaggcccctgagcctgctgaggagcccctgctgggggagctgactgtgacaggcagcagcccagacagcctgagcctgtcctggacagtgccccagggccgctttgacagcttcaccgtgcagtacaaggacagagatggccggccccaggtggtgcgggtgggcggggaggagagcgaggtgacagtgggcggcctggagcccggcaggaagtacaagatgcacctgtatggcctgcacgagggccggcgggtgggccctgtgtctgctgtgggcgtgacagcccctgaggaggagagcccagatgcccccctggccaagctgcggctgggccagatgacagtgcgggacatcaccagtgacagcctgagcctgtcctggacagtgcctgagggccagtttgaccacttcctggtgcagttcaagaatggagatggccagcccaaggctgtgcgggtgcccggccatgaagatggagtgaccatcagcggcctggagccagaccacaagtacaagatgaacctgtatggcttccacggcggccagagggtgggccctgtgtctgctgtgggcctgacagcccctgggaaggatgaggagatggccccagccagcacagagccccccaccccagagccccccatcaagccccggctggaggagctgactgtgacagatgccaccccagacagcctgagcctgtcctggacagtgcctgagggccagtttgaccacttcctggtgcagtacaagaatggagatggccagcccaaggccaccagggtgcccggccatgaagatagagtgaccatcagcggcctggagccagacaacaagtacaagatgaacctgtatggcttccatggaggccagagggtgggccctgtgtctgccatcggcgtgacagctgctgaggaggagacccccagccccacagagcccagcatggaggcccctgagcccccagaggagcccctgctgggggagctgactgtgacaggcagcagcccagacagcctgagcctgtcctggacagtgccccagggccgctttgacagcttcaccgtgcagtacaaggacagagatggccggccccaggtggtgcgggtgggcggggaggagagcgaggtgacagtgggcggcctggagcccggcaggaagtacaagatgcacctgtatggcctgcacgagggccggcgggtgggccctgtgtccacagtgggcgtgacagccccccaggaggatgtggatgagacccccagccccacagagcccggcacagaggcccctgagcccccagaggagcccctgctgggggagctgactgtgacaggcagcagcccagacagcctgagcctgtcctggacagtgccccagggccgctttgacagcttcaccgtgcagtacaaggacagagatggccggccccaggccgtgcgggtgggcggccaggagagcaaggtgacagtgcggggcctggagcccggcaggaagtacaagatgcacctgtatggcctgcacgagggccgccgcctgggccctgtgtctgctgtgggcgtgacagaagatgaggccgagaccacccaggccgtgcccaccatgaccccagagccccccatcaagccccggctgggggagctgaccatgacagatgccaccccagacagcctgagcctgtcctggacagtgcctgagggccagtttgaccacttcctggtgcagtacagaaatggagatggccagcccaaggctgtgcgggtgcccggccatgaagatggagtgaccatcagcggcctggagccagaccacaagtacaagatgaacctgtatggcttccacggcggccagagggtgggccccatctctgtgattggagtgacagctgctgaggaggagacccccagccccacagagctgagcacagaggcccctgagcccccagaggagcccctgctgggggagctgactgtgacaggcagcagcccagacagcctgagcctgtcctggaccatcccccagggccactttgacagcttcaccgtgcagtacaaggacagagatggccggccccaggtgatgagggtgcggggggaggagagcgaggtgacagtgggcggcctggagcccggcaggaagtacaagatgcacctgtatggcctgcacgagggcagaagagtgggccctgtgtccacagtgggcgtgacagtgcccaccaccaccccagagccccccaacaagccccggctgggggagctgactgtgacagatgccaccccagacagcctgagcctgtcctggatggtgcctgagggccagtttgaccacttcctggtgcagtacagaaatggagatggccagcccaaggtggtgcgggtgcccggccatgaagatggagtgaccatcagcggcctggagccagaccacaagtacaagatgaacctgtatggcttccatggaggccagagggtgggccccatcagcgtcatcggcgtgacagctgctgaggaggagaccccagcccccacagagcccagcacagaggcccctgagcccccagaggagcccctgctgggggagctgactgtgacaggcagcagcccagacagcctgagcctgtcctggaccatcccccagggccgctttgacagcttcaccgtgcagtacaaggacagagatggccggccccaggtggtgcgggtgcggggggaggagagcgaggtgacagtgggcggcctggagcccggctgcaagtacaagatgcacctgtatggcctgcacgagggccagagggtgggccctgtgtctgctgtgggcgtgacagtgcccaccatgaccccagagccccccatcaagccccggctgggggagctgactgtgacagatgccaccccagacagcctgagcctgtcctggatggtgcctgagggccagtttgaccacttcctggtgcagtacagaaatggagatggccagcccaaggctgtgcgggtgcccggccatgaagatggagtgaccatcagcggcctggagccagaccacaagtacaagatgaacctgtatggcttccacggcggccagagggtgggccctgtgtctgccatcggcgtgacagaggaggagacccccagccccacagagcccagcacagaggcccctgaggcccctgaggagcccctgctgggggagctgactgtgacaggcagcagcccagacagcctgagcctgtcctggacagtgccccagggccgctttgacagcttcaccgtgcagtacaaggacagagatggccagccccaggtggtgcgggtgcggggggaggagagcgaggtgacagtgggcggcctggagcccggcaggaagtacaagatgcacctgtatggcctgcacgagggccagagggtgggccctgtgtccacagtgggcatcacagcccccctgcccacccccctgcctgtggagccccggctgggggagctggccgtggccgctgtgaccagtgacagcgtgggcctgtcctggacagtggcccagggcccctttgacagcttcctggtgcagtacagagatgcccagggccagccccaggccgtgcctgtgtctggggacctgcgggctgtggccgtgtctggcctggaccctgccaggaagtacaagttcctgctgtttggcctgcagaatggcaagagacatggccctgtgcctgtggaggccaggacagccccagacaccaagcccagcccccggctgggggagctgactgtgacagatgccaccccagacagcgtgggcctgtcctggacagtgcctgagggggagtttgacagctttgtggtgcagtacaaggacaaggatggccgcctgcaggtggtgcctgtggccgccaaccagcgggaggtgacagtgcagggcctggagcccagcaggaagtaccgcttcctgctgtatggcctgagcggcaggaagaggctgggccccatctctgctgacagcaccacagcccccctggagaaggagctgcccccccacctgggggagctgactgtggccgaggagaccagcagcagcctgcggctgtcctggacagtggcccagggcccctttgacagctttgtggtgcagtacagagacacagatggccagcccagggctgtgcctgtggccgctgaccagaggacagtgacagtggaggacctggagcccgggaagaagtacaagttcctgctgtatggcctgctgggcggcaagaggctgggccctgtgtctgccctgggcatgacagcccctgaggaggacaccccagcccctgagctggcccctgaggcccctgagcccccagaggagccccggctgggcgtgctgactgtgacagacaccaccccagacagcatgaggctgtcctggagcgtggcccagggcccctttgacagctttgtggtgcagtatgaggacaccaacggccagccccaggccctgctggtggatggagaccagagcaagatcctgatcagcggcctggagcccagcaccccctaccgcttcctgctgtatggcctgcacgagggcaagaggctgggccccctgtctgctgagggcaccaccggcctggccccagctggccagaccagcgaggagagccggccccggctgagccagctgtctgtgacagatgtgaccaccagcagcctgcggctgaactgggaggcccctcctggggcctttgacagcttcctgctgcgctttggagtgcccagccccagcaccctggagccccacccccggcccctgctgcagcgggagctgatggtgcccggcaccaggcacagcgctgtgctgcgggacctgcggagcggcaccctgtacagcctgaccctgtatggcctgcggggcccccacaaggctgacagcatccagggcacagcccggaccctgagccctgtgctggagagcccccgggacctgcagttcagcgagatccgggagaccagcgccaaggtgaactggatgcccccacccagcagagctgacagcttcaaggtgtcctaccagctggctgatggaggagagccccagagcgtgcaggtggatggccaggcccggacccagaagctgcagggcctcatccctggggcccgctatgaggtgacagtggtgtctgtgcggggctttgaggagagcgagcccctgaccggcttcctgaccaccgtgcctgatggccccacccagctgcgggccctgaacctgacagagggctttgctgtgctgcactggaagccaccccagaaccctgtggacacctatgacatccaggtgacagcccctggggccccacccctgcaggccgagaccccaggcagcgctgtggactaccccctgcatgacctggtgctgcacaccaactacacagccaccgtgcggggcctgcggggccccaacctgaccagccctgccagcatcaccttcaccaccggcctggaggccccccgggacctggaggccaaggaggtgacccccaggacagccctgctgacctggacagagccccctgtgcggcctgctggctacctgctgtccttccacacccctgggggccagacccaggagatcctgctgcccggcggcatcaccagccaccagctgctgggcctcttccccagcaccagctacaatgcccggctgcaggccatgtggggccagagcctgctgccccctgtgtccaccagcttcaccactggaggcctgcgcatccccttcccccgggactgtggggaggagatgcagaatggagctggggccagcaggaccagcaccatcttcctgaatggaaaccgggagcggcccctgattgtgttctgtgacatggagacagatggcggcggctggctggtgttccagaggaggatggatggccagacagacttctggagggactgggaggactatgcccacggctttggaaacatctctggagagttctggctgggcaatgaggccctgcacagcctgacccaggccggggactacagcatgagggtggacctgcgggctggagatgaggccgtgtttgcccagtatgacagcttccacgtggacagcgctgctgagtactaccgcctgcacctggagggctaccatggaacagctggggacagcatgagctaccacagcggcagcgtcttcagcgcccgggaccgggaccccaacagcctgctgatcagctgtgctgtgtcctacagaggagcctggtggtacagaaactgccactacgccaacctgaatggcctgtatggcagcacagtggaccaccagggcgtgtcctggtaccactggaagggctttgagttctctgtgcccttcacagagatgaagctgcggcccaggaacttccgcagccctgctgggggcggctag

SEQ ID NO: 201506 - DNA, 1905 bp, Artificial Sequence
  derived and/or modified sequence
tgaagcagccccctgggcctgctgggcaccacagatgagcccccaccttctggccccagcaccacccagggcgcccaggcccccctgctgcagcagaggccccaggagctgggggagctgcgggtgctgggcagagatgagaccggccgcctgcgggtggtgtggacagcccagcctgacacctttgcctacttccagctgaggatgagggtgcctgagggccctggggcccacgaggaggtgctgcctggagatgtgcggcaggccctggtgcccccacctcctcctggcaccccctatgagctgagcctgcatggagtgcccccaggcggcaagcccagcgaccccatcatctaccagggcatcatggacaaggatgaggagaagccaggcaagagcagcggccccccccggctgggggagctgactgtgacagacaggaccagtgacagcctgctgctgcgctggacagtgcctgagggggagtttgacagctttgtgatccagtacaaggacagagatggccagccccaggtggtgcctgtggagggcccccagaggtctgctgtgatcaccagcctggaccccggcaggaagtacaagtttgtgctgtatggctttgtgggcaagaagagacatggccccctggtggccgaggccaagatcctgccccagagcgaccccagccctggcaccccaccccggctgggcaacctgtgggtgacagaccccaccccagacagcctgcacctgtcctggacagtgcctgagggccagtttgacaccttcatggtgcagtacagagacagagatggccggccccaggtggtgcctgtggagggccctgagaggagctttgtggtgagcagcctggaccctgaccacaagtaccgcttcaccctgtttggcatcgccaacaagaagagatatggccccctgacagcagatggcaccacagcccctgagaggaaggaggagccccccaggcctgagttcctggagcagcccctgctgggggagctgactgtgactggagtgaccccagacagcctgcggctgtcctggacagtggcccagggcccctttgacagcttcatggtgcagtacaaggatgcccagggccagccccaggccgtgcctgtggccggagatgaaaatgaggtgacagtgcccggcctggaccctgacaggaagtacaagatgaacctgtatggcctgcggggccggcagagggtgggccctgagagcgtggtggccaagacagccccccaggaggatgtggatgagacccccagccccacagagctgggcacagaggcccctgagagccctgaggagcccctgctgggggagctgactgtgacaggcagcagcccagacagcctgagcctcttctggacagtgccccagggcagctttgacagcttcaccgtgcagtacaaggacagagatggccggcccagggctgtgcgggtgggcggcaaggagagcgaggtgacagtgggcggcctggagcccggccacaagtacaagatgcacctgtatggcctgcacgagggccagagggtgggccctgtgtctgctgtgggcgtgacagccccccagcaggaggagaccccaccagccacagagagccccctggagccccggctgggggagctgactgtgacagatgtgacccccaacagcgtgggcctgtcctggacagtgcctgagggccagtttgacagcttcatcgtgcagtacaaggacaaggatggccagccccaggtggtgcctgtggccgctgaccagcgggaggtgacagtgtacaacctggagcctgagaggaagtacaagatgaacatgtatggcctgcatgatggccagaggatgggccccctgtctgtggtgattgtgacctag

SEQ ID NO: 201507 - DNA, 12669 bp, Artificial Sequence
  derived and/or modified sequence
atgatgcctgcccagtatgccctgaccagcagcctggtgctgctggtgctgctgagcacagcccgggccggccccttcagcagccgcagcaatgtgaccctgcctgccccccggcccccaccccagcccggcggccacacagtgggcgctggggtgggcagccccagcagccagctgtatgagcacacagtggagggcggggagaagcaggtggtgttcacccaccgcatcaacctgccccccagcacaggctgcggctgccccccaggcacagagccccctgtgctggccagcgaggtgcaggccctgcgggtgcggctggagatcctggaggagctggtgaagggcctgaaggagcagtgcaccggcggctgctgcccagccagcgcccaggccggcaccggccagacagatgtgaggaccctgtgcagcctgcacggcgtgtttgacctgagccgctgcacctgcagctgtgagcccggctggggcggccccacctgcagcgaccccacagatgctgagatcccccccagcagcccccccagcgccagcggcagctgcccagatgactgcaatgaccagggccgctgtgtgcggggccgctgtgtgtgcttccctggctacacaggccccagctgtggctggcccagctgccctggggactgccagggccggggccgctgtgtgcagggcgtgtgtgtgtgcagagctggcttcagcggccctgactgcagccagaggagctgcccccggggctgcagccagaggggccgctgtgagggcggccgctgtgtgtgtgaccccggctacacaggagatgactgtggcatgaggagctgcccccggggctgcagccagaggggccgctgtgaaaatggccgctgtgtgtgcaaccctggctacaccggggaggactgtggggtgcgcagctgcccccggggctgcagccagaggggccgctgcaaggatggccgctgtgtgtgtgaccccggctacacaggagaggactgtggcaccaggagctgcccctgggactgtggggagggcggccgctgtgtggatggccgctgtgtgtgctggccaggctacaccggggaggactgcagcaccaggacctgcccccgggactgccggggccggggccgctgtgaagatggagagtgcatctgtgacaccggctacagcggagatgactgtggggtgcgcagctgccctggggactgcaaccagaggggccgctgtgaagatggccgctgtgtgtgctggccaggctacacaggaacagactgtggcagccgggcctgcccccgggactgccggggccggggccgctgtgaaaatggagtgtgtgtgtgcaatgccggctacagcggggaggactgtggggtgcgcagctgccctggggactgccggggccggggccgctgtgagagcggccgctgcatgtgctggccaggctacacaggccgggactgtggcacccgggcctgccctggggactgccggggccggggccgctgtgtggatggccgctgtgtgtgcaaccctggcttcaccggggaggactgtggcagccgccgctgccctggggactgccggggccacggcctgtgtgaagatggagtgtgtgtgtgtgatgctggctacagcggggaggactgcagcaccaggagctgccctgggggctgccggggccggggccagtgcctggatggccgctgtgtgtgtgaagatggctacagcggggaggactgtggggtgcggcagtgccccaatgactgcagccagcacggcgtgtgccaggatggagtgtgcatctgctgggagggctacgtgtctgaggactgcagcatccgcacctgccccagcaactgccacggccggggccgctgtgaggagggccgctgcctgtgtgaccccggctacacaggccccacctgtgccaccaggatgtgcccagctgactgccggggccggggccgctgtgtgcagggcgtgtgcctgtgccacgtgggctatggaggagaggactgtggccaggaggagcccccagccagcgcctgccctgggggctgcggcccccgggagctgtgccgggccggccagtgtgtgtgtgtggagggcttccggggccctgactgtgccatccagacctgccctggggactgccggggccgcggggagtgccatgatggcagctgtgtgtgcaaggatggctatgctggggaggactgtggggaggaggtgcccaccatcgagggcatgaggatgcacctgctggaggagaccaccgtgaggacagagtggaccccagcccctggccctgtggatgcctatgagatccagttcatccccaccacagaaggagccagcccccccttcaccgcccgggtgcccagcagcgccagcgcctatgaccagaggggcctggcccctggccaggagtaccaggtgacagtgcgggccctgcggggcacctcctggggcctgcctgccagcaagaccatcaccaccatgattgatggcccccaggacctgcgggtggtggccgtgacccccaccaccctggagctgggctggctgcggccccaggccgaggtggacagatttgtggtgtcctatgtgtctgctggcaaccagagggtgcggctggaggtgcccccagaggctgatggcaccctgctgacagacctgatgcctggggtggagtatgtggtgacagtgacagctgagcggggccgggctgtgtcctacccagcctctgtgcgggccaacacaggcagcagccccctgggcctgctgggcaccacagatgagcccccaccttctggccccagcaccacccagggcgcccaggcccccctgctgcagcagaggccccaggagctgggggagctgcgggtgctgggcagagatgagaccggccgcctgcgggtggtgtggacagcccagcctgacacctttgcctacttccagctgaggatgagggtgcctgagggccctggggcccacgaggaggtgctgcctggagatgtgcggcaggccctggtgcccccacctcctcctggcaccccctatgagctgagcctgcatggagtgcccccaggcggcaagcccagcgaccccatcatctaccagggcatcatggacaaggatgaggagaagccaggcaagagcagcggccccccccggctgggggagctgactgtgacagacaggaccagtgacagcctgctgctgcgctggacagtgcctgagggggagtttgacagctttgtgatccagtacaaggacagagatggccagccccaggtggtgcctgtggagggcccccagaggtctgctgtgatcaccagcctggaccccggcaggaagtacaagtttgtgctgtatggctttgtgggcaagaagagacatggccccctggtggccgaggccaagatcctgccccagagcgaccccagccctggcaccccaccccggctgggcaacctgtgggtgacagaccccaccccagacagcctgcacctgtcctggacagtgcctgagggccagtttgacaccttcatggtgcagtacagagacagagatggccggccccaggtggtgcctgtggagggccctgagaggagctttgtggtgagcagcctggaccctgaccacaagtaccgcttcaccctgtttggcatcgccaacaagaagagatatggccccctgacagcagatggcaccacagcccctgagaggaaggaggagcccccccaccctgagttcctggagcagcccctgctgggggagctgactgtgactggagtgaccccagacagcctgcggctgtcctggacagtggcccagggcccctttgacagcttcatggtgcagtacaaggatgcccagggccagccccaggccgtgcctgtggccggagatgaaaatgaggtgacagtgcccggcctggaccctgacaggaagtacaagatgaacctgtatggcctgcggggccggcagagggtgggccctgagagcgtggtggccaagacagccccccaggaggatgtggatgagacccccagccccacagagctgggcacagaggcccctgagagccctgaggagcccctgctgggggagctgactgtgacaggcagcagcccagacagcctgagcctcttctggacagtgccccagggcagctttgacagcttcaccgtgcagtacaaggacagagatggccggcccagggctgtgcgggtgggcggcaaggagagcgaggtgacagtgggcggcctggagcccggccacaagtacaagatgcacctgtatggcctgcacgagggccagagggtgggccctgtgtctgctgtgggcgtgacagccccccagcaggaggagaccccaccagccacagagagccccctggagccccggctgggggagctgactgtgacagatgtgacccccaacagcgtgggcctgtcctggacagtgcctgagggccagtttgacagcttcatcgtgcagtacaaggacaaggatggccagccccaggtggtgcctgtggccgctgaccagcgggaggtgacagtgtacaacctggagcctgagaggaagtacaagatgaacatgtatggcctgcatgatggccagaggatgggccccctgtctgtggtgattgtgacagcccccctgcccccagccccagccacagaggccagcaagccacccctggagccccggctgggggagctgactgtgacagacatcaccccagacagcgtgggcctgtcctggacagtgcctgagggggagtttgacagctttgtggtgcagtacaaggacagagatggccagccccaggtggtgcctgtggccgctgaccagcgggaggtgaccatcccagacctggagcccagcaggaagtacaagttcctgctgtttggcatccaggacggcaagagaagaagccctgtgtctgtggaggccaagacagtggcccggggagatgccagccctggggccccaccccggctgggggagctgtgggtgacagaccccaccccagacagcctgcggctgtcctggacagtgcctgagggccagtttgacagctttgtggtgcagttcaaggacaaggatggcccccaggtggtgcctgtggagggccacgagaggtctgtgacagtgacccccctggatgctggcaggaagtaccgcttcctgctgtatggcctgctgggcaagaagagacatggccccctgacagcagatggcaccacagaggcccggagcgccatggatgacaccggcaccaagaggcctcccaagccccggctgggggaggagctgcaggtgaccaccgtgacccagaacagcgtgggcctgtcctggacagtgcctgagggccagtttgacagctttgtggtgcagtacaaggacagagatggccagccccaggtggtgcctgtggagggcagcctgcgggaggtgtctgtgcccggcctggaccctgcccaccgctacaagctgctgctgtatggcctgcaccacggcaagagggtgggccccatctctgctgtggccatcacagctggccgggaggagacagaaacagagaccacagcccccaccccaccagcccctgagccccacctgggggagctgactgtggaggaggccaccagccacaccctgcacctgtcctggatggtgacagaaggagaatttgacagctttgagatccagtacacagacagagatggccagctgcagatggtgagaattggaggagacagaaatgacatcaccctgagcggcctggagagtgaccaccgctacctggtgaccctgtatggcttcagtgatggcaagcacgtgggccctgtgcacgtggaggccctgactgtgcctgaggaggagaagcccagcgagcccccaacagccaccccagagccccccatcaagccccggctgggggagctgactgtgacagatgccaccccagacagcctgagcctgtcctggacagtgcctgagggccagtttgaccacttcctggtgcagtacagaaatggagatggccagcccaaggctgtgcgggtgcccggccacgaggagggcgtgaccatcagcggcctggagccagaccacaagtacaagatgaacctgtatggcttccatggaggccagaggatgggccctgtgtctgtggtgggcgtgacagctgctgaggaggagacccccagccccacagagcccagcatggaggcccctgagcctgctgaggagcccctgctgggggagctgactgtgacaggcagcagcccagacagcctgagcctgtcctggacagtgccccagggccgctttgacagcttcaccgtgcagtacaaggacagagatggccggccccaggtggtgcgggtgggcggggaggagagcgaggtgacagtgggcggcctggagcccggcaggaagtacaagatgcacctgtatggcctgcacgagggccggcgggtgggccctgtgtctgctgtgggcgtgacagcccctgaggaggagagcccagatgcccccctggccaagctgcggctgggccagatgacagtgcgggacatcaccagtgacagcctgagcctgtcctggacagtgcctgagggccagtttgaccacttcctggtgcagttcaagaatggagatggccagcccaaggctgtgcgggtgcccggccatgaagatggagtgaccatcagcggcctggagccagaccacaagtacaagatgaacctgtatggcttccacggcggccagagggtgggccctgtgtctgctgtgggcctgacagcccctgggaaggatgaggagatggccccagccagcacagagccccccaccccagagccccccatcaagccccggctggaggagctgactgtgacagatgccaccccagacagcctgagcctgtcctggacagtgcctgagggccagtttgaccacttcctggtgcagtacaagaatggagatggccagcccaaggccaccagggtgcccggccatgaagatagagtgaccatcagcggcctggagccagacaacaagtacaagatgaacctgtatggcttccatggaggccagagggtgggccctgtgtctgccatcggcgtgacagctgctgaggaggagacccccagccccacagagcccagcatggaggcccctgagcccccagaggagcccctgctgggggagctgactgtgacaggcagcagcccagacagcctgagcctgtcctggacagtgccccagggccgctttgacagcttcaccgtgcagtacaaggacagagatggccggccccaggtggtgcgggtgggcggggaggagagcgaggtgacagtgggcggcctggagcccggcaggaagtacaagatgcacctgtatggcctgcacgagggccggcgggtgggccctgtgtccacagtgggcgtgacagccccccaggaggatgtggatgagacccccagccccacagagcccggcacagaggcccctgagcccccagaggagcccctgctgggggagctgactgtgacaggcagcagcccagacagcctgagcctgtcctggacagtgccccagggccgctttgacagcttcaccgtgcagtacaaggacagagatggccggccccaggccgtgcgggtgggcggccaggagagcaaggtgacagtgcggggcctggagcccggcaggaagtacaagatgcacctgtatggcctgcacgagggccgccgcctgggccctgtgtctgctgtgggcgtgacagaagatgaggccgagaccacccaggccgtgcccaccatgaccccagagccccccatcaagccccggctgggggagctgaccatgacagatgccaccccagacagcctgagcctgtcctggacagtgcctgagggccagtttgaccacttcctggtgcagtacagaaatggagatggccagcccaaggctgtgcgggtgcccggccatgaagatggagtgaccatcagcggcctggagccagaccacaagtacaagatgaacctgtatggcttccacggcggccagagggtgggccccatctctgtgattggagtgacagctgctgaggaggagacccccagccccacagagctgagcacagaggcccctgagcccccagaggagcccctgctgggggagctgactgtgacaggcagcagcccagacagcctgagcctgtcctggaccatcccccagggccactttgacagcttcaccgtgcagtacaaggacagagatggccggccccaggtgatgagggtgcggggggaggagagcgaggtgacagtgggcggcctggagcccggcaggaagtacaagatgcacctgtatggcctgcacgagggcagaagagtgggccctgtgtccacagtgggcgtgacagtgcccaccaccaccccagagccccccaacaagccccggctgggggagctgactgtgacagatgccaccccagacagcctgagcctgtcctggatggtgcctgagggccagtttgaccacttcctggtgcagtacagaaatggagatggccagcccaaggtggtgcgggtgcccggccatgaagatggagtgaccatcagcggcctggagccagaccacaagtacaagatgaacctgtatggcttccatggaggccagagggtgggccccatcagcgtcatcggcgtgacagctgctgaggaggagaccccagcccccacagagcccagcacagaggcccctgagcccccagaggagcccctgctgggggagctgactgtgacaggcagcagcccagacagcctgagcctgtcctggaccatcccccagggccgctttgacagcttcaccgtgcagtacaaggacagagatggccggccccaggtggtgcgggtgcggggggaggagagcgaggtgacagtgggcggcctggagcccggctgcaagtacaagatgcacctgtatggcctgcacgagggccagagggtgggccctgtgtctgctgtgggcgtgacagtgcccaccatgaccccagagccccccatcaagccccggctgggggagctgactgtgacagatgccaccccagacagcctgagcctgtcctggatggtgcctgagggccagtttgaccacttcctggtgcagtacagaaatggagatggccagcccaaggctgtgcgggtgcccggccatgaagatggagtgaccatcagcggcctggagccagaccacaagtacaagatgaacctgtatggcttccacggcggccagagggtgggccctgtgtctgccatcggcgtgacagaggaggagacccccagccccacagagcccagcacagaggcccctgaggcccctgaggagcccctgctgggggagctgactgtgacaggcagcagcccagacagcctgagcctgtcctggaccatcccccagggccgctttgacagcttcaccgtgcagtacaaggacagagatggccagccccaggtggtgcgggtgcggggggaggagagcgaggtgacagtgggcggcctggagcccggcaggaagtacaagatgcacctgtatggcctgcacgagggccagagggtgggccctgtgtccacagtgggcatcacagcccccctgcccacccccctgcctgtggagccccggctgggggagctggccgtggccgctgtgaccagtgacagcgtgggcctgtcctggacagtggcccagggcccctttgacagcttcctggtgcagtacagagatgcccagggccagccccaggccgtgcctgtgtctggggacctgcgggctgtggccgtgtctggcctggaccctgccaggaagtacaagttcctgctgtttggcctgcagaatggcaagagacatggccctgtgcctgtggaggccaggacagccccagacaccaagcccagcccccggctgggggagctgactgtgacagatgccaccccagacagcgtgggcctgtcctggacagtgcctgagggggagtttgacagctttgtggtgcagtacaaggacaaggatggccgcctgcaggtggtgcctgtggccgccaaccagcgggaggtgacagtgcagggcctggagcccagcaggaagtaccgcttcctgctgtatggcctgagcggcaggaagaggctgggccccatctctgctgacagcaccacagcccccctggagaaggagctgcccccccacctgggggagctgactgtggccgaggagaccagcagcagcctgcggctgtcctggacagtggcccagggcccctttgacagctttgtggtgcagtacagagacacagatggccagcccagggctgtgcctgtggccgctgaccagaggacagtgacagtggaggacctggagcccgggaagaagtacaagttcctgctgtatggcctgctgggcggcaagaggctgggccctgtgtctgccctgggcatgacagcccctgaggaggacaccccagcccctgagctggcccctgaggcccctgagcccccagaggagccccggctgggcgtgctgactgtgacagacaccaccccagacagcatgaggctgtcctggagcgtggcccagggcccctttgacagctttgtggtgcagtatgaggacaccaacggccagccccaggccctgctggtggatggagaccagagcaagatcctgatcagcggcctggagcccagcaccccctaccgcttcctgctgtatggcctgcacgagggcaagaggctgggccccctgtctgctgagggcaccaccggcctggccccagctggccagaccagcgaggagagccggccccggctgagccagctgtctgtgacagatgtgaccaccagcagcctgcggctgaactgggaggcccctcctggggcctttgacagcttcctgctgcgctttggagtgcccagccccagcaccctggagccccacccccggcccctgctgcagcgggagctgatggtgcccggcaccaggcacagcgctgtgctgcgggacctgcggagcggcaccctgtacagcctgaccctgtatggcctgcggggcccccacaaggctgacagcatccagggcacagcccggaccctgagccctgtgctggagagcccccgggacctgcagttcagcgagatccgggagaccagcgccaaggtgaactggatgcccccacccagcagagctgacagcttcaaggtgtcctaccagctggctgatggaggagagccccagagcgtgcaggtggatggccaggcccggacccagaagctgcagggcctcatccctggggcccgctatgaggtgacagtggtgtctgtgcggggctttgaggagagcgagcccctgaccggcttcctgaccaccgtgcctgatggccccacccagctgcgggccctgaacctgacagagggctttgctgtgctgcactggaagccaccccagaaccctgtggacacctatgacatccaggtgacagcccctggggccccacccctgcaggccgagaccccaggcagcgctgtggactaccccctgcatgacctggtgctgcacaccaactacacagccaccgtgcggggcctgcggggccccaacctgaccagccctgccagcatcaccttcaccaccggcctggaggccccccgggacctggaggccaaggaggtgacccccaggacagccctgctgacctggacagagccccctgtgcggcctgctggctacctgctgtccttccacacccctgggggccagacccaggagatcctgctgcccggcggcatcaccagccaccagctgctgggcctcttccccagcaccagctacaatgcccggctgcaggccacctggggccagagcctgctgccccctgtgtccaccagcttcaccactggaggcctgcgcatccccttcccccgggactgtggggaggagatgcagaatggagctggggccagcaggaccagcaccatcttcctgaatggaaaccgggagcggcccctgaatgtgttctgtgacatggagacagatggcggcggctggctggtgttccagaggaggatggatggccagacagacttctggagggactgggaggactatgcccacggctttggaaacatctctggagagttctggctgggcaatgaggccctgcacagcctgacccaggccggggactacagcatgagggtggacctgcgggctggagatgaggccgtgtttgcccagtatgacagcttccacgtggacagcgctgctgagtactaccgcctgcacctggagggctaccatggaacagctggggacagcatgagctaccacagcggcagcgtcttcagcgcccgggaccgggaccccaacagcctgctgatcagctgtgctgtgtcctacagaggagcctggtggtacagaaactgccactacgccaacctgaatggcctgtatggcagcacagtggaccaccagggcgtgtcctggtaccactggaagggctttgagttctctgtgcccttcacagagatgaagctgcggcccaggaacttccgcagccctgctgggggcggctag

SEQ ID NO: 201508 - DNA, 6843 bp, Artificial Sequence
  derived and/or modified sequence
atgatgcctgcccagtatgccctgaccagcagcctggtgctgctggtgctgctgagcacagcccgggccggccccttcagcagccgcagcaatgtgaccctgcctgccccccggcccccaccccagcccggcggccacacagtgggcgctggggtgggcagccccagcagccagctgtatgagcacacagtggagggcggggagaagcaggtggtgttcacccaccgcatcaacctgccccccagcacaggctgcggctgccccccaggcacagagccccctgtgctggccagcgaggtgcaggccctgcgggtgcggctggagatcctggaggagctggtgaagggcctgaaggagcagtgcaccggcggctgctgcccagccagcgcccaggccggcaccggccagacagatgtgaggaccctgtgcagcctgcacggcgtgtttgacctgagccgctgcacctgcagctgtgagcccggctggggcggccccacctgcagcgaccccacagatgctgagatcccccccagcagcccccccagcgccagcggcagctgcccagatgactgcaatgaccagggccgctgtgtgcggggccgctgtgtgtgcttccctggctacacaggccccagctgtggctggcccagctgccctggggactgccagggccggggccgctgtgtgcagggcgtgtgtgtgtgcagagctggcttcagcggccctgactgcagccagaggagctgcccccggggctgcagccagaggggccgctgtgagggcggccgctgtgtgtgtgaccccggctacacaggagatgactgtggcatgaggagctgcccccggggctgcagccagaggggccgctgtgaaaatggccgctgtgtgtgcaaccctggctacaccggggaggactgtggggtgcgcagctgcccccggggctgcagccagaggggccgctgcaaggatggccgctgtgtgtgtgaccccggctacacaggagaggactgtggcaccaggagctgcccctgggactgtggggagggcggccgctgtgtggatggccgctgtgtgtgctggccaggctacaccggggaggactgcagcaccaggacctgcccccgggactgccggggccggggccgctgtgaagatggagagtgcatctgtgacaccggctacagcggagatgactgtggggtgcgcagctgccctggggactgcaaccagaggggccgctgtgaagatggccgctgtgtgtgctggccaggctacacaggaacagactgtggcagccgggcctgcccccgggactgccggggccggggccgctgtgaaaatggagtgtgtgtgtgcaatgccggctacagcggggaggactgtggggtgcgcagctgccctggggactgccggggccggggccgctgtgagagcggccgctgcatgtgctggccaggctacacaggccgggactgtggcacccgggcctgccctggggactgccggggccggggccgctgtgtggatggccgctgtgtgtgcaaccctggcttcaccggggaggactgtggcagccgccgctgccctggggactgccggggccacggcctgtgtgaagatggagtgtgtgtgtgtgatgctggctacagcggggaggactgcagcaccaggagctgccctgggggctgccggggccggggccagtgcctggatggccgctgtgtgtgtgaagatggctacagcggggaggactgtggggtgcggcagtgccccaatgactgcagccagcacggcgtgtgccaggatggagtgtgcatctgctgggagggctacgtgtctgaggactgcagcatccgcacctgccccagcaactgccacggccggggccgctgtgaggagggccgctgcctgtgtgaccccggctacacaggccccacctgtgccaccaggatgtgcccagctgactgccggggccggggccgctgtgtgcagggcgtgtgcctgtgccacgtgggctatggaggagaggactgtggccaggaggagcccccagccagcgcctgccctgggggctgcggcccccgggagctgtgccgggccggccagtgtgtgtgtgtggagggcttccggggccctgactgtgccatccagacctgccctggggactgccggggccgcggggagtgccatgatggcagctgtgtgtgcaaggatggctatgctggggaggactgtggggaggaggtgcccaccatcgagggcatgaggatgcacctgctggaggagaccaccgtgaggacagagtggaccccagcccctggccctgtggatgcctatgagatccagttcatccccaccacagaaggagccagcccccccttcaccgcccgggtgcccagcagcgccagcgcctatgaccagaggggcctggcccctggccaggagtaccaggtgacagtgcgggccctgcggggcacctcctggggcctgcctgccagcaagaccatcaccaccatgattgatggcccccaggacctgcgggtggtggccgtgacccccaccaccctggagctgggctggctgcggccccaggccgaggtggacagatttgtggtgtcctatgtgtctgctggcaaccagagggtgcggctggaggtgcccccagaggctgatggcaccctgctgacagacctgatgcctggggtggagtatgtggtgacagtgacagctgagcggggccgggctgtgtcctacccagcctctgtgcgggccaacacaggcagcagccccctgggcctgctgggcaccacagatgagcccccaccttctggccccagcaccacccagggcgcccaggcccccctgctgcagcagaggccccaggagctgggggagctgcgggtgctgggcagagatgagaccggccgcctgcgggtggtgtggacagcccagcctgacacctttgcctacttccagctgaggatgagggtgcctgagggccctggggcccacgaggaggtgctgcctggagatgtgcggcaggccctggtgcccccacctcctcctggcaccccctatgagctgagcctgcatggagtgcccccaggcggcaagcccagcgaccccatcatctaccagggcatcatggacaaggatgaggagaagccaggcaagagcagcggccccccccggctgggggagctgactgtgacagacaggaccagtgacagcctgctgctgcgctggacagtgcctgagggggagtttgacagctttgtgatccagtacaaggacagagatggccagccccaggtggtgcctgtggagggcccccagaggtctgctgtgatcaccagcctggaccccggcaggaagtacaagtttgtgctgtatggctttgtgggcaagaagagacatggccccctggtggccgaggccaagatcctgccccagagcgaccccagccctggcaccccaccccacctgggcaacctgtgggtgacagaccccaccccagacagcctgcacctgtcctggacagtgcctgagggccagtttgacaccttcatggtgcagtacagagacagagatggccggccccaggtggtgcctgtggagggccctgagaggagctttgtggtgagcagcctggaccctgaccacaagtaccgcttcaccctgtttggcatcgccaacaagaagagatatggccccctgacagcagatggcaccacagcccctgagaggaaggaggagccccccaggcctgagttcctggagcagcccctgctgggggagctgactgtgactggagtgaccccagacagcctgcggctgtcctggacagtggcccagggcccctttgacagcttcatggtgcagtacaaggatgcccagggccagccccaggccgtgcctgtggccggagatgaaaatgaggtgacagtgcccggcctggaccctgacaggaagtacaagatgaacctgtatggcctgcggggccggcagagggtgggccctgagagcgtggtggccaagacagccccccaggaggatgtggatgagacccccagccccacagagctgggcacagaggcccctgagagccctgaggagcccctgctgggggagctgactgtgacaggcagcagcccagacagcctgagcctcttctggacagtgccccagggcagctttgacagcttcaccgtgcagtacaaggacagagatggccggcccagggctgtgcgggtgggcggcaaggagagcgaggtgacagtgggcggcctggagcccggccacaagtacaagatgcacctgtatggcctgcacgagggccagagggtgggccctgtgtctgctgtgggcgtgacagccccccagcaggaggagaccccaccagccacagagagccccctggagccccggctgggggagctgactgtgacagatgtgacccccaacagcgtgggcctgtcctggacagtgcctgagggccagtttgacagcttcatcgtgcagtacaaggacaaggatggccagccccaggtggtgcctgtggccgctgaccagcgggaggtgacagtgtacaacctggagcctgagaggaagtacaagatgaacatgtatggcctgcatgatggccagaggatgggccccctgtctgtggtgattgtgacagcccccctgcccccagccccagccacagaggccagcaagccacccctggagccccggctgggggagctgactgtgacagacatcaccccagacagcgtgggcctgtcctggacagtgcctgagggggagtttgacagctttgtggtgcagtacaaggacagagatggccagccccaggtggtgcctgtggccgctgaccagcgggaggtgaccatcccagacctggagcccagcaggaagtacaagttcctgctgtttggcatccaggacggcaagagaagaagccctgtgtctgtggaggccaagacagtggcccggggagatgccagccctggggccccaccccggctgggggagctgtgggtgacagaccccaccccagacagcctgcggctgtcctggacagtgcctgagggccagtttgacagctttgtggtgcagttcaaggacaaggatggcccccaggtggtgcctgtggagggccacgagaggtctgtgacagtgacccccctggatgctggcaggaagtaccgcttcctgctgtatggcctgctgggcaagaagagacatggccccctgacagcagatggcaccacagaggcccggagcgccatggatgacaccggcaccaagaggcctcccaagccccggctgggggaggagctgcaggtgaccaccgtgacccagaacagcgtgggcctgtcctggacagtgcctgagggccagtttgacagctttgtggtgcagtacaaggacagagatggccagccccaggtggtgcctgtggagggcagcctgcgggaggtgtctgtgcccggcctggaccctgcccaccgctacaagctgctgctgtatggcctgcaccacggcaagagggtgggccccatctctgctgtggccatcacagctggccgggaggagacagaaacagagaccacagcccccaccccaccagcccctgagccccacctgggggagctgactgtggaggaggccaccagccacaccctgcacctgtcctggatggtgacagaaggagaatttgacagctttgagatccagtacacagacagagatggccagctgcagatggtgagaattggaggagacagaaatgacatcaccctgagcggcctggagagtgaccaccgctacctggtgaccctgtatggcttcagtgatggcaagcacgtgggccctgtgcacgtggaggccctgactgtgcctgaggaggagaagcccagcgagcccccaacagccaccccagagccccccatcaagccccggctgggggagctgactgtgacagatgccaccccagacagcctgagcctgtcctggacagtgcctgagggccagtttgaccacttcctggtgcagtacagaaatggagatggccagcccaaggctgtgcgggtgcccggccacgaggagggcgtgaccatcagcggcctggagccagaccacaagtacaagatgaacctgtatggcttccatggaggccagaggatgggccctgtgtctgtggtgggcgtgacagctgctgaggaggagacccccagccccacagagcccagcatggaggcccctgagcctgctgaggagcccctgctgggggagctgactgtgacaggcagcagcccagacagcctgagcctgtcctggacagtgccccagggccgctttgacagcttcaccgtgcagtacaaggacagagatggccggccccaggtggtgcgggtgggcggggaggagagcgaggtgacagtgggcggcctggagcccggcaggaagtacaagatgcacctgtatggcctgcacgagggccggcgggtgggccctgtgtctgctgtgggcgtgacagcccctgaggaggagagcccagatgcccccctggccaagctgcggctgggccagatgacagtgcgggacatcaccagtgacagcctgagcctgtcctggacagtgcctgagggccagtttgaccacttcctggtgcagttcaagaatggagatggccagcccaaggctgtgcgggtgcccggccatgaagatggagtgaccatcagcggcctggagccagaccacaagtacaagatgaacctgtatggcttccacggcggccagagggtgggccctgtgtctgctgtgggcctgacctag

SEQ ID NO: 201509 - DNA, 654 bp, Artificial Sequence
  derived and/or modified sequence
gcccctgggaaggatgaggagatggccccagccagcacagagccccccaccccagagccccccatcaagccccggctggaggagctgactgtgacagatgccaccccagacagcctgagcctgtcctggacagtgcctgagggccagtttgaccacttcctggtgcagtacaagaatggagatggccagcccaaggccaccagggtgcccggccatgaagatagagtgaccatcagcggcctggagccagacaacaagtacaagatgaacctgtatggcttccatggaggccagagggtgggccctgtgtctgccatcggcgtgacagctgctgaggaggagacccccagccccacagagcccagcatggaggcccctgagcccccagaggagcccctgctgggggagctgactgtgacaggcagcagcccagacagcctgagcctgtcctggacagtgccccagggccgctttgacagcttcaccgtgcagtacaaggacagagatggccggccccaggtggtgcgggtgggcggggaggagagcgaggtgacagtgggcggcctggagcccggcaggaagtacaagatgcacctgtatggcctgcacgagggccggcgggtgggccctgtgtccacagtgggcgtgacctag

SEQ ID NO: 201510 - DNA, 12729 bp, Artificial Sequence
  derived and/or modified sequence
atgatgcctgcccagtatgccctgaccagcagcctggtgctgctggtgctgctgagcacagcccgggccggccccttcagcagccgcagcaatgtgaccctgcctgccccccggcccccaccccagcccggcggccacacagtgggcgctggggtgggcagccccagcagccagctgtatgagcacacagtggagggcggggagaagcaggtggtgttcacccaccgcatcaacctgccccccagcacaggctgcggctgccccccaggcacagagccccctgtgctggccagcgaggtgcaggccctgcgggtgcggctggagatcctggaggagctggtgaagggcctgaaggagcagtgcaccggcggctgctgcccagccagcgcccaggccggcaccggccagacagatgtgaggaccctgtgcagcctgcacggcgtgtttgacctgagccgctgcacctgcagctgtgagcccggctggggcggccccacctgcagcgaccccacagatgctgagatcccccccagcagcccccccagcgccagcggcagctgcccagatgactgcaatgaccagggccgctgtgtgcggggccgctgtgtgtgcttccctggctacacaggccccagctgtggctggcccagctgccctggggactgccagggccggggccgctgtgtgcagggcgtgtgtgtgtgcagagctggcttcagcggccctgactgcagccagaggagctgcccccggggctgcagccagaggggccgctgtgagggcggccgctgtgtgtgtgaccccggctacacaggagatgactgtggcatgaggagctgcccccggggctgcagccagaggggccgctgtgaaaatggccgctgtgtgtgcaaccctggctacaccggggaggactgtggggtgcgcagctgcccccggggctgcagccagaggggccgctgcaaggatggccgctgtgtgtgtgaccccggctacacaggagaggactgtggcaccaggagctgcccctgggactgtggggagggcggccgctgtgtggatggccgctgtgtgtgctggccaggctacaccggggaggactgcagcaccaggacctgcccccgggactgccggggccggggccgctgtgaagatggagagtgcatctgtgacaccggctacagcggagatgactgtggggtgcgcagctgccctggggactgcaaccagaggggccgctgtgaagatggccgctgtgtgtgctggccaggctacacaggaacagactgtggcagccgggcctgcccccgggactgccggggccggggccgctgtgaaaatggagtgtgtgtgtgcaatgccggctacagcggggaggactgtggggtgcgcagctgccctggggactgccggggccggggccgctgtgagagcggccgctgcatgtgctggccaggctacacaggccgggactgtggcacccgggcctgccctggggactgccggggccggggccgctgtgtggatggccgctgtgtgtgcaaccctggcttcaccggggaggactgtggcagccgccgctgccctggggactgccggggccacggcctgtgtgaagatggagtgtgtgtgtgtgatgctggctacagcggggaggactgcagcaccaggagctgccctgggggctgccggggccggggccagtgcctggatggccgctgtgtgtgtgaagatggctacagcggggaggactgtggggtgcggcagtgccccaatgactgcagccagcacggcgtgtgccaggatggagtgtgcatctgctgggagggctacgtgtctgaggactgcagcatccgcacctgccccagcaactgccacggccggggccgctgtgaggagggccgctgcctgtgtgaccccggctacacaggccccacctgtgccaccaggatgtgcccagctgactgccggggccggggccgctgtgtgcagggcgtgtgcctgtgccacgtgggctatggaggagaggactgtggccaggaggagcccccagccagcgcctgccctgggggctgcggcccccgggagctgtgccgggccggccagtgtgtgtgtgtggagggcttccggggccctgactgtgccatccagacctgccctggggactgccggggccgcggggagtgccatgatggcagctgtgtgtgcaaggatggctatgctggggaggactgtggggaggaggtgcccaccatcgagggcatgaggatgcacctgctggaggagaccaccgtgaggacagagtggaccccagcccctggccctgtggatgcctatgagatccagttcatccccaccacagaaggagccagcccccccttcaccgcccgggtgcccagcagcgccagcgcctatgaccagaggggcctggcccctggccaggagtaccaggtgacagtgcgggccctgcggggcacctcctggggcctgcctgccagcaagaccatcaccaccatgattgatggcccccaggacctgcgggtggtggccgtgacccccaccaccctggagctgggctggctgcggccccaggccgaggtggacagatttgtggtgtcctatgtgtctgctggcaaccagagggtgcggctggaggtgcccccagaggctgatggcaccctgctgacagacctgatgcctggggtggagtatgtggtgacagtgacagctgagcggggccgggctgtgtcctacccagcctctgtgcgggccaacacaggcagcagccccctgggcctgctgggcaccacagatgagcccccaccttctggccccagcaccacccagggcgcccaggcccccctgctgcagcagaggccccaggagctgggggagctgcgggtgctgggcagagatgagaccggccgcctgcgggtggtgtggacagcccagcctgacacctttgcctacttccagctgaggatgagggtgcctgagggccctggggcccacgaggaggtgctgcctggagatgtgcggcaggccctggtgcccccacctcctcctggcaccccctatgagctgagcctgcatggagtgcccccaggcggcaagcccagcgaccccatcatctaccagggcatcatggacaaggatgaggagaagccaggcaagagcagcggccccccccggctgggggagctgactgtgacagacaggaccagtgacagcctgctgctgcgctggacagtgcctgagggggagtttgacagctttgtgatccagtacaaggacagagatggccagccccaggtggtgcctgtggagggcccccagaggtctgctgtgatcaccagcctggaccccggcaggaagtacaagtttgtgctgtatggctttgtgggcaagaagagacatggccccctggtggccgaggccaagatcctgccccagagcgaccccagccctggcaccccaccccggctgggcaacctgtgggtgacagaccccaccccagacagcctgcacctgtcctggacagtgcctgagggccagtttgacaccttcatggtgcagtacagagacagagatggccggccccaggtggtgcctgtggagggccctgagaggagctttgtggtgagcagcctggaccctgaccacaagtaccgcttcaccctgtttggcatcgccaacaagaagagatatggccccctgacagcagatggcaccacagcccctgagaggaaggaggagccccccaggcctgagttcctggagcagcccctgctgggggagctgactgtgactggagtgaccccagacagcctgcggctgtcctggacagtggcccagggcccctttgacagcttcatggtgcagtacaaggatgcccagggccagccccaggccgtgcctgtggccggagatgaaaatgaggtgacagtgcccggcctggaccctgacaggaagtacaagatgaacctgtatggcctgcggggccggcagagggtgggccctgagagcgtggtggccaagacagccccccaggaggatgtggatgagacccccagccccacagagctgggcacagaggcccctgagagccctgaggagcccctgctgggggagctgactgtgacaggcagcagcccagacagcctgagcctcttctggacagtgccccagggcagctttgacagcttcaccgtgcagtacaaggacagagatggccggcccagggctgtgcgggtgggcggcaaggagagcgaggtgacagtgggcggcctggagcccggccacaagtacaagatgcacctgtatggcctgcacgagggccagagggtgggccctgtgtctgctgtgggcgtgacagccccccagcaggaggagaccccaccagccacagagagccccctggagccccggctgggggagctgactgtgacagatgtgacccccaacagcgtgggcctgtcctggacagtgcctgagggccagtttgacagcttcatcgtgcagtacaaggacaaggatggccagccccaggtggtgcctgtggccgctgaccagcgggaggtgacagtgtacaacctggagcctgagaggaagtacaagatgaacatgtatggcctgcatgatggccagaggatgggccccctgtctgtggtgattgtgacagcccccctgcccccagccccagccacagaggccagcaagccacccctggagccccggctgggggagctgactgtgacagacatcaccccagacagcgtgggcctgtcctggacagtgcctgagggggagtttgacagctttgtggtgcagtacaaggacagagatggccagccccaggtggtgcctgtggccgctgaccagcgggaggtgaccatcccagacctggagcccagcaggaagtacaagttcctgctgtttggcatccaggacggcaagagaagaagccctgtgtctgtggaggccaagacagtggcccggggagatgccagccctggggccccaccccggctgggggagctgtgggtgacagaccccaccccagacagcctgcggctgtcctggacagtgcctgagggccagtttgacagctttgtggtgcagttcaaggacaaggatggcccccaggtggtgcctgtggagggccacgagaggtctgtgacagtgacccccctggatgctggcaggaagtaccgcttcctgctgtatggcctgctgggcaagaagagacatggccccctgacagcagatggcaccacagaggcccggagcgccatggatgacaccggcaccaagaggcctcccaagccccggctgggggaggagctgcaggtgaccaccgtgacccagaacagcgtgggcctgtcctggacagtgcctgagggccagtttgacagctttgtggtgcagtacaaggacagagatggccagccccaggtggtgcctgtggagggcagcctgcgggaggtgtctgtgcccggcctggaccctgcccaccgctacaagctgctgctgtatggcctgcaccacggcaagagggtgggccccatctctgctgtggccatcacagctggccgggaggagacagaaacagagaccacagcccccaccccaccagcccctgagccccacctgggggagctgactgtggaggaggccaccagccacaccctgcacctgtcctggatggtgacagaaggagaatttgacagctttgagatccagtacacagacagagatggccagctgcagatggtgagaattggaggagacagaaatgacatcaccctgagcggcctggagagtgaccaccgctacctggtgaccctgtatggcttcagtgatggcaagcacgtgggccctgtgcacgtggaggccctgactgtgcctgaggaggagaagcccagcgagcccccaacagccaccccagagccccccatcaagccccggctgggggagctgactgtgacagatgccaccccagacagcctgagcctgtcctggacagtgcctgagggccagtttgaccacttcctggtgcagtacagaaatggagatggccagcccaaggctgtgcgggtgcccggccacgaggagggcgtgaccatcagcggcctggagccagaccacaagtacaagatgaacctgtatggcttccatggaggccagaggatgggccctgtgtctgtggtgggcgtgacagctgctgaggaggagacccccagccccacagagcccagcatggaggcccctgagcctgctgaggagcccctgctgggggagctgactgtgacaggcagcagcccagacagcctgagcctgtcctggacagtgccccagggccgctttgacagcttcaccgtgcagtacaaggacagagatggccggccccaggtggtgcgggtgggcggggaggagagcgaggtgacagtgggcggcctggagcccggcaggaagtacaagatgcacctgtatggcctgcacgagggccggcgggtgggccctgtgtctgctgtgggcgtgacagcccctgaggaggagagcccagatgcccccctggccaagctgcggctgggccagatgacagtgcgggacatcaccagtgacagcctgagcctgtcctggacagtgcctgagggccagtttgaccacttcctggtgcagttcaagaatggagatggccagcccaaggctgtgcgggtgcccggccatgaagatggagtgaccatcagcggcctggagccagaccacaagtacaagatgaacctgtatggcttccacggcggccagagggtgggccctgtgtctgctgtgggcctgacagcccctgggaaggatgaggagatggccccagccagcacagagccccccaccccagagccccccatcaagccccggctggaggagctgactgtgacagatgccaccccagacagcctgagcctgtcctggacagtgcctgagggccagtttgaccacttcctggtgcagtacaagaatggagatggccagcccaaggccaccagggtgcccggccatgaagatagagtgaccatcagcggcctggagccagacaacaagtacaagatgaacctgtatggcttccatggaggccagagggtgggccctgtgtctgccatcggcgtgacagctgctgaggaggagacccccagccccacagagcccagcatggaggcccctgagcccccagaggagcccctgctgggggagctgactgtgacaggcagcagcccagacagcctgagcctgtcctggacagtgccccagggccgctttgacagcttcaccgtgcagtacaaggacagagatggccggccccaggtggtgcgggtgggcggggaggagagcgaggtgacagtgggcggcctggagcccggcaggaagtacaagatgcacctgtatggcctgcacgagggccggcgggtgggccctgtgtccacagtgggcgtgacagccccccaggaggatgtggatgagacccccagccccacagagcccggcacagaggcccctgagcccccagaggagcccctgctgggggagctgactgtgacaggcagcagcccagacagcctgagcctgtcctggacagtgccccagggccgctttgacagcttcaccgtgcagtacaaggacagagatggccggccccaggccgtgcgggtgggcggccaggagagcaaggtgacagtgcggggcctggagcccggcaggaagtacaagatgcacctgtatggcctgcacgagggccgccgcctgggccctgtgtctgctgtgggcgtgacagaagatgaggccgagaccacccaggccgtgcccaccatgaccccagagccccccatcaagccccggctgggggagctgaccatgacagatgccaccccagacagcctgagcctgtcctggacagtgcctgagggccagtttgaccacttcctggtgcagtacagaaatggagatggccagcccaaggctgtgcgggtgcccggccatgaagatggagtgaccatcagcggcctggagccagaccacaagtacaagatgaacctgtatggcttccacggcggccagagggtgggccccatctctgtgattggagtgacagctgctgaggaggagacccccagccccacagagctgagcacagaggcccctgagcccccagaggagcccctgctgggggagctgactgtgacaggcagcagcccagacagcctgagcctgtcctggaccatcccccagggccactttgacagcttcaccgtgcagtacaaggacagagatggccggccccaggtgatgagggtgcggggggaggagagcgaggtgacagtgggcggcctggagcccggcaggaagtacaagatgcacctgtatggcctgcacgagggcagaagagtgggccctgtgtccacagtgggcgtgacagaagatgaggccgagaccacccaggccgtgcccaccaccaccccagagccccccaacaagccccggctgggggagctgactgtgacagatgccaccccagacagcctgagcctgtcctggatggtgcctgagggccagtttgaccacttcctggtgcagtacagaaatggagatggccagcccaaggtggtgcgggtgcccggccatgaagatggagtgaccatcagcggcctggagccagaccacaagtacaagatgaacctgtatggcttccacggcggccagagggtgggccccatctctgtgattggagtgacagctgctgaggaggagaccccagcccccacagagcccagcacagaggcccctgagcccccagaggagcccctgctgggggagctgactgtgacaggcagcagcccagacagcctgagcctgtcctggaccatcccccagggccgctttgacagcttcaccgtgcagtacaaggacagagatggccggccccaggtggtgcgggtgcggggggaggagagcgaggtgacagtgggcggcctggagcccggctgcaagtacaagatgcacctgtatggcctgcacgagggccagagggtgggccctgtgtctgctgtgggcgtgacagcccccaaggatgaggccgagaccacccaggccgtgcccaccatgaccccagagccccccatcaagccccggctgggggagctgactgtgacagatgccaccccagacagcctgagcctgtcctggatggtgcctgagggccagtttgaccacttcctggtgcagtacagaaatggagatggccagcccaaggctgtgcgggtgcccggccatgaagatggagtgaccatcagcggcctggagccagaccacaagtacaagatgaacctgtatggcttccacggcggccagagggtgggccctgtgtctgccatcggcgtgacagaggaggagacccccagccccacagagcccagcacagaggcccctgaggcccctgaggagcccctgctgggggagctgactgtgacaggcagcagcccagacagcctgagcctgtcctggacagtgccccagggccgctttgacagcttcaccgtgcagtacaaggacagagatggccagccccaggtggtgcgggtgcggggggaggagagcgaggtgacagtgggcggcctggagcccggcaggaagtacaagatgcacctgtatggcctgcacgagggccagagggtgggccctgtgtccacagtgggcatcacagcccccctgcccacccccctgcctgtggagccccggctgggggagctggccgtggccgctgtgaccagtgacagcgtgggcctgtcctggacagtggcccagggcccctttgacagcttcctggtgcagtacagagatgcccagggccagccccaggccgtgcctgtgtctggggacctgcgggctgtggccgtgtctggcctggaccctgccaggaagtacaagttcctgctgtttggcctgcagaatggcaagagacatggccctgtgcctgtggaggccaggacagccccagacaccaagcccagcccccggctgggggagctgactgtgacagatgccaccccagacagcgtgggcctgtcctggacagtgcctgagggggagtttgacagctttgtggtgcagtacaaggacaaggatggccgcctgcaggtggtgcctgtggccgccaaccagcgggaggtgacagtgcagggcctggagcccagcaggaagtaccgcttcctgctgtatggcctgagcggcaggaagaggctgggccccatctctgctgacagcaccacagcccccctggagaaggagctgcccccccacctgggggagctgactgtggccgaggagaccagcagcagcctgcggctgtcctggacagtggcccagggcccctttgacagctttgtggtgcagtacagagacacagatggccagcccagggctgtgcctgtggccgctgaccagaggacagtgacagtggaggacctggagcccgggaagaagtacaagttcctgctgtatggcctgctgggcggcaagaggctgggccctgtgtctgccctgggcatgacagcccctgaggaggacaccccagcccctgagctggcccctgaggcccctgagcccccagaggagccccggctgggcgtgctgactgtgacagacaccaccccagacagcatgaggctgtcctggagcgtggcccagggcccctttgacagctttgtggtgcagtatgaggacaccaacggccagccccaggccctgctggtggatggagaccagagcaagatcctgatcagcggcctggagcccagcaccccctaccgcttcctgctgtatggcctgcacgagggcaagaggctgggccccctgtctgctgagggcaccaccggcctggccccagctggccagaccagcgaggagagccggccccggctgagccagctgtctgtgacagatgtgaccaccagcagcctgcggctgaactgggaggcccctcctggggcctttgacagcttcctgctgcgctttggagtgcccagccccagcaccctggagccccacccccggcccctgctgcagcgggagctgatggtgcccggcaccaggcacagcgctgtgctgcgggacctgcggagcggcaccctgtacagcctgaccctgtatggcctgcggggcccccacaaggctgacagcatccagggcacagcccggaccctgagccctgtgctggagagcccccgggacctgcagttcagcgagatccgggagaccagcgccaaggtgaactggatgcccccacccagcagagctgacagcttcaaggtgtcctaccagctggctgatggaggagagccccagagcgtgcaggtggatggccaggcccggacccagaagctgcagggcctcatccctggggcccgctatgaggtgacagtggtgtctgtgcggggctttgaggagagcgagcccctgaccggcttcctgaccaccgtgcctgatggccccacccagctgcgggccctgaacctgacagagggctttgctgtgctgcactggaagccaccccagaaccctgtggacacctatgacatccaggtgacagcccctggggccccacccctgcaggccgagaccccaggcagcgctgtggactaccccctgcatgacctggtgctgcacaccaactacacagccaccgtgcggggcctgcggggccccaacctgaccagccctgccagcatcaccttcaccaccggcctggaggccccccgggacctggaggccaaggaggtgacccccaggacagccctgctgacctggacagagccccctgtgcggcctgctggctacctgctgtccttccacacccctgggggccagacccaggagatcctgctgcccggcggcatcaccagccaccagctgctgggcctcttccccagcaccagctacaatgcccggctgcaggccatgtggggccagagcctgctgccccctgtgtccaccagcttcaccactggaggcctgcgcatccccttcccccgggactgtggggaggagatgcagaatggagctggggccagcaggaccagcaccatcttcctgaatggaaaccgggagcggcccctgattgtgttctgtgacatggagacagatggcggcggctggctggtgttccagaggaggatggatggccagacagacttctggagggactgggaggactatgcccacggctttggaaacatctctggagagttctggctgggcaatgaggccctgcacagcctgacccaggccggggactacagcatgagggtggacctgcgggctggagatgaggccgtgtttgcccagtatgacagcttccacgtggacagcgctgctgagtactaccgcctgcacctggagggctaccatggaacagctggggacagcatgagctaccacagcggcagcgtcttcagcgcccgggaccgggaccccaacagcctgctgatcagctgtgctgtgtcctacagaggagcctggtggtacagaaactgccactacgccaacctgaatggcctgtatggcagcacagtggaccaccagggcgtgtcctggtaccactggaagggctttgagttctctgtgcccttcacagagatgaagctgcggcccaggaacttccgcagccctgctgggggcggctag

SEQ ID NO: 201511 - DNA, 12729 bp, Artificial Sequence
  derived and/or modified sequence
atgatgcctgcccagtatgccctgaccagcagcctggtgctgctggtgctgctgagcacagcccgggccggccccttcagcagccgcagcaatgtgaccctgcctgccccccggcccccaccccagcccggcggccacacagtgggcgctggggtgggcagccccagcagccagctgtatgagcacacagtggagggcggggagaagcaggtggtgttcacccaccgcatcaacctgccccccagcacaggctgcggctgccccccaggcacagagccccctgtgctggccagcgaggtgcaggccctgcgggtgcggctggagatcctggaggagctggtgaagggcctgaaggagcagtgcaccggcggctgctgcccagccagcgcccaggccggcaccggccagacagatgtgaggaccctgtgcagcctgcacggcgtgtttgacctgagccgctgcacctgcagctgtgagcccggctggggcggccccacctgcagcgaccccacagatgctgagatcccccccagcagcccccccagcgccagcggcagctgcccagatgactgcaatgaccagggccgctgtgtgcggggccgctgtgtgtgcttccctggctacacaggccccagctgtggctggcccagctgccctggggactgccagggccggggccgctgtgtgcagggcgtgtgtgtgtgcagagctggcttcagcggccctgactgcagccagaggagctgcccccggggctgcagccagaggggccgctgtgagggcggccgctgtgtgtgtgaccccggctacacaggagatgactgtggcatgaggagctgcccccggggctgcagccagaggggccgctgtgaaaatggccgctgtgtgtgcaaccctggctacgccggggaggactgtggggtgcgcagctgcccccggggctgcagccagaggggccgctgcaaggatggccgctgtgtgtgtgaccccggctacacaggagaggactgtggcaccaggagctgcccctgggactgtggggagggcggccgctgtgtggatggccgctgtgtgtgctggccaggctacaccggggaggactgcagcaccaggacctgcccccgggactgccggggccggggccgctgtgaagatggagagtgcatctgtgacaccggctacagcggagatgactgtggggtgcgcagctgccctggggactgcaaccagaggggccgctgtgaagatggccgctgtgtgtgctggccaggctacacaggaacagactgtggcagccgggcctgcccccgggactgccggggccggggccgctgtgaaaatggagtgtgtgtgtgcaatgccggctacagcggggaggactgtggggtgcgcagctgccctggggactgccggggccggggccgctgtgagagcggccgctgcatgtgctggccaggctacacaggccgggactgtggcacccgggcctgccctggggactgccggggccggggccgctgtgtggatggccgctgtgtgtgcaaccctggcttcaccggggaggactgtggcagccgccgctgccctggggactgccggggccacggcctgtgtgaagatggagtgtgtgtgtgtgatgctggctacagcggggaggactgcagcaccaggagctgccctgggggctgccggggccggggccagtgcctggatggccgctgtgtgtgtgaagatggctacagcggggaggactgtggggtgcggcagtgccccaatgactgcagccagcacggcgtgtgccaggatggagtgtgcatctgctgggagggctacgtgtctgaggactgcagcatccgcacctgccccagcaactgccacggccggggccgctgtgaggagggccgctgcctgtgtgaccccggctacacaggccccacctgtgccaccaggatgtgcccagctgactgccggggccggggccgctgtgtgcagggcgtgtgcctgtgccacgtgggctatggaggagaggactgtggccaggaggagcccccagccagcgcctgccctgggggctgcggcccccgggagctgtgccgggccggccagtgtgtgtgtgtggagggcttccggggccctgactgtgccatccagacctgccctggggactgccggggccgcggggagtgccatgatggcagctgtgtgtgcaaggatggctatgctggggaggactgtggggaggaggtgcccaccatcgagggcatgaggatgcacctgctggaggagaccaccgtgaggacagagtggaccccagcccctggccctgtggatgcctatgagatccagttcatccccaccacagaaggagccagcccccccttcaccgcccgggtgcccagcagcgccagcgcctatgaccagaggggcctggcccctggccaggagtaccaggtgacagtgcgggccctgcggggcacctcctggggcctgcctgccagcaagaccatcaccaccatgattgatggcccccaggacctgcgggtggtggccgtgacccccaccaccctggagctgggctggctgcggccccaggccgaggtggacagatttgtggtgtcctatgtgtctgctggcaaccagagggtgcggctggaggtgcccccagaggctgatggcaccctgctgacagacctgatgcctggggtggagtatgtggtgacagtgacagctgagcggggccgggctgtgtcctacccagcctctgtgcgggccaacacaggcagcagccccctgggcctgctgggcaccacagatgagcccccaccttctggccccagcaccacccagggcgcccaggcccccctgctgcagcagaggccccaggagctgggggagctgcgggtgctgggcagagatgagaccggccgcctgcgggtggtgtggacagcccagcctgacacctttgcctacttccagctgaggatgagggtgcctgagggccctggggcccacgaggaggtgctgcctggagatgtgcggcaggccctggtgcccccacctcctcctggcaccccctatgagctgagcctgcatggagtgcccccaggcggcaagcccagcgaccccatcatctaccagggcatcatggacaaggatgaggagaagccaggcaagagcagcggccccccccggctgggggagctgactgtgacagacaggaccagtgacagcctgctgctgcgctggacagtgcctgagggggagtttgacagctttgtgatccagtacaaggacagagatggccagccccaggtggtgcctgtggagggcccccagaggtctgctgtgatcaccagcctggaccccggcaggaagtacaagtttgtgctgtatggctttgtgggcaagaagagacatggccccctggtggccgaggccaagatcctgccccagagcgaccccagccctggcaccccaccccacctgggcaacctgtgggtgacagaccccaccccagacagcctgcacctgtcctggacagtgcctgagggccagtttgacaccttcatggtgcagtacagagacagagatggccggccccaggtggtgcctgtggagggccctgagaggagctttgtggtgagcagcctggaccctgaccacaagtaccgcttcaccctgtttggcatcgccaacaagaagagatatggccccctgacagcagatggcaccacagcccctgagaggaaggaggagccccccaggcctgagttcctggagcagcccctgctgggggagctgactgtgactggagtgaccccagacagcctgcggctgtcctggacagtggcccagggcccctttgacagcttcatggtgcagtacaaggatgcccagggccagccccaggccgtgcctgtggccggagatgaaaatgaggtgacagtgcccggcctggaccctgacaggaagtacaagatgaacctgtatggcctgcggggccggcagagggtgggccctgagagcgtggtggccaagacagccccccaggaggatgtggatgagacccccagccccacagagctgggcacagaggcccctgagagccctgaggagcccctgctgggggagctgactgtgacaggcagcagcccagacagcctgagcctcttctggacagtgccccagggcagctttgacagcttcaccgtgcagtacaaggacagagatggccggcccagggctgtgcgggtgggcggcaaggagagcgaggtgacagtgggcggcctggagcccggccacaagtacaagatgcacctgtatggcctgcacgagggccagagggtgggccctgtgtctgctgtgggcgtgacagccccccagcaggaggagaccccaccagccacagagagccccctggagccccggctgggggagctgactgtgacagatgtgacccccaacagcgtgggcctgtcctggacagtgcctgagggccagtttgacagcttcatcgtgcagtacaaggacaaggatggccagccccaggtggtgcctgtggccgctgaccagcgggaggtgacagtgtacaacctggagcctgagaggaagtacaagatgaacatgtatggcctgcatgatggccagaggatgggccccctgtctgtggtgattgtgacagcccccctgcccccagccccagccacagaggccagcaagccacccctggagccccggctgggggagctgactgtgacagacatcaccccagacagcgtgggcctgtcctggacagtgcctgagggggagtttgacagctttgtggtgcagtacaaggacagagatggccagccccaggtggtgcctgtggccgctgaccagcgggaggtgaccatcccagacctggagcccagcaggaagtacaagttcctgctgtttggcatccaggacggcaagagaagaagccctgtgtctgtggaggccaagacagtggcccggggagatgccagccctggggccccaccccggctgggggagctgtgggtgacagaccccaccccagacagcctgcggctgtcctggacagtgcctgagggccagtttgacagctttgtggtgcagttcaaggacaaggatggcccccaggtggtgcctgtggagggccacgagaggtctgtgacagtgacccccctggatgctggcaggaagtaccgcttcctgctgtatggcctgctgggcaagaagagacatggccccctgacagcagatggcaccacagaggcccggagcgccatggatgacaccggcaccaagaggcctcccaagccccggctgggggaggagctgcaggtgaccaccgtgacccagaacagcgtgggcctgtcctggacagtgcctgagggccagtttgacagctttgtggtgcagtacaaggacagagatggccagccccaggtggtgcctgtggagggcagcctgcgggaggtgtctgtgcccggcctggaccctgcccaccgctacaagctgctgctgtatggcctgcaccacggcaagagggtgggccccatctctgctgtggccatcacagctggccgggaggagacagaaacagagaccacagcccccaccccaccagcccctgagccccacctgggggagctgactgtggaggaggccaccagccacaccctgcacctgtcctggatggtgacagaaggagaatttgacagctttgagatccagtacacagacagagatggccagctgcagatggtgagaattggaggagacagaaatgacatcaccctgagcggcctggagagtgaccaccgctacctggtgaccctgtatggcttcagtgatggcaagcacgtgggccctgtgcacgtggaggccctgactgtgcctgaggaggagaagcccagcgagcccccaacagccaccccagagccccccatcaagccccggctgggggagctgactgtgacagatgccaccccagacagcctgagcctgtcctggacagtgcctgagggccagtttgaccacttcctggtgcagtacagaaatggagatggccagcccaaggctgtgcgggtgcccggccacgaggagggcgtgaccatcagcggcctggagccagaccacaagtacaagatgaacctgtatggcttccatggaggccagaggatgggccctgtgtctgtggtgggcgtgacagctgctgaggaggagacccccagccccacagagcccagcatggaggcccctgagcctgctgaggagcccctgctgggggagctgactgtgacaggcagcagcccagacagcctgagcctgtcctggacagtgccccagggccgctttgacagcttcaccgtgcagtacaaggacagagatggccggccccaggtggtgcgggtgggcggggaggagagcgaggtgacagtgggcggcctggagcccggcaggaagtacaagatgcacctgtatggcctgcacgagggccggcgggtgggccctgtgtctgctgtgggcgtgacagcccctgaggaggagagcccagatgcccccctggccaagctgcggctgggccagatgacagtgcgggacatcaccagtgacagcctgagcctgtcctggacagtgcctgagggccagtttgaccacttcctggtgcagttcaagaatggagatggccagcccaaggctgtgcgggtgcccggccatgaagatggagtgaccatcagcggcctggagccagaccacaagtacaagatgaacctgtatggcttccacggcggccagagggtgggccctgtgtctgctgtgggcctgacagcccctgggaaggatgaggagatggccccagccagcacagagccccccaccccagagccccccatcaagccccggctggaggagctgactgtgacagatgccaccccagacagcctgagcctgtcctggacagtgcctgagggccagtttgaccacttcctggtgcagtacaagaatggagatggccagcccaaggccaccagggtgcccggccatgaagatagagtgaccatcagcggcctggagccagacaacaagtacaagatgaacctgtatggcttccatggaggccagagggtgggccctgtgtctgccatcggcgtgacagctgctgaggaggagacccccagccccacagagcccagcatggaggcccctgagcccccagaggagcccctgctgggggagctgactgtgacaggcagcagcccagacagcctgagcctgtcctggacagtgccccagggccgctttgacagcttcaccgtgcagtacaaggacagagatggccggccccaggtggtgcgggtgggcggggaggagagcgaggtgacagtgggcggcctggagcccggcaggaagtacaagatgcacctgtatggcctgcacgagggccggcgggtgggccctgtgtccacagtgggcgtgacagccccccaggaggatgtggatgagacccccagccccacagagcccggcacagaggcccctgagcccccagaggagcccctgctgggggagctgactgtgacaggcagcagcccagacagcctgagcctgtcctggacagtgccccagggccgctttgacagcttcaccgtgcagtacaaggacagagatggccggccccaggccgtgcgggtgggcggccaggagagcaaggtgacagtgcggggcctggagcccggcaggaagtacaagatgcacctgtatggcctgcacgagggccgccgcctgggccctgtgtctgctgtgggcgtgacagaagatgaggccgagaccacccaggccgtgcccaccatgaccccagagccccccatcaagccccggctgggggagctgaccatgacagatgccaccccagacagcctgagcctgtcctggacagtgcctgagggccagtttgaccacttcctggtgcagtacagaaatggagatggccagcccaaggctgtgcgggtgcccggccatgaagatggagtgaccatcagcggcctggagccagaccacaagtacaagatgaacctgtatggcttccacggcggccagagggtgggccccatctctgtgattggagtgacagctgctgaggaggagacccccagccccacagagctgagcacagaggcccctgagcccccagaggagcccctgctgggggagctgactgtgacaggcagcagcccagacagcctgagcctgtcctggaccatcccccagggccactttgacagcttcaccgtgcagtacaaggacagagatggccggccccaggtgatgagggtgcggggggaggagagcgaggtgacagtgggcggcctggagcccggcaggaagtacaagatgcacctgtatggcctgcacgagggcagaagagtgggccctgtgtccacagtgggcgtgacagaagatgaggccgagaccacccaggccgtgcccaccaccaccccagagccccccaacaagccccggctgggggagctgactgtgacagatgccaccccagacagcctgagcctgtcctggatggtgcctgagggccagtttgaccacttcctggtgcagtacagaaatggagatggccagcccaaggtggtgcgggtgcccggccatgaagatggagtgaccatcagcggcctggagccagaccacaagtacaagatgaacctgtatggcttccacggcggccagagggtgggccccatctctgtgattggagtgacagctgctgaggaggagaccccagcccccacagagcccagcacagaggcccctgagcccccagaggagcccctgctgggggagctgactgtgacaggcagcagcccagacagcctgagcctgtcctggaccatcccccagggccgctttgacagcttcaccgtgcagtacaaggacagagatggccggccccaggtggtgcgggtgcggggggaggagagcgaggtgacagtgggcggcctggagcccggctgcaagtacaagatgcacctgtatggcctgcacgagggccagagggtgggccctgtgtctgctgtgggcgtgacagcccccaaggatgaggccgagaccacccaggccgtgcccaccatgaccccagagccccccatcaagccccggctgggggagctgactgtgacagatgccaccccagacagcctgagcctgtcctggatggtgcctgagggccagtttgaccacttcctggtgcagtacagaaatggagatggccagcccaaggctgtgcgggtgcccggccatgaagatggagtgaccatcagcggcctggagccagaccacaagtacaagatgaacctgtatggcttccacggcggccagagggtgggccctgtgtctgccatcggcgtgacagaggaggagacccccagccccacagagcccagcacagaggcccctgaggcccctgaggagcccctgctgggggagctgactgtgacaggcagcagcccagacagcctgagcctgtcctggacagtgccccagggccgctttgacagcttcaccgtgcagtacaaggacagagatggccagccccaggtggtgcgggtgcggggggaggagagcgaggtgacagtgggcggcctggagcccggcaggaagtacaagatgcacctgtatggcctgcacgagggccagagggtgggccctgtgtccacagtgggcatcacagcccccctgcccacccccctgcctgtggagccccggctgggggagctggccgtggccgctgtgaccagtgacagcgtgggcctgtcctggacagtggcccagggcccctttgacagcttcctggtgcagtacagagatgcccagggccagccccaggccgtgcctgtgtctggggacctgcgggctgtggccgtgtctggcctggaccctgccaggaagtacaagttcctgctgtttggcctgcagaatggcaagagacatggccctgtgcctgtggaggccaggacagccccagacaccaagcccagcccccggctgggggagctgactgtgacagatgccaccccagacagcgtgggcctgtcctggacagtgcctgagggggagtttgacagctttgtggtgcagtacaaggacaaggatggccgcctgcaggtggtgcctgtggccgccaaccagcgggaggtgacagtgcagggcctggagcccagcaggaagtaccgcttcctgctgtatggcctgagcggcaggaagaggctgggccccatctctgctgacagcaccacagcccccctggagaaggagctgcccccccacctgggggagctgactgtggccgaggagaccagcagcagcctgcggctgtcctggacagtggcccagggcccctttgacagctttgtggtgcagtacagagacacagatggccagcccagggctgtgcctgtggccgctgaccagaggacagtgacagtggaggacctggagcccgggaagaagtacaagttcctgctgtatggcctgctgggcggcaagaggctgggccctgtgtctgccctgggcatgacagcccctgaggaggacaccccagcccctgagctggcccctgaggcccctgagcccccagaggagccccggctgggcgtgctgactgtgacagacaccaccccagacagcatgaggctgtcctggagcgtggcccagggcccctttgacagctttgtggtgcagtatgaggacaccaacggccagccccaggccctgctggtggatggagaccagagcaagatcctgatcagcggcctggagcccagcaccccctaccgcttcctgctgtatggcctgcacgagggcaagaggctgggccccctgtctgctgagggcaccaccggcctggccccagctggccagaccagcgaggagagccggccccggctgagccagctgtctgtgacagatgtgaccaccagcagcctgcggctgaactgggaggcccctcctggggcctttgacagcttcctgctgcgctttggagtgcccagccccagcaccctggagccccacccccggcccctgctgcagcgggagctgatggtgcccggcaccaggcacagcgctgtgctgcgggacctgcggagcggcaccctgtacagcctgaccctgtatggcctgcggggcccccacaaggctgacagcatccagggcacagcccggaccctgagccctgtgctggagagcccccgggacctgcagttcagcgagatccgggagaccagcgccaaggtgaactggatgcccccacccagcagagctgacagcttcaaggtgtcctaccagctggctgatggaggagagccccagagcgtgcaggtggatggccaggcccggacccagaagctgcagggcctcatccctggggcccgctatgaggtgacagtggtgtctgtgcggggctttgaggagagcgagcccctgaccggcttcctgaccaccgtgcctgatggccccacccagctgcgggccctgaacctgacagagggctttgctgtgctgcactggaagccaccccagaaccctgtggacacctatgatgtgcaggtgacagcccctggggccccacccctgcaggccgagaccccaggcagcgctgtggactaccccctgcatgacctggtgctgcacaccaactacacagccaccgtgcggggcctgcggggccccaacctgaccagccctgccagcatcaccttcaccaccggcctggaggccccccgggacctggaggccaaggaggtgacccccaggacagccctgctgacctggacagagccccctgtgcggcctgctggctacctgctgtccttccacacccctgggggccagaaccaggagatcctgctgcccggcggcatcaccagccaccagctgctgggcctcttccccagcaccagctacaatgcccggctgcaggccatgtggggccagagcctgctgccccctgtgtccaccagcttcaccactggaggcctgcgcatccccttcccccgggactgtggggaggagatgcagaatggagctggggccagcaggaccagcaccatcttcctgaatggaaaccgggagcggcccctgaatgtgttctgtgacatggagacagatggcggcggctggctggtgttccagaggaggatggatggccagacagacttctggagggactgggaggactatgcccacggctttggaaacatctctggagagttctggctgggcaatgaggccctgcacagcctgacccaggccggggactacagcatgagggtggacctgcgggctggagatgaggccgtgtttgcccagtatgacagcttccacgtggacagcgctgctgagtactaccgcctgcacctggagggctaccatggaacagctggggacagcatgagctaccacagcggcagcgtcttcagcgcccgggaccgggaccccaacagcctgctgatcagctgtgctgtgtcctacagaggagcctggtggtacagaaactgccactacgccaacctgaatggcctgtatggcagcacagtggaccaccagggcgtgtcctggtaccactggaagggctttgagttctctgtgcccttcacagagatgaagctgcggcccaggaacttccgcagccctgctgggggcggctag

SEQ ID NO: 201512 - DNA, 843 bp, Artificial Sequence
  derived and/or modified sequence
atggtgacagaaggagaatttgacagctttgagatccagtacacagacagagatggccagctgcagatggtgcgcatcggcggggacagaaatgacatcaccctgagcggcctggagagtgaccaccgctacctggtgaccctgtatggcttcagtgatggcaagcacgtgggccctgtgcacgtggaggccctgactgtgcctgaggaggagaagcccagcgagcccccaacagccaccccagagccccccatcaagccccggctgggggagctgactgtgacagatgccaccccagacagcctgagcctgtcctggacagtgcctgagggccagtttgaccacttcctggtgcagtacagaaatggagatggccagcccaaggctgtgcgggtgcccggccacgaggagggcgtgaccatcagcggcctggagccagaccacaagtacaagatgaacctgtatggcttccacggcggccagaggatgggccctgtgtctgtggtgggcgtgacagctgctgaggaggagacccccagccccacagagcccagcatggaggcccctgagcctgctgaggagcccctgctgggggagctgactgtgacaggcagcagcccagacagcctgagcctgtcctggacagtgccccagggccgctttgacagcttcaccgtgcagtacaaggacagagatggccggccccaggtggtgcgggtgggcggggaggagagcgaggtgacagtgggcggcctggagcccggcaggaagtacaagatgcacctgtatggcctgcacgagggcagaagagtgggccctgtgtctgctgtgggcgtgacctag

SEQ ID NO: 201513 - DNA, 12729 bp, Artificial Sequence
  derived and/or modified sequence
atgatgcctgcccagtatgccctgaccagcagcctggtgctgctggtgctgctgagcacagcccgggccggccccttcagcagccgcagcaatgtgaccctgcctgccccccggcccccaccccagcccggcggccacacagtgggcgctggggtgggcagccccagcagccagctgtatgagcacacagtggagggcggggagaagcaggtggtgttcacccaccgcatcaacctgccccccagcacaggctgcggctgccccccaggcacagagccccctgtgctggccagcgaggtgcaggccctgcgggtgcggctggagatcctggaggagctggtgaagggcctgaaggagcagtgcaccggcggctgctgcccagccagcgcccaggccggcaccggccagacagatgtgaggaccctgtgcagcctgcacggcgtgtttgacctgagccgctgcacctgcagctgtgagcccggctggggcggccccacctgcagcgaccccacagatgctgagatcccccccagcagcccccccagcgccagcggcagctgcccagatgactgcaatgaccagggccgctgtgtgcggggccgctgtgtgtgcttccctggctacacaggccccagctgtggctggcccagctgccctggggactgccagggccggggccgctgtgtgcagggcgtgtgtgtgtgcagagctggcttcagcggccctgactgcagccagaggagctgcccccggggctgcagccagaggggccgctgtgagggcggccgctgtgtgtgtgaccccggctacacaggagatgactgtggcatgaggagctgcccccggggctgcagccagaggggccgctgtgaaaatggccgctgtgtgtgcaaccctggctacaccggggaggactgtggggtgcgcagctgcccccggggctgcagccagaggggccgctgcaaggatggccgctgtgtgtgtgaccccggctacacaggagaggactgtggcaccaggagctgcccctgggactgtggggagggcggccgctgtgtggatggccgctgtgtgtgctggccaggctacaccggggaggactgcagcaccaggacctgcccccgggactgccggggccggggccgctgtgaagatggagagtgcatctgtgacaccggctacagcggagatgactgtggggtgcgcagctgccctggggactgcaaccagaggggccgctgtgaagatggccgctgtgtgtgctggccaggctacacaggaacagactgtggcagccgggcctgcccccgggactgccggggccggggccgctgtgaaaatggagtgtgtgtgtgcaatgccggctacagcggggaggactgtggggtgcgcagctgccctggggactgccggggccggggccgctgtgagagcggccgctgcatgtgctggccaggctacacaggccgggactgtggcacccgggcctgccctggggactgccggggccggggccgctgtgtggatggccgctgtgtgtgcaaccctggcttcaccggggaggactgtggcagccgccgctgccctggggactgccggggccacggcctgtgtgaagatggagtgtgtgtgtgtgatgctggctacagcggggaggactgcagcaccaggagctgccctgggggctgccggggccggggccagtgcctggatggccgctgtgtgtgtgaagatggctacagcggggaggactgtggggtgcggcagtgccccaatgactgcagccagcacggcgtgtgccaggatggagtgtgcatctgctgggagggctacgtgtctgaggactgcagcatccgcacctgccccagcaactgccacggccggggccgctgtgaggagggccgctgcctgtgtgaccccggctacacaggccccacctgtgccaccaggatgtgcccagctgactgccggggccggggccgctgtgtgcagggcgtgtgcctgtgccacgtgggctatggaggagaggactgtggccaggaggagcccccagccagcgcctgccctgggggctgcggcccccgggagctgtgccgggccggccagtgtgtgtgtgtggagggcttccggggccctgactgtgccatccagacctgccctggggactgccggggccgcggggagtgccatgatggcagctgtgtgtgcaaggatggctatgctggggaggactgtggggaggaggtgcccaccatcgagggcatgaggatgcacctgctggaggagaccaccgtgaggacagagtggaccccagcccctggccctgtggatgcctatgagatccagttcatccccaccacagaaggagccagcccccccttcaccgcccgggtgcccagcagcgccagcgcctatgaccagaggggcctggcccctggccaggagtaccaggtgacagtgcgggccctgcggggcacctcctggggcctgcctgccagcaagaccatcaccaccatgattgatggcccccaggacctgcgggtggtggccgtgacccccaccaccctggagctgggctggctgcggccccaggccgaggtggacagatttgtggtgtcctatgtgtctgctggcaaccagagggtgcggctggaggtgcccccagaggctgatggcaccctgctgacagacctgatgcctggggtggagtatgtggtgacagtgacagctgagcggggccgggctgtgtcctacccagcctctgtgcgggccaacacaggcagcagccccctgggcctgctgggcaccacagatgagcccccaccttctggccccagcaccacccagggcgcccaggcccccctgctgcagcagaggccccaggagctgggggagctgcgggtgctgggcagagatgagaccggccgcctgcgggtggtgtggacagcccagcctgacacctttgcctacttccagctgaggatgagggtgcctgagggccctggggcccacgaggaggtgctgcctggagatgtgcggcaggccctggtgcccccacctcctcctggcaccccctatgagctgagcctgcatggagtgcccccaggcggcaagcccagcgaccccatcatctaccagggcatcatggacaaggatgaggagaagccaggcaagagcagcggccccccccggctgggggagctgactgtgacagacaggaccagtgacagcctgctgctgcgctggacagtgcctgagggggagtttgacagctttgtgatccagtacaaggacagagatggccagccccaggtggtgcctgtggagggcccccagaggtctgctgtgatcaccagcctggaccccggcaggaagtacaagtttgtgctgtatggctttgtgggcaagaagagacatggccccctggtggccgaggccaagatcctgccccagagcgaccccagccctggcaccccaccccggctgggcaacctgtgggtgacagaccccaccccagacagcctgcacctgtcctggacagtgcctgagggccagtttgacaccttcatggtgcagtacagagacagagatggccggccccaggtggtgcctgtggagggccctgagaggagctttgtggtgagcagcctggaccctgaccacaagtaccgcttcaccctgtttggcatcgccaacaagaagagatatggccccctgacagcagatggcaccacagcccctgagaggaaggaggagcccccccaccctgagttcctggagcagcccctgctgggggagctgactgtgactggagtgaccccagacagcctgcggctgtcctggacagtggcccagggcccctttgacagcttcatggtgcagtacaaggatgcccagggccagccccaggccgtgcctgtggccggagatgaaaatgaggtgacagtgcccggcctggaccctgacaggaagtacaagatgaacctgtatggcctgcggggccggcagagggtgggccctgagagcgtggtggccaagacagccccccaggaggatgtggatgagacccccagccccacagagctgggcacagaggcccctgagagccctgaggagcccctgctgggggagctgactgtgacaggcagcagcccagacagcctgagcctcttctggacagtgccccagggcagctttgacagcttcaccgtgcagtacaaggacagagatggccggcccagggctgtgcgggtgggcggcaaggagagcgaggtgacagtgggcggcctggagcccggccacaagtacaagatgcacctgtatggcctgcacgagggccagagggtgggccctgtgtctgctgtgggcgtgacagccccccagcaggaggagaccccaccagccacagagagccccctggagccccggctgggggagctgactgtgacagatgtgacccccaacagcgtgggcctgtcctggacagtgcctgagggccagtttgacagcttcatcgtgcagtacaaggacaaggatggccagccccaggtggtgcctgtggccgctgaccagcgggaggtgacagtgtacaacctggagcctgagaggaagtacaagatgaacatgtatggcctgcatgatggccagaggatgggccccctgtctgtggtgattgtgacagcccccctgcccccagccccagccacagaggccagcaagccacccctggagccccggctgggggagctgactgtgacagacatcaccccagacagcgtgggcctgtcctggacagtgcctgagggggagtttgacagctttgtggtgcagtacaaggacagagatggccagccccaggtggtgcctgtggccgctgaccagcgggaggtgaccatcccagacctggagcccagcaggaagtacaagttcctgctgtttggcatccaggacggcaagagaagaagccctgtgtctgtggaggccaagacagtggcccggggagatgccagccctggggccccaccccggctgggggagctgtgggtgacagaccccaccccagacagcctgcggctgtcctggacagtgcctgagggccagtttgacagctttgtggtgcagttcaaggacaaggatggcccccaggtggtgcctgtggagggccacgagaggtctgtgacagtgacccccctggatgctggcaggaagtaccgcttcctgctgtatggcctgctgggcaagaagagacatggccccctgacagcagatggcaccacagaggcccggagcgccatggatgacaccggcaccaagaggcctcccaagccccggctgggggaggagctgcaggtgaccaccgtgacccagaacagcgtgggcctgtcctggacagtgcctgagggccagtttgacagctttgtggtgcagtacaaggacagagatggccagccccaggtggtgcctgtggagggcagcctgcgggaggtgtctgtgcccggcctggaccctgcccaccgctacaagctgctgctgtatggcctgcaccacggcaagagggtgggccccatctctgctgtggccatcacagctggccgggaggagacagaaacagagaccacagcccccaccccaccagcccctgagccccacctgggggagctgactgtggaggaggccaccagccacaccctgcacctgtcctggatggtgacagaaggagaatttgacagctttgagatccagtacacagacagagatggccagctgcagatggtgagaattggaggagacagaaatgacatcaccctgagcggcctggagagtgaccaccgctacctggtgaccctgtatggcttcagtgatggcaagcacgtgggccctgtgcacgtggaggccctgactgtgcctgaggaggagaagcccagcgagcccccaacagccaccccagagccccccatcaagccccggctgggggagctgactgtgacagatgccaccccagacagcctgagcctgtcctggacagtgcctgagggccagtttgaccacttcctggtgcagtacagaaatggagatggccagcccaaggctgtgcgggtgcccggccacgaggagggcgtgaccatcagcggcctggagccagaccacaagtacaagatgaacctgtatggcttccatggaggccagaggatgggccctgtgtctgtggtgggcgtgacagctgctgaggaggagacccccagccccacagagcccagcatggaggcccctgagcctgctgaggagcccctgctgggggagctgactgtgacaggcagcagcccagacagcctgagcctgtcctggacagtgccccagggccgctttgacagcttcaccgtgcagtacaaggacagagatggccggccccaggtggtgcgggtgggcggggaggagagcgaggtgacagtgggcggcctggagcccggcaggaagtacaagatgcacctgtatggcctgcacgagggccggcgggtgggccctgtgtctgctgtgggcgtgacagcccctgaggaggagagcccagatgcccccctggccaagctgcggctgggccagatgacagtgcgggacatcaccagtgacagcctgagcctgtcctggacagtgcctgagggccagtttgaccacttcctggtgcagttcaagaatggagatggccagcccaaggctgtgcgggtgcccggccatgaagatggagtgaccatcagcggcctggagccagaccacaagtacaagatgaacctgtatggcttccacggcggccagagggtgggccctgtgtctgctgtgggcctgacagcccctgggaaggatgaggagatggccccagccagcacagagccccccaccccagagccccccatcaagccccggctggaggagctgactgtgacagatgccaccccagacagcctgagcctgtcctggacagtgcctgagggccagtttgaccacttcctggtgcagtacaagaatggagatggccagcccaaggccaccagggtgcccggccatgaagatagagtgaccatcagcggcctggagccagacaacaagtacaagatgaacctgtatggcttccatggaggccagagggtgggccctgtgtctgccatcggcgtgacagctgctgaggaggagacccccagccccacagagcccagcatggaggcccctgagcccccagaggagcccctgctgggggagctgactgtgacaggcagcagcccagacagcctgagcctgtcctggacagtgccccagggccgctttgacagcttcaccgtgcagtacaaggacagagatggccggccccaggtggtgcgggtgggcggggaggagagcgaggtgacagtgggcggcctggagcccggcaggaagtacaagatgcacctgtatggcctgcacgagggccggcgggtgggccctgtgtccacagtgggcgtgacagccccccaggaggatgtggatgagacccccagccccacagagcccggcacagaggcccctgagcccccagaggagcccctgctgggggagctgactgtgacaggcagcagcccagacagcctgagcctgtcctggacagtgccccagggccgctttgacagcttcaccgtgcagtacaaggacagagatggccggccccaggccgtgcgggtgggcggccaggagagcaaggtgacagtgcggggcctggagcccggcaggaagtacaagatgcacctgtatggcctgcacgagggccgccgcctgggccctgtgtctgctgtgggcgtgacagaagatgaggccgagaccacccaggccgtgcccaccatgaccccagagccccccatcaagccccggctgggggagctgaccatgacagatgccaccccagacagcctgagcctgtcctggacagtgcctgagggccagtttgaccacttcctggtgcagtacagaaatggagatggccagcccaaggctgtgcgggtgcccggccatgaagatggagtgaccatcagcggcctggagccagaccacaagtacaagatgaacctgtatggcttccacggcggccagagggtgggccccatctctgtgattggagtgacagctgctgaggaggagacccccagccccacagagctgagcacagaggcccctgagcccccagaggagcccctgctgggggagctgactgtgacaggcagcagcccagacagcctgagcctgtcctggaccatcccccagggccactttgacagcttcaccgtgcagtacaaggacagagatggccggccccaggtgatgagggtgcggggggaggagagcgaggtgacagtgggcggcctggagcccggcaggaagtacaagatgcacctgtatggcctgcacgagggcagaagagtgggccctgtgtccacagtgggcgtgacagaagatgaggccgagaccacccaggccgtgcccaccaccaccccagagccccccaacaagccccggctgggggagctgactgtgacagatgccaccccagacagcctgagcctgtcctggatggtgcctgagggccagtttgaccacttcctggtgcagtacagaaatggagatggccagcccaaggtggtgcgggtgcccggccatgaagatggagtgaccatcagcggcctggagccagaccacaagtacaagatgaacctgtatggcttccacggcggccagagggtgggccccatctctgtgattggagtgacagctgctgaggaggagaccccagcccccacagagcccagcacagaggcccctgagcccccagaggagcccctgctgggggagctgactgtgacaggcagcagcccagacagcctgagcctgtcctggaccatcccccagggccgctttgacagcttcaccgtgcagtacaaggacagagatggccggccccaggtggtgcgggtgcggggggaggagagcgaggtgacagtgggcggcctggagcccggctgcaagtacaagatgcacctgtatggcctgcacgagggccagagggtgggccctgtgtctgctgtgggcgtgacagcccccaaggatgaggccgagaccacccaggccgtgcccaccatgaccccagagccccccatcaagccccggctgggggagctgactgtgacagatgccaccccagacagcctgagcctgtcctggatggtgcctgagggccagtttgaccacttcctggtgcagtacagaaatggagatggccagcccaaggctgtgcgggtgcccggccatgaagatggagtgaccatcagcggcctggagccagaccacaagtacaagatgaacctgtatggcttccacggcggccagagggtgggccctgtgtctgccatcggcgtgacagaggaggagacccccagccccacagagcccagcacagaggcccctgaggcccctgaggagcccctgctgggggagctgactgtgacaggcagcagcccagacagcctgagcctgtcctggaccatcccccagggccgctttgacagcttcaccgtgcagtacaaggacagagatggccagccccaggtggtgcgggtgcggggggaggagagcgaggtgacagtgggcggcctggagcccggcaggaagtacaagatgcacctgtatggcctgcacgagggccagagggtgggccctgtgtccacagtgggcatcacagcccccctgcccacccccctgcctgtggagccccggctgggggagctggccgtggccgctgtgaccagtgacagcgtgggcctgtcctggacagtggcccagggcccctttgacagcttcctggtgcagtacagagatgcccagggccagccccaggccgtgcctgtgtctggggacctgcgggctgtggccgtgtctggcctggaccctgccaggaagtacaagttcctgctgtttggcctgcagaatggcaagagacatggccctgtgcctgtggaggccaggacagccccagacaccaagcccagcccccggctgggggagctgactgtgacagatgccaccccagacagcgtgggcctgtcctggacagtgcctgagggggagtttgacagctttgtggtgcagtacaaggacaaggatggccgcctgcaggtggtgcctgtggccgccaaccagcgggaggtgacagtgcagggcctggagcccagcaggaagtaccgcttcctgctgtatggcctgagcggcaggaagaggctgggccccatctctgctgacagcaccacagcccccctggagaaggagctgcccccccacctgggggagctgactgtggccgaggagaccagcagcagcctgcggctgtcctggacagtggcccagggcccctttgacagctttgtggtgcagtacagagacacagatggccagcccagggctgtgcctgtggccgctgaccagaggacagtgacagtggaggacctggagcccgggaagaagtacaagttcctgctgtatggcctgctgggcggcaagaggctgggccctgtgtctgccctgggcatgacagcccctgaggaggacaccccagcccctgagctggcccctgaggcccctgagcccccagaggagccccggctgggcgtgctgactgtgacagacaccaccccagacagcatgaggctgtcctggagcgtggcccagggcccctttgacagctttgtggtgcagtatgaggacaccaacggccagccccaggccctgctggtggatggagaccagagcaagatcctgatcagcggcctggagcccagcaccccctaccgcttcctgctgtatggcctgcacgagggcaagaggctgggccccctgtctgctgagggcaccaccggcctggccccagctggccagaccagcgaggagagccggccccggctgagccagctgtctgtgacagatgtgaccaccagcagcctgcggctgaactgggaggcccctcctggggcctttgacagcttcctgctgcgctttggagtgcccagccccagcaccctggagccccacccccggcccctgctgcagcgggagctgatggtgcccggcaccaggcacagcgctgtgctgcgggacctgcggagcggcaccctgtacagcctgaccctgtatggcctgcggggcccccacaaggctgacagcatccagggcacagcccggaccctgagccctgtgctggagagcccccgggacctgcagttcagcgagatccgggagaccagcgccaaggtgaactggatgcccccacccagcagagctgacagcttcaaggtgtcctaccagctggctgatggaggagagccccagagcgtgcaggtggatggccaggcccggacccagaagctgcagggcctcatccctggggcccgctatgaggtgacagtggtgtctgtgcggggctttgaggagagcgagcccctgaccggcttcctgaccaccgtgcctgatggccccacccagctgcgggccctgaacctgacagagggctttgctgtgctgcactggaagccaccccagaaccctgtggacacctatgacatccaggtgacagcccctggggccccacccctgcaggccgagaccccaggcagcgctgtggactaccccctgcatgacctggtgctgcacaccaactacacagccaccgtgcggggcctgcggggccccaacctgaccagccctgccagcatcaccttcaccaccggcctggaggccccccgggacctggaggccaaggaggtgacccccaggacagccctgctgacctggacagagccccctgtgcggcctgctggctacctgctgtccttccacacccctgggggccagacccaggagatcctgctgcccggcggcatcaccagccaccagctgctgggcctcttccccagcaccagctacaatgcccggctgcaggccacctggggccagagcctgctgccccctgtgtccaccagcttcaccactggaggcctgcgcatccccttcccccgggactgtggggaggagatgcagaatggagctggggccagcaggaccagcaccatcttcctgaatggaaaccgggagcggcccctgaatgtgttctgtgacatggagacagatggcggcggctggctggtgttccagaggaggatggatggccagacagacttctggagggactgggaggactatgcccacggctttggaaacatctctggagagttctggctgggcaatgaggccctgcacagcctgacccaggccggggactacagcatgagggtggacctgcgggctggagatgaggccgtgtttgcccagtatgacagcttccacgtggacagcgctgctgagtactaccgcctgcacctggagggctaccatggaacagctggggacagcatgagctaccacagcggcagcgtcttcagcgcccgggaccgggaccccaacagcctgctgatcagctgtgctgtgtcctacagaggagcctggtggtacagaaactgccactacgccaacctgaatggcctgtatggcagcacagtggaccaccagggcgtgtcctggtaccactggaagggctttgagttctctgtgcccttcacagagatgaagctgcggcccaggaacttccgcagccctgctgggggcggctag

SEQ ID NO: 201514 - DNA, 942 bp, Artificial Sequence
  derived and/or modified sequence
acagagcctggaacagaggcccctggccccccagaggagcccctgctgggggagctgactgtgacaggcagcagcccagacagcctgagcctgtcctggacagtgccccagggccgctttgacagcttcaccgtgcagtacaaggacagagatggccggccccaggccgtgcgggtgggcggccaggagagcaaggtgacagtgcggggcctggagcccggcaggaagtacaagatgcacctgtatggcctgcacgagggccggcggctgggccctgtgtctgctgtgggcgtgacagaagatgaagctgagaccacccaggccgtgcccaccatgaccccagagccccccatcaagccccggctgggggagctgaccatgacagatgccaccccagacagcctgagcctgtcctggacagtgcctgagggccagtttgaccacttcctggtgcagtacagaaatggagatggccagcccaaggctgtgcgggtgcccggccatgaagatggagtgaccatcagcggcctggagccagaccacaagtacaagatgaacctgtatggcttccatggaggccagagggtgggccccatcagcgtcatcggcgtgacagctgctgaggaggagacccccagccccacagagctgagcacagaggcccctgagcccccagaggagcccctgctgggggagctgactgtgacaggcagcagcccagacagcctgagcctgtcctggaccatcccccagggccactttgacagcttcaccgtgcagtacaaggacagagatggccggccccaggtgatgagggtgcggggggaggagagcgaggtgacagtgggcggcctggagcccggcaggaagtacaagatgcacctgtatggcctgcacgagggccggcgggtgggccctgtgtccacagtgggcgtgacctag

SEQ ID NO: 201515 - DNA, 942 bp, Artificial Sequence
  derived and/or modified sequence
atgaccccagagccccccatcaagccccggctgggggagctgaccatgacagatgccaccccagacagcctgagcctgtcctggacagtgcctgagggccagtttgaccacttcctggtgcagtacagaaatggagatggccagcccaaggctgtgcgggtgcccggccatgaagatggagtgaccatcagcggcctggagccagaccacaagtacaagatgaacctgtatggcttccacggcggccagagggtgggccccatctctgtgactggagtgacagctgctgaggaggagacccccagccccacagagctgagcacagaggcccctgagcccccagaggagcccctgctgggggagctgactgtgacaggcagcagcccagacagcctgagcctgtcctggaccatcccccagggccactttgacagcttcaccgtgcagtacaaggacagagatggccggccccaggtgatgagggtgcggggggaggagagcgaggtgacagtgggcggcctggagcccggcaggaagtacaagatgcacctgtatggcctgcacgagggcagaagagtgggccctgtgtccacagtgggcgtgacagccccagaagatgaggaggaggagaccccagcccccacagagcccagcacagaggcccctgagcccccagaggagcccctgctgggggagctgactgtgacaggcagcagcccagacagcctgagcctgtcctggaccatcccccagggccgctttgacagcttcaccgtgcagtacaaggacagagatggccggccccaggtggtgcgggtgcggggggaggagagcgaggtgacagtgggcggcctggagcccggctgcaagtacaagatgcacctgtatggcctgcacgagggccagagggtgggccctgtgtctgctgtgggcgtgacctag

SEQ ID NO: 201516 - DNA, 1281 bp, Artificial Sequence
  derived and/or modified sequence
gctggggaggactgtggggaggaggtgcccaccatcgagggcatgaggatgcacctgctggaggagaccaccgtgaggacagagtggaccccagcccctggccctgtggatgcctatgagatccagttcatccccaccacagaaggagccagcccccccttcaccgcccgggtgcccagcagcgccagcgcctatgaccagaggggcctggcccctggccaggagtaccaggtgacagtgcgggccctgcggggcacctcctggggcctgcctgccagcaagaccatcaccaccatgattgatggcccccaggacctgcgggtggtggccgtgacccccaccaccctggagctgggctggctgcggccccaggccgaggtggacagatttgtggtgtcctatgtgtctgctggcaaccagagggtgcggctggaggtgcccccagaggctgatggcaccctgctgacagacctgatgcctggggtggagtatgtggtgacagtgacagctgagcggggccgggctgtgtcctacccagcctctgtgcgggccaacacaggcagcagccccctgggcctgctgggcaccacagatgagcccccaccttctggccccagcaccacccagggcgcccaggcccccctgctgcagcagaggccccaggagctgggggagctgcgggtgctgggcagagatgagaccggccgcctgcgggtggtgtggacagcccagcctgacacctttgcctacttccagctgaggatgagggtgcctgagggccctggggcccacgaggaggtgctgcctggagatgtgcggcaggccctggtgcccccacctcctcctggcaccccctatgagctgagcctgcatggagtgcccccaggcggcaagcccagcgaccccatcatctaccagggcatcatggacaaggatgaggagaagccaggcaagagcagcggccccccccggctgggggagctgactgtgacagacaggaccagtgacagcctgctgctgcgctggacagtgcctgagggggagtttgacagctttgtgatccagtacaaggacagagatggccagccccaggtggtgcctgtggagggcccccagaggtctgctgtgatcaccagcctggaccccggcaggaagtacaagtttgtgctgtatggctttgtgggcaagaagagacatggccccctggtggccgaggccaagatcctgccccagagcgaccccagccctggcaccccaccccacctgggcaacctgtggtag

SEQ ID NO: 201517 - DNA, 2598 bp, Artificial Sequence
  derived and/or modified sequence
ctctatggcctgcggggccggcagagggtgggccctgagagcgtggtggccaagacagccccccaggaggatgtggatgagacccccagccccacagagctgggcacagaggcccctgagagccctgaggagcccctgctgggggagctgactgtgacaggcagcagcccagacagcctgagcctcttctggacagtgccccagggcagctttgacagcttcaccgtgcagtacaaggacagagatggccggcccagggctgtgcgggtgggcggcaaggagagcgaggtgacagtgggcggcctggagcccggccacaagtacaagatgcacctgtatggcctgcacgagggccagagggtgggccctgtgtctgctgtgggcgtgacagccccccagcaggaggagaccccaccagccacagagagccccctggagccccggctgggggagctgactgtgacagatgtgacccccaacagcgtgggcctgtcctggacagtgcctgagggccagtttgacagcttcatcgtgcagtacaaggacaaggatggccagccccaggtggtgcctgtggccgctgaccagcgggaggtgacagtgtacaacctggagcctgagaggaagtacaagatgaacatgtatggcctgcatgatggccagaggatgggccccctgtctgtggtgattgtgacagcccccctgcccccagccccagccacagaggccagcaagccacccctggagccccggctgggggagctgactgtgacagacatcaccccagacagcgtgggcctgtcctggacagtgcctgagggggagtttgacagctttgtggtgcagtacaaggacagagatggccagccccaggtggtgcctgtggccgctgaccagcgggaggtgaccatcccagacctggagcccagcaggaagtacaagttcctgctgtttggcatccaggacggcaagagaagaagccctgtgtctgtggaggccaagacagtggcccggggagatgccagccctggggccccaccccggctgggggagctgtgggtgacagaccccaccccagacagcctgcggctgtcctggacagtgcctgagggccagtttgacagctttgtggtgcagttcaaggacaaggatggcccccaggtggtgcctgtggagggccacgagaggtctgtgacagtgacccccctggatgctggcaggaagtaccgcttcctgctgtatggcctgctgggcaagaagagacatggccccctgacagcagatggcaccacagaggcccggagcgccatggatgacaccggcaccaagaggcctcccaagccccggctgggggaggagctgcaggtgaccaccgtgacccagaacagcgtgggcctgtcctggacagtgcctgagggccagtttgacagctttgtggtgcagtacaaggacagagatggccagccccaggtggtgcctgtggagggcagcctgcgggaggtgtctgtgcccggcctggaccctgcccaccgctacaagctgctgctgtatggcctgcaccacggcaagagggtgggccccatctctgctgtggccatcacagctggccgggaggagacagaaacagagaccacagcccccaccccaccagcccctgagccccacctgggggagctgactgtggaggaggccaccagccacaccctgcacctgtcctggatggtgacagaaggagaatttgacagctttgagatccagtacacagacagagatggccagctgcagatggtgagaattggaggagacagaaatgacatcaccctgagcggcctggagagtgaccaccgctacctggtgaccctgtatggcttcagtgatggcaagcacgtgggccctgtgcacgtggaggccctgactgtgcctgaggaggagaagcccagcgagcccccaacagccaccccagagccccccatcaagccccggctgggggagctgactgtgacagatgccaccccagacagcctgagcctgtcctggacagtgcctgagggccagtttgaccacttcctggtgcagtacagaaatggagatggccagcccaaggctgtgcgggtgcccggccacgaggagggcgtgaccatcagcggcctggagccagaccacaagtacaagatgaacctgtatggcttccatggaggccagaggatgggccctgtgtctgtggtgggcgtgacagctgctgaggaggagacccccagccccacagagcccagcatggaggcccctgagcctgctgaggagcccctgctgggggagctgactgtgacaggcagcagcccagacagcctgagcctgtcctggacagtgccccagggccgctttgacagcttcaccgtgcagtacaaggacagagatggccggccccaggtggtgcgggtgggcggggaggagagcgaggtgacagtgggcggcctggagcccggcaggaagtacaagatgcacctgtatggcctgcacgagggccggcgggtgggccctgtgtctgctgtgggcgtgacagcccctgaggaggagagcccagatgcccccctggcctag

SEQ ID NO: 201518 - DNA, 12669 bp, Artificial Sequence
  derived and/or modified sequence
atgatgcccgcccagtacgccctgaccagcagcctggtgctgctggtgttgctttccaccgcgcgagccgggcccttcagtagcagatcaaacgttaccttaccagcccctcggcctccaccccagcctggcggccataccgtgggagcgggcgtaggaagcccaagctcacagctctacgagcatacagtggagggcggggagaagcaagtggtatttacccacaggatcaacctgcctccttcaaccggatgcggctgtccgcctgggacggaacccccagtcctcgccagtgaggttcaggccctgcgagtgcgtctggagatattggaagagctcgtgaaaggactgaaggagcagtgtacagggggctgttgcccagcaagcgctcaggccggcaccggtcagaccgacgtgcggacactctgcagcctgcatggggtcttcgacctatcccgctgtacctgctcatgcgaacccggctggggaggtccaacgtgtagcgacccaactgatgctgagattcctccgagtagcccccctagtgcaagcgggagctgtcctgacgactgtaacgatcaagggaggtgcgtgcgcggacgatgcgtctgcttcccagggtatacagggccgtcctgcggctggcccagctgtcctggtgactgtcaggggcgcggaagatgtgtgcagggcgtgtgcgtctgcagagccggcttttctggtccagattgttcacagcggagctgccctcgggggtgttctcaacggggcaggtgcgaaggggggagatgtgtttgtgatcccgggtatactggagacgattgtggtatgcgtagttgcccccgtgggtgtagccagcggggtcggtgcgagaacggtaggtgcgtatgcaatcctggctacgcaggcgaagactgtggggttcgctcctgtccacggggttgctcccagagaggtaggtgcaaggacggacgctgcgtttgcgacccgggatataccggcgaggattgtggcacacggagttgcccttgggactgtggggagggggggagatgcgtggacggcaggtgcgtgtgttggcctggttataccggagaggactgtagtaccagaacatgcccacgcgactgtcgcggacgaggacggtgcgaagatggtgagtgtatctgcgatacgggctactccggcgatgattgcggcgtgcgctcatgtcccggcgattgcaatcaacgtggccgctgcgaagacgggcggtgtgtgtgctggcctggctatacagggacagactgcggatccagagcctgtcctcgcgattgcagagggcgcgggcgttgcgagaatggcgtgtgcgtgtgcaacgctggctattctggggaggactgcggggtgcggagctgccctggagattgccggggcaggggacgttgcgaaagcggccggtgcatgtgctggcctggctatactggcagggactgtgggacacgagcctgcccaggggactgcaggggaaggggtcggtgtgttgatgggaggtgcgtgtgtaatccgggctttactggtgaggactgtggctccaggagatgcccgggtgattgcagaggccatggcctatgtgaggacggagtctgtgtgtgcgatgccgggtactctggcgaggactgctcaaccagaagttgtccaggagggtgcagaggacgtggacaatgcctggatggcagatgcgtctgcgaggacgggtactccggagaagattgcggggtgaggcagtgccctaacgactgttcccagcatggagtctgccaagatggcgtgtgtatctgttgggaggggtacgtgagtgaagactgctccatccgcacctgtccatccaattgtcatggacgaggtcgttgcgaggaagggagatgtctgtgtgacccaggttacactggtcctacctgcgccacccgtatgtgtcctgctgattgtcgcggcagaggtcggtgtgtgcaaggggtatgtctgtgccatgtggggtatggtggggaggactgtggtcaggaagaacccccagcttcagcatgcccaggcggatgcggtcccagagaactttgccgcgccggccagtgcgtgtgcgttgaggggtttaggggtcccgactgcgccatccagacatgtccaggagactgcagaggccgcggggagtgccacgacgggtcttgtgtgtgtaaggacgggtacgcaggagaggactgcggagaagaggtgccaactattgagggcatgagaatgcatctcctggaggaaaccacagtaaggacggaatggaccccagctcctggacccgttgacgcatatgagatccagttcattcccaccacggagggagcaagcccaccctttactgcacgggtgccctcttctgcttcagcttacgaccagcggggcctcgctccaggccaggaatatcaggtgacggttagagctctacgagggacatcctggggattgcctgcgtcaaagaccattacaacaatgatcgacggcccccaggatcttcgcgtagttgcagtcaccccaacaaccctcgagctcgggtggcttcgcccacaggccgaagtggatcgattcgtggtgtcatatgtgagcgcaggtaaccagcgggttcgcctggaagtaccgcctgaggccgatggcactctcctaactgatctgatgcccggagttgaatatgtggtcaccgtgacggccgagaggggtcgagccgtttcctatccggcgtcggtcagagctaataccggctctagtccccttggactcctgggcaccacagatgaaccacccccctcaggcccctccacgactcaaggcgcccaggctccactactgcagcagagacctcaggagcttggagaattgcgggtgctcgggcgcgacgagaccgggagactcagagtggtgtggacagcccaaccggacacattcgcttactttcagttgcgcatgcgcgtgcctgaaggccccggcgctcatgaagaagtgctgccaggcgacgtgagacaggccctggtcccaccaccgcctcccggaaccccgtacgaactctccctgcatggcgtgcctcccggtggcaagccatctgaccctataatttatcaaggaattatggacaaggatgaagaaaaaccaggcaagtcctccggaccaccccggctgggcgagctgaccgtgactgaccggacctccgattccctattgctgcggtggactgtgccagagggagagtttgactccttcgtcatacagtataaagatagggacgggcaaccgcaggtcgtcccagtggagggcccccagagatctgctgttatcacctcccttgaccccggacgcaagtacaaatttgtcctgtacggatttgtgggcaagaaaagacatggccccttagttgccgaggctaagattctaccgcagtcagatccgtctcctggtacacctccccacctggggaatctgtgggtgaccgaccctactccagacagccttcacttgtcctggacagtgccagaaggccagttcgacactttcatggttcaataccgggatcgagacggcaggccccaggtggtgccagtggaggggcctgaaaggtctttcgtcgtgtcaagtctcgaccctgatcataaataccgctttacattatttggtatcgcaaataagaagcgctatggcccccttaccgccgacggaactaccgctcctgagaggaaagaagaacccccccgacctgagttcctggagcagccactcctgggggaactaacagtgactggagttacaccggacagcctgagactgtcgtggacagtagctcagggccccttcgactccttcatggtgcagtacaaggacgcccagggccagccacaggctgtcccggtggctggggacgagaacgaggtgactgttccaggcctggaccctgatcggaagtacaaaatgaatctctatgggctgcggggccggcaaagagttgggcccgaaagcgtggtagctaaaacagcccctcaggaggatgtcgatgagacaccgtcccctaccgaattgggcaccgaggcccctgaatccccagaggaaccgctcctgggcgaactgacagtcactgggtcatcgccagacagcctctccctgttttggaccgtgccgcagggcagctttgactcctttacagtccagtacaaggaccgggatggtaggccgcgagctgttcgagtgggcgggaaggagagtgaggtgaccgtgggcgggcttgagccggggcacaagtacaaaatgcatttatatggccttcacgagggacagagggtcgggcccgtttctgctgtaggggtgacagccccacagcaggaagagacccctcctgccactgaatctccattagagcctaggctcggagaactgacggtgacagatgtcacaccaaattctgtcggactcagctggaccgtaccagaggggcagtttgactccttcattgtgcagtacaaggacaaagatggacaaccccaggtggtgcccgtagccgcagaccaacgggaggtgactgtatacaacctcgagccagagcggaaatataagatgaatatgtacggtctgcacgatgggcagcgcatgggccccttgagcgtggtgattgttaccgcaccactacctccggcccccgctaccgaagcatcaaagcctcccctggagccacgcctcggagaactgaccgttacggatatcacacctgacagtgtggggctcagttggaccgtcccagagggggaatttgacagcttcgttgtgcagtataaggacagagacggtcagccacaggtcgtgcctgtggctgccgaccaacgcgaagtaactatcccagatctggagccctctcgcaagtacaagtttctattgttcgggatccaagatggcaaacgacgatcacctgtcagcgtggaagcaaagactgttgcccggggagatgcttcacctggtgcgccccctaggttaggcgaattgtgggtaacggatccaaccccagattccctccggctcagttggactgttcctgaggggcagtttgatagtttcgtggtgcagtttaaagacaaagatgggcctcaagtcgtgcccgtggaaggtcatgaacggtcagttacggtcactcctttggacgctggcaggaagtataggttccttctgtatggtttgctgggtaaaaagcgacatggcccactaaccgccgacggtaccaccgaggctaggtcggccatggacgacacaggcactaagagacccccaaagccaagactcggtgaggaacttcaggtaaccacagtaacccagaattcggttggtctgtcttggactgtgcctgaggggcaatttgattcttttgttgtgcagtacaaggacagagatggacagcctcaagtcgtgccagtggagggctcactgcgcgaggttagtgtgcccggtctcgacccagcgcaccgctataaactcctgctatatggtctgcatcatggaaagagagttggacccatatcggctgtcgccatcacagcaggaagggaggagacagaaaccgagaccactgccccgacccctccggcccccgagccccacttgggtgagctgaccgtggaggaggcgacatcccatacccttcatctgagctggatggtgacagaaggagagtttgacagtttcgagatacaatacacagatagagatgggcagctgcagatggttcggataggtggagaccggaacgacatcactctctccggcctcgagagcgaccatcgttacctcgttaccctctacgggttctcagatggcaagcatgtgggaccagtccacgtcgaagccctaaccgtgccagaggaggaaaagcccagcgaaccaccgaccgccacaccggagcctccaattaagccacgtttgggcgagctgaccgtcacagatgcgactcctgacagtctgtcactctcctggaccgtgcctgagggccagtttgatcacttcctcgtacagtacaggaacggggatgggcaacctaaagcagtgcgcgtgcctggtcacgaggagggggttacaattagcggccttgagcctgatcataagtacaaaatgaacctgtatggatttcatggtgggcagcgcatggggcctgtgagtgttgtgggggtgaccgcggccgaggaggagactccatccccgacggaaccctccatggaagctcccgaaccagccgaagagcccctgctgggcgaactaaccgtgaccggtagcagccccgacagtctctctcttagttggaccgtaccacagggccggttcgatagcttcactgtgcagtacaaagatagagacgggagaccacaggtcgtgcgggtgggcggcgaagagtccgaggtgaccgtgggaggactggagcctggacgtaaatataaaatgcacttgtacggccttcacgaaggcagacgagttggtcccgtgtctgcagtcggagtcaccgcaccagaggaggagagccccgacgcccccctagctaagcttcgactgggacaaatgaccgtgagagacattacctccgattctttgtccctctcatggaccgttcccgaagggcaattcgaccactttctggtccagttcaaaaacggcgacggccagccgaaggcagtccgggtaccgggacatgaagacggcgtgaccattagcggacttgagcctgaccacaaatacaaaatgaatctgtacggtttccacggtggccagcgtgtcggccccgtcagtgctgtgggccttacagcccctggcaaagacgaggagatggcacctgccagcactgagcctccaacgccagagccacctatcaagccacgactagaagaattgacagtcaccgatgctacgccagattcactcagtttaagctggactgtgcccgaggggcaatttgaccactttcttgttcagtacaagaacggtgatggacaaccgaaggcgactagggtgcctggacacgaggacagagttacaattagtggactcgagcccgacaataagtataagatgaacctgtatggtttccatggcggacagcgggtggggccagtaagtgctattggagtgactgcagctgaggaggaaactccatcccctactgaacccagcatggaagctccggagcctcctgaagaacccctcttgggagaactcacggtgactggatccagcccggattcattaagccttagctggactgtgccccagggtaggtttgattcattcactgttcaatataaggacagagacggtcgtccacaggtcgttcgagttgggggcgaggaatcggaggtgactgtgggcgggttagagcctgggcggaaatataaaatgcatttatacgggttgcatgaggggcgtcgggtggggcctgtgagtacggtgggcgtcaccgctcctcaggaggacgtggacgagacaccttctccaaccgagccgggtaccgaggcacccgagccccctgaagagcctctgctgggggaactgactgttacgggctcaagtccagatagcctgagtctcagctggacagtgccacagggaagattcgactccttcacagtgcaatacaaagacagagatggtaggcctcaagctgtgagagtgggtgggcaagagagtaaggtgaccgtcagaggcttggagccgggaaggaagtataagatgcatctgtacgggctacacgaggggagacgattggggccggtgtctgcagtcggcgttacagaggacgaagctgagacgacccaggctgtgccaaccatgactccggaaccacccatcaaaccccgtttgggagagctgaccatgacggacgccacccccgactcgctctccctcagctggactgtcccagaggggcagttcgaccattttctggtacagtaccgtaacggtgatggtcagccaaaggctgtgagggtccctggccatgaggatggggtgaccatttctggtctggagcccgaccacaaatataagatgaacttatacggttttcacggcgggcagcgggtggggccaatttccgtgataggagtcaccgccgcggaggaggaaaccccttcgcccacagagctgagcactgaagccccggaacccccagaggaacccctgctgggggaactgactgtcaccggcagcagtcctgattccctttctttgagttggaccattccccaaggacatttcgattctttcacagtgcagtataaggacagagatggcaggcctcaagtcatgcgcgttcggggagaggagtctgaggttactgtcggtggcctggaacccgggagaaaatacaagatgcacctgtacggcttgcacgaggggagaagggttgggccagtgtctaccgttggcgttacagtgccaacaacaacccctgagccccccaacaagccccggctgggagagctgacagtcaccgatgccacaccagatagtctctccctttcctggatggtgcctgagggacagtttgaccattttctagttcagtacaggaatggagacgggcagccgaaggtggtgagagtacccggccacgaagacggtgttaccatttctggcctcgagcccgatcacaaatacaagatgaacctgtacggcttccacggggggcaacgggtgggccccatctcagtgatcggcgtgaccgcagccgaagaagagacaccagccccgacagagccctcaacagaggcgcctgaaccacccgaagaacccctgctaggggagctgacggtaacgggcagttctcccgacagtttgagtctttcttggaccattccccaggggaggtttgactcatttacagttcagtacaaggatcgagacgggcggcctcaggtggtgagagtcagaggggaggagagtgaggtgacagttggagggctggagcctgggtgcaagtataaaatgcatttgtatggtcttcatgaggggcagcgcgtaggcccagtgtccgccgttggagtgacagtcccgacaatgacgccagagccacccatcaaacccaggctaggcgaattaactgtgaccgatgcaacgcctgactccctgtccttgtcctggatggtccccgagggacagtttgaccactttctggtgcagtatcgcaacggcgacggccaaccaaaggctgtccgcgttcccgggcacgaagacggtgtcactatcagcggccttgagccagaccacaaatacaaaatgaatctgtatggattccacgggggtcaacgggtggggccagtttcagccattggagtgaccgaggaagagacaccttccccgaccgaacccagcaccgaagccccagaggcccctgaggagcctctgctcggagagctgacggtgactggttcgtcccccgactcactgagcctatcatggaccgtgcctcaggggagatttgactcttttacagttcagtacaaggacagagatggacagccgcaagtggtcagagtcaggggagaagagtctgaagttaccgttgggggactggagccagggcgaaagtataaaatgcacctgtacggtctgcacgaggggcaaagggtcggccctgtgtccaccgtgggcattaccgcgccccttccaacccctctgcctgtggagccccggctgggagaattagctgtggccgctgtcacttccgattctgtaggtctctcatggacagttgctcaagggccattcgacagctttctggtgcagtatcgcgatgcccaagggcagcctcaagccgtcccggtgagtggcgatctgcgcgccgtagccgtctcaggcctcgatccagcccgcaagtacaaattcttgcttttcggattacagaacggcaaacgccatgggcccgtgccagtcgaggcccggacagctcctgatactaaaccttctcccagactcggagagctgacggtgactgatgctacacccgatagcgtgggcctctcctggactgtccctgagggagagtttgatagctttgtggtgcagtataaagacaaagacggccgcctgcaggtcgtcccggtggcagccaatcagagagaggtcactgttcaaggattggagccttctcggaaatacagattcttactctacgggctgtctgggcggaaacgcttgggccctatttcagctgacagcaccaccgcccctctggaaaaagagttgcctcctcatcttggagaactgaccgtggcagaggaaacctccagctcactgcgtctcagctggacggtcgcccaggggccattcgactcattcgtggtccagtaccgggatacagatgggcaacctagggccgtccctgttgcggctgaccaaaggactgtaacagtggaggacctggaacctgggaagaaatacaagtttttgctctatggcctgctggggggtaaacggctggggcctgtgtccgcccttggaatgactgcccccgaggaggatacccctgcgcctgagttggcgccagaagctcctgaaccacccgaagagcctaggcttggcgtcttgacagtaacggacaccacgccagactctatgagacttagctggagtgtggctcagggccccttcgatagctttgtcgtgcagtacgaggacacaaacggccagccacaagccctgctggtggatggggatcagagcaagatactgatctccggtctcgaaccatctacgccatataggtttctgttatatggcctgcatgaggggaagaggcttggacccctctccgcggagggaactactggcctcgctccagctggccagacttctgaggaatcccggcctaggctgtcacagttgagcgtgaccgacgtcaccaccagctctctccgcttaaattgggaggcacctccaggagccttcgactcttttctgctgagattcggagtgccttctccaagcacactggagccccaccctcggccgcttctccagcgagaattgatggtgccaggaacaaggcactctgctgtcctgcgagatcttcggtcaggaacgctatactccctgactctgtacggactcagaggcccccacaaggcagacagcatccagggcactgcacggacactttccccggtgctggaaagcccgcgtgatttacagttcagtgaaattagagagacaagcgccaaggtgaactggatgccaccaccaagccgcgcagattcattcaaagtgtcctatcagctggcagatggtggagagccacaaagtgttcaggtcgatgggcaggcgagaacccaaaagctacaagggctgatcccaggcgcccgatacgaagtcaccgttgtctccgtgagggggttcgaagaatccgagccgctcacaggttttctaactactgttccagacggcccgactcagttgagagcactgaatttgaccgagggcttcgcagtgctgcattggaagccaccccagaatcccgtcgatacatacgatgtgcaggtcaccgcccctggtgcgccacctctgcaggcggagactcctgggtccgcagtggactatccactgcacgaccttgtactgcacacgaactacacagcgacggtgagagggctccgcggcccaaacctcacctcacctgccagcataacgtttaccacaggcctcgaagcaccaagagatcttgaggcgaaggaggtaacccccagaactgcactcctcacttggacagagcctcccgttcggcccgccgggtacttgcttagcttccacaccccaggcggacagaatcaggaaattcttttacctggagggattaccagccatcagctgctggggctgttcccaagcacaagctataacgccaggttgcaagctatgtggggccagagcctgctgcccccagtctcgacttcctttaccaccgggggactgcgcatcccctttccccgggattgtggcgaagagatgcagaacggcgctggcgccagtcgaacatccacaatattcctgaacggcaatcgtgaacggcctctgaacgtgttctgtgatatggagaccgacggcggcggatggctggtgtttcagagacggatggacggccagacggatttttggcgcgactgggaggattacgcgcacggttttggtaacatcagtggcgagttctggctcggaaatgaagcccttcactcactgactcaggccggtgactacagtatgcgcgtggacctgcgagctggggacgaggcagtgttcgcacagtacgactctttccacgtggatagcgccgctgagtactaccggcttcacttggagggttatcatgggaccgccggggatagtatgagctatcatagcggcagcgtcttctccgcccgagaccgcgatcccaacagcctgctcatcagttgtgctgtttcttacagaggcgcttggtggtataggaattgtcattatgcgaatttaaacggactgtatgggtctaccgtggatcatcagggtgtgtcttggtaccactggaaggggttcgagttcagtgttccatttacagagatgaaactcagaccaagaaactttcgcagcccagcgggcgggggttag

SEQ ID NO: 201519 - DNA, 6450 bp, Artificial Sequence
  derived and/or modified sequence
tgagccgaggaggagacccccagccccaccgagcccagcatggaggctcccgaaccagccgaggagccgctgcttggggaactgacggtaacgggttcctccccggacagtctgagtctgtcttggaccgtgcctcagggccggtttgacagtttcactgtccaatacaaggacagagacggccgacctcaggttgtgagggtgggcggagaggagtctgaggtaaccgtgggcggcctagaacctgggcgcaagtacaaaatgcatttgtacggattacatgaaggccgcagagttggacctgtgtccgccgtgggcgtcactgcgcctgaggaggagagcccagacgcccccctggcaaagttgagattagggcagatgaccgtgcgagatattaccagcgatagtctaagcctctcttggacggtgcctgagggccaatttgatcactttctcgtgcaatttaaaaacggagatggtcagcctaaagcggtacgggtgcccggtcatgaggacggcgtcaccatctcaggcctcgaacctgaccataagtacaagatgaacctgtacggctttcacggcggccagcgagttggaccggtgtcagcagtgggcttaactgcccccggaaaggacgaggaaatggctcccgccagcacagagccccctacccccgagccacccattaagccaagactggaggagctcactgttaccgacgccacacccgactctctgagcctgtcctggacagtgcctgaggggcagttcgaccacttcctcgtgcagtacaaaaacggagacggccagcctaaagccacgcgggttcccggccatgaagacagagttaccatctcgggattagaacccgataacaaatacaagatgaacctctatgggtttcatggtgggcagcgggtcggaccagtgagcgcaatcggtgtgactgccgccgaagaagaaaccccaagccccacggaaccatccatggaagcaccagaaccaccagaggaacccttgctgggagagctcaccgtaacaggatcttcccccgattccctgtcgcttagttggacagtgccgcaggggaggttcgattcttttaccgtccagtacaaagatagagatggaaggccccaggtggttcgggttggcggagaagagtctgaagtcaccgtcggcggtcttgaaccaggccgtaagtataagatgcacctatatgggcttcatgagggacgaagagtgggcccagtaagtactgtgggagtaaccgccccccaggaagatgtggatgaaactccaagtccaacagagccaggcacagaggctcctgaaccacctgaggaacctctgcttggggagctgactgtgaccggttcatcccctgatagcctttccctgagctggactgtcccccaaggccgcttcgactcctttactgtgcagtataaggatagggatggaaggcctcaggccgtccgcgtaggaggccaagagagtaaggttactgtccgcggtctggagcctggacggaaatacaaaatgcacttatacggcctacacgaggggagaaggctggggccagtaagcgctgtgggcgtgaccgaagacgaagcagagacaacgcaagcggtgcccactatgacccccgaaccaccaataaagcccagactgggcgaactaacaatgacggacgctacccccgacagccttagcctatcctggacagtacccgagggccagttcgaccattttctcgtgcagtaccggaatggggatgggcagccaaaggccgtgcgggtgccagggcacgaggacggagtgactatctcagggctagaaccagaccacaagtacaagatgaacctgtatggattccatggtggccagcgtgtggggccgattagtgtaactggtgtcaccgccgccgaagaggaaacacctagtcccaccgagttgagtacagaagctcccgagccccccgaggagcctcttctaggagaacttactgtgaccggatcctctccagacagcctttccttatcatggactatcccccagggccatttcgatagttttaccgtgcagtataaggaccgcgatgggcgaccccaggtcatgagagtgaggggcgaagaatccgaagtgaccgtgggagggcttgaacctggacgcaagtataagatgcacctgtacggccttcacgaaggccgtagagttggtcccgtaagtaccgtcggcgtgactgtaccgaccactacgccagaaccccctaacaaaccaagactgggggaactgacagtgactgatgcaactccagactcgctgagcttgtcctggatggtgcccgagggacagttcgaccatttcctggtgcagtatcggaatggtgatggccaacccaaagtagtacgggttcctggccacgaggatggagtgaccatctcaggactggaacccgaccacaagtataaaatgaacctgtatggcttccacggggggcagagggtagggccgatctccgtgattggcgttaccgctgctgaggaggaaacgcccgcacctacagagccttctaccgaggcgccagaacctccagaggagccactccttggagaacttaccgtcacaggtagtagcccagactccctgtcacttagctggaccatcccccaggggcgttttgacagcttcacagtgcagtacaaagatcgcgacgggaggccacaagtcgtgcgtgtccgcggagaggagtcggaggtgacagtcgggggtctggagcccggatgtaagtacaagatgcacctatatggactgcacgagggccaacgggttggccccgtgagcgctgttggggtgacggtgcctactatgacccccgaacctcccatcaaacctcgtttgggggagctcactgtgaccgatgcaaccccagattccctgagtctgtcctggatggtgcccgagggccaatttgaccacttcctcgtccagtacaggaacggagacggacagccaaaagcggtccgggtcccaggacacgaggatggcgtcactatctccggactagagcccgatcacaaatataaaatgaatctttacggattccacgggggccagagagttggcccagtgtccgccattggcgttacggaggaagagaccccctctcccactgaaccttcaaccgaagcccccgaggccccagaggagccactcctgggcgagttgacagttacagggagttcccccgactctctctctctgagctggaccgtgcctcagggtagatttgacagcttcaccgtccagtataaagaccgtgacgggcagccacaggtggtgagggtcagaggtgaggaaagtgaagtcactgtgggggggcttgagccaggccggaaatataagatgcatctttatggactccacgagggccagagggtggggccagtctccactgttggcatcaccgcacccctgcccacacctctcccagtggagcctcgcctcggagagttggcagttgccgctgtcacatccgattctgtgggactttcatggaccgtggcccaaggaccatttgactccttcctcgtacaataccgagacgcccagggacagccccaggccgtaccggtgtctggcgatctgcgagcagttgccgtgagtggccttgatcccgcaaggaagtacaagttcctactgttcgggctgcagaacggtaaacggcacgggcccgtgcccgtggaggctcgcaccgcaccagacacgaaaccatctcctaggcttggcgagcttaccgtgactgacgcaacccctgactccgtgggtctgtcctggacagtgccagagggggaatttgatagcttcgttgtgcaatataaggataaggacggccgcctgcaggtcgtacctgtcgccgctaaccagagggaggttactgtccagggactggaacctagccgtaagtatcgattcctgctgtacggcctctccggccggaaacgcctaggaccgatcagtgcagatagcaccactgcccccctcgaaaaagaattacccccccacctaggggagctgaccgtcgctgaggaaacaagttctagcctgcggctgtcttggactgtcgcacagggtcccttcgacagcttcgtcgtgcagtacagggacaccgacgggcagcccagggccgttcccgtggccgctgaccagcgcactgtaactgttgaggatctggagcctggcaagaaatacaaattcctgctgtatggcctactgggcggtaaaagactgggcccggtgtccgctctaggcatgacagcccctgaagaagacaccccagctcctgagctagcacccgaagcgcctgagcctcctgaggagcctcggttaggggttttaaccgtaaccgacacaacccccgactcaatgaggttaagctggagtgtggcccaggggccctttgactcatttgtggtccagtatgaggacaccaatggccagccgcaggcattactcgtggatggggatcagagcaagattctgatcagtggacttgaaccctcaacaccttatcgatttttattgtacggactgcacgaaggaaaacgtctcggcccacttagtgcagagggaacgaccggcctcgctcctgcaggtcagacttccgaggagagccggccacgactgtcacaattgtccgtgactgatgtcaccacctcttcccttaggctcaactgggaagccccacctggggcttttgatagttttctgctccggtttggcgtgccatcaccatccacgttagaaccacacccaagacccctgctccagagagagctgatggttcccggcacaaggcacagcgcagttctgcgcgacctgcggagcgggacactctacagtctgacgctgtatggactccgaggtcctcataaggctgactctatacagggcaccgcccggacactgagtcccgttctggagagcccccgggaccttcagttcagcgaaataagagaaacctcagcgaaggttaactggatgccaccaccaagccgggctgactcgttcaaagtgtcctatcaattggccgacggcggagaaccccagtctgtccaagtggacggtcaagcccgaacccagaagcttcagggtctcatacccggcgctcgctacgaagtgaccgtcgtgtccgtgagggggttcgaggagtctgagccactgaccgggtttttgactactgtaccggatggacctacccagctccgagccctcaacctcacagagggattcgcggtcttgcactggaagcccccccagaaccccgtagatacttacgatatccaggttacggcccctggtgccccgcctctgcaggcagagacacccggctccgctgtggactaccccctgcatgaccttgttctgcatactaattacaccgccaccgtgcggggcctacgaggtccaaacctcacctcccctgcaagcataacgttcaccactggactcgaagctcctcgtgatctggaagcaaaggaggtcacaccccgcacagctctgctgacttggaccgagccacctgtgcggccagctgggtacttgctgtctttccacacaccagggggacagacacaggaaatcctgctgccaggaggtattacatcacaccagctgctcggactctttccgagcacttcctacaatgcccgtctccaggccatgtggggccagagtctgctgcctcccgtgtccacgagcttcaccaccgggggtctgcgtatcccttttcctcgggactgcggcgaggaaatgcagaacggggccggtgcgagtagaacatccactatttttctgaacggcaatcgcgaaagaccactgatcgtattttgtgacatggagaccgatggcgggggctggttagtattccagcggagaatggatgggcagaccgatttctggagagactgggaagattatgcacatggcttcggcaatatcagcggggagttttggttgggcaacgaggcactgcattcacttactcaggccggcgactattctatgagggtcgatctaagagctggcgacgaagccgtgtttgctcagtacgattccttccacgtagacagtgccgctgagtattatcgtctgcacctggaagggtaccatgggaccgcaggggattccatgagttatcatagtggtagtgtgtttagtgctcgtgacagagatccaaattccctgctgatcagctgcgctgtgtcttacaggggggcatggtggtatcgcaactgtcactatgccaacttgaacggcctgtatggatccacagtcgatcaccagggcgtgtcctggtatcattggaagggattcgaattcagcgtgcctttcactgaaatgaagctcagaccccgcaatttccggagccccgctggaggcggttag

SEQ ID NO: 201520 - DNA, 9891 bp, Artificial Sequence
  derived and/or modified sequence
tgaagcagccccctgggcctgctgggcaccaccgacgagccccccccaagtgggccgagtaccacccaaggcgctcaggccccattactgcaacagcggcctcaggagctcggcgaacttagggttctgggaagggatgagaccgggagactacgggttgtctggacagcccagccggatacttttgcctatttccagttacggatgagagtgcccgaaggcccgggcgcacacgaggaagtgctccccggagatgtgcgtcaagctcttgtcccacctccgccaccaggtaccccctatgaattaagtctccatggcgtccctccgggaggaaaaccaagcgaccctattatctatcagggtattatggataaggatgaggaaaagccaggcaagtcttcaggcccccccaggttaggtgaactcaccgtgacagaccggacgtcagactctctcctgctgaggtggaccgtgcccgagggtgaatttgactccttcgttattcaatacaaagaccgggacggccaaccacaggttgtgcccgtcgagggcccccagcgttctgctgtgattacttccctggaccctggacggaagtacaagtttgtgttatacgggttcgtgggcaaaaaacgacatggtccattggttgccgaggctaagatcctcccccagtcggacccttcacccggaacaccacctcacctgggtaatttatgggtgacggaccccactccagactcactgcacctttcctggaccgtgcccgaggggcaatttgacactttcatggttcaataccgtgatcgggatggccgccctcaggttgtccctgtagagggtccggagcgttcctttgtggtaagcagcctggaccctgaccacaagtacaggtttaccctgttcgggatcgcaaataaaaaacgatacgggcccctgactgcagatgggactaccgcccctgagcgaaaggaagagcccccaaggcccgagtttcttgagcagcctcttctgggagagcttacagttacaggcgtgactccagatagcctcagactgtcttggaccgttgcgcaggggccattcgatagtttcatggtccaatataaagatgcccagggtcagccccaagctgtgcccgtggcgggtgatgagaatgaggtgactgtacccgggctagatcccgacaggaagtacaagatgaatctgtacggcctgcggggacgtcagagggtgggccccgaaagtgtggtggccaagacagcccctcaagaggacgtggacgaaacaccgtctccaaccgaactcggcactgaagcgcctgagtcccctgaggagcctctgcttggagaactgactgtgacgggctcttcccctgacagtctctcccttttttggactgttcctcagggaagtttcgatagttttacggtgcaatacaaagatagagacggtcgtccccaggctgtgagggtgggcggcaaggagtccgaggtgaccgttggtggcttagaacccggacataaatacaagatgcacctgtacggcctgcatgaaggccagcgggtaggccccgtctccgcagtgggagttaccgcaccgcagcaggaggagactcccccagctactgagagccctctggagccccgactcggcgagctgaccgtgaccgatgtcaccccgaattccgtggggttgagttggacagtgcctgaggggcagtttgattcctttattgttcagtacaaggacaaggacggtcaaccccaggtggtccctgtggctgctgaccagcgggaagtcaccgtgtacaatctcgagcctgagagaaagtataaaatgaacatgtatggtctccacgacggacagcgaatggggcccctcagtgtggtgatcgtcacagcccccctcccaccggcccctgcaacggaggcctctaagccccctttggaacctagattgggtgaacttacggtaacggatattactcctgactctgtagggctgagctggaccgtgcctgagggagaattcgatagtttcgtggtccaatacaaagaccgagacggtcagcctcaagtcgtgccagtcgctgccgatcagcgcgaggttacaatccctgatctcgagccatcccggaaatataagtttctcctgttcggaatccaggatggaaagcgcaggagtcccgtatctgtggaggcgaaaacagtggctcggggcgacgcatctcccggggctccaccccgattgggagagctttgggtgacagatcctaccccggactctttgcgactctcctggaccgtccctgaggggcagttcgacagtttcgtggtgcagtttaaggacaaagacggtcctcaggtcgtgccggtggaaggccacgaaagatccgtgactgtcactcctctggacgcaggaaggaagtacaggttcctgctgtatggccttttgggcaaaaagagacacggaccactaacggctgatggcactactgaagctcgcagcgcaatggacgatacaggaactaaacggcctcccaaacccagactcggcgaggagctgcaggtaaccacggtcactcagaatagcgttggtttgtcatggaccgtacctgagggacagtttgattcatttgttgtgcagtataaggatcgcgacggacaacctcaggttgtcccagtcgagggcagccttcgcgaggtgtcagtgccgggcctcgaccccgcccacagatataaactgctgctttacgggttacatcacggcaaacgcgtgggtccgatctctgccgtcgcgatcacggccggccgggaagagacagagactgagacgaccgctcctacgccaccagccccggaaccccacctgggggagctgactgtggaggaggccacctctcacactctgcacttgtcttggatggtaactgagggcgagttcgattcattcgagatccagtatactgatagagatgggcagttgcaaatggtgcgaatcggcggtgaccgcaacgatattaccctcagtggactcgagtcagatcacaggtatctcgtcacattgtacggtttctccgatggcaaacatgtcgggccagtgcacgttgaggccctcaccgtccctgaggaggagaaaccgtcagaacctccaaccgctacgcccgaaccccccatcaagccacgattgggagagcttacagtgactgacgccaccccagatagtctctctctctcctggacagtgcccgagggacaatttgatcactttctggtgcaatatcggaatggcgacggacagcccaaagctgtgcgcgttccgggccacgaggagggcgtgactatttccggtttggaacccgaccacaaatataaaatgaatctatacggtttccacggaggacagcggatgggccctgtgagtgtggtgggtgtgaccgcagccgaggaagagacaccttcacctactgaaccttctatggaggctcccgagcccgcggaagagccactactcggagagctgacggtaacaggcagctcgcccgacagcttgagcttgagttggaccgtccctcagggccgcttcgactctttcaccgtgcaatacaaagatagggatggcagacctcaggttgtccgcgtaggcggagaagagagcgaggtcaccgtcgggggcctggaacctggcagaaagtacaaaatgcacttatacgggctgcacgaggggcggcgggtcggaccagtctcggcagtgggagtaacggctcccgaggaggaaagcccagatgcaccacttgcaaaactgcgtctcggccagatgaccgtcagggacatcacttcagatagtctgtccctgtcatggaccgtaccagaagggcaattcgaccatttccttgtccagttcaaaaatggtgacggacaacctaaggccgttcgcgttcccgggcacgaagacggcgtgactatttctggattagagccagaccacaagtataagatgaacctatacggatttcatggcggccagcgggtgggacccgtgtctgccgtcggacttactgcccctggcaaggatgaggaaatggcaccagcttcaaccgagccgcctacccccgagcctccgatcaaacccaggctagaggaactgactgtgacagatgcaacccccgacagtttaagcctgagctggacagtgccagaaggccagtttgatcatttcctggtgcaatacaagaacggagacggccagcccaaagccacaagggtccctgggcatgaagatagagttaccatctccggactggaaccggacaataaatataaaatgaacctgtacggattccacggcggtcagcgggtgggacctgtctctgcaatcggagtgacagcggccgaggaggagacacccagccccaccgagcctagcatggaggcccctgagccaccagaggagcctttactcggagaactgacagtgactggctcatctccggactcactgtctctctcttggacagttccacagggacgcttcgacagcttcactgttcaatataaggatcgcgatggccgcccccaggtggtacgcgttggcggggaagagtcggaagtgaccgtgggcggcctcgagccaggacgtaaatataagatgcacctttatggactccacgagggccgacgggttggccccgttagcaccgtgggggtgaccgcccctcaggaagatgttgacgagacacctagtcccacagagcctgggactgaagcaccaggaccacctgaagaaccattgctgggagagttgaccgtgacgggctcatctcctgactccctcagcctgtcctggactgttccacagggccggtttgatagctttacagttcagtataaagacagggacggccggccccaggctgtgcgggtaggtggccaggagagcaaggttaccgttagggggctggaacccgggagaaagtataagatgcacctgtatggtctccatgaggggagacgactaggacctgtgagcgcagtgggagtgacagaggatgaggccgaaacaacacaggctgtgcccacaatgacccctgagccaccgattaagcccagactgggcgagctcaccatgaccgatgctacccccgacagtttgtctctgagttggaccgtccccgagggccaattcgaccactttctggtgcaatatcggaatggagacgggcaacctaaagcagtgagagttcccggccacgaagacggggtcacaataagtggcctggagccagatcataagtacaagatgaatctgtacggattccacggggggcagagggttggccctattagcgtgatcggcgtaaccgcagccgaagaggagactccttcgcctacagagctaagcacggaagctcccgagcctccagaagagccactgctgggggagcttacagtcacaggttccagtcccgatagccttagcctatcctggacaatccctcagggccactttgattccttcaccgtgcaatacaaggaccgcgacggccggccacaggtgatgcgcgttagaggagaggagtcagaggtcacagtgggcggactggagccaggccgcaaatataagatgcacctttacggactgcatgagggaagaagggtgggacccgtgagcactgttggtgtgactgtccctacaaccactccagaaccgccaaacaagcccaggttaggggaacttaccgtgacggatgccaccccagacagtcttagcctgtcatggatggttcccgaaggccagttcgaccactttctcgttcagtacagaaatggggatgggcaacccaaagtagtgagagtacctggccatgaggacggcgtgacaatttctggcctggaacctgatcacaagtacaaaatgaatttatacggtttccatggcgggcagcgagtcggacctatcagtgtaatcggcgtcacggcagctgaagaggaaaccccagcgcctaccgagccctctaccgaggcccctgagccccccgaagaaccgttgttgggtgaattgacggtaaccggttcctctccagacagcctatccctgtcttggacaatcccccaaggtagatttgacagcttcacagtacagtacaaagatagggatggcagaccccaggtggtgagagtgcggggtgaggaatctgaagtcaccgtggggggcctggaacccgggtgcaagtataagatgcatctctatggattgcatgaggggcaacgagtcggcccagttagcgccgtgggcgtcacagtgcctaccatgacccccgagccgcccatcaagcctaggttgggggagctgactgtgactgatgcaactccagattccctgagcctaagctggatggtccctgaggggcagtttgaccatttcttagtccagtacagaaatggggacgggcagccaaaagcagtgagagtgccaggtcacgaggatggcgtgacgatttccggtctggaaccggatcacaagtacaaaatgaatctctacggattccacggcggacaacgggtcgggcctgtgtccgccataggggtgacagaagaagaaacgccctccccgactgagccatctaccgaagcgcccgaagcgccagaagaaccactactgggggagttgaccgtgactggtagctccccggatagtctctcactgagttggaccgtgcctcaaggccggtttgatagttttactgtgcagtacaaggatcgggacgggcagcctcaggttgtgcgcgtcagagtggaggagtctgaggtcaccgtgggaggcctggaaccaggccgaaagtataaaatgcacctgtacggactgcatgagggccagcgcgtgggccctgttagcaccgtcggcatcaccgctccactgcctacaccgctccccgtcgagccacggttaggtgagttggcagtcgctgctgtaacttcggactcagtgggactgtcttggacggttgcccagggccccttcgacagtttcctggtgcagtacagggacgcacagggtcagccccaagcagtcccagtcagcggcgacctgcgcgcggtggctgtgtcaggtctagacccggctcgcaaatacaaatttctgctctttggactgcaaaatggaaagaggcatggaccagtgcccgtggaagcgaggaccgcaccagatacaaaacctagccctaggctgggcgagctgaccgtgacggacgccacccccgatagtgtgggcctgtcttggacagtgccagaaggcgaattcgactcatttgtggttcaatacaaggataaagacgggcgtctgcaggttgtgcccgtggccgccaaccaacgagaagtcacggtccagggattagagccaagcaggaaatatagattcctgctctacggtctctccggtaggaagcgcctgggtcctattagtgccgatagcacaaccgccccacttgagaaagagcttcctccacacctgggagaactgacggttgcagaggagacaagtagcagtcttagactttcctggactgtggctcagggcccttttgatagttttgtagtccagtaccgcgataccgatggccagccgcgcgccgtgcccgtggccgcggatcagagaactgttaccgtggaggatctcgagcccgggaagaaatataagttcctgctgtacgggctacttgggggcaagcgcttgggccctgtgtccgccctcggtatgacggcacccgaggaagacacaccggccccagagttggcacccgaggcccccgagcctccagaggagccccgattaggcgtcctcacggttaccgacacaactccagactcgatgcgcctgtcttggtctgttgcacaggggccctttgattcgtttgttgtccaatacgaggacaccaatgggcagccccaggcactgctggtggatggagatcagagcaagattctgatcagcggtctggaaccctccacaccgtataggttcctgttatatgggctacacgaagggaagcggttgggccccctctctgccgaaggcacaacaggactggcaccggccggacagaccagcgaagagagtcggcccagactgtctcagctgtccgtgaccgatgtcaccactagttcactgagactgaactgggaggcccctccaggggccttcgactctttcttactgcgttttggggttccatctccatccactctcgaacctcaccccaggccattgctgcagagggagctgatggtgccaggcacccgccatagcgcagtgctcagggacctgagatccggcactctgtactctctgactctgtacgggctgcgcgggcctcacaaggccgactctatccaggggacagctcgcactttgagcccggttctggagtctccacgagatcttcagttctctgagatcagggaaacaagtgcaaaagtgaattggatgcctcccccgagcagggctgactctttcaaggtcagctatcagctggctgacgggggtgaacctcagtccgtgcaggtggacggacaagccagaacacaaaagctccaggggcttatccctggggcgcggtacgaagtaaccgttgtctcagtgcggggttttgaagaatcggaacccctcaccggcttcttaaccacggtccctgatggacccacccagttgagagccttgaacctcacggaaggatttgccgtgctccactggaagcccccacaaaaccccgtggacacgtacgatgtgcaggtcaccgctccaggcgcgccccctctgcaggccgaaacacctggcagtgcagtcgattaccccctgcacgacctcgtgttacatacaaactatacggccactgtgaggggcctgcggggccccaacttgaccagtccggcctcaatcactttcacaacaggactcgaagctccaagggacttagaggcaaaagaagttacacctagaacggcattgctgacgtggaccgagccccctgtgaggccagctggttatcttctctccttccatacccctggaggacagaatcaagagattctactacccggtggaattacctcgcaccagcttttgggcctatttccgagcacgtcttacaatgcaagactacaggccatgtgggggcagtctctcctgcctcccgtgagtacctccttcaccaccggcggcttgcgcatcccctttccacgtgactgtggggaggagatgcagaatggcgcaggcgcctcccggacatcaaccatttttctgaatggaaatagagagcgacctctgaatgtgttctgtgatatggagacagacggcgggggatggttggtgttccagagaaggatggacggccagactgacttttggagagactgggaggattacgcccatgggttcggcaatatctccggtgaattctggctggggaacgaggctctgcattcactgacccaagctggcgattatagtatgcgcgtggacttgcgagccggggacgaggccgtgttcgctcaatacgacagttttcacgttgacagcgcggccgagtactaccgtttgcatctggagggctatcacggtaccgcaggcgattcgatgtcttatcatagtgggtctgtgttcagcgcccgcgacagagatcccaacagcctacttatatcatgtgccgtttcatatcggggggcctggtggtataggaattgtcactatgctaatttgaatggcttgtacggaagcactgttgaccatcagggcgtgtcttggtatcactggaagggattcgagttctccgtgccctttactgagatgaagctgcggccacgaaattttaggtctccagccggaggcggatag

SEQ ID NO: 201521 - DNA, 12669 bp, Artificial Sequence
  derived and/or modified sequence
atgatgcccgcccagtacgccctgaccagcagcctggtgctgctggtgttgctgtccacagctcgggccggccccttctcctccaggtccaacgtgactctcccagcccctaggccgcccccgcaacccggtgggcacacagtcggggcaggcgtaggttctccatcgtcgcagctgtacgaacacaccgtggagggcggcgagaagcaggtggtgttcacccaccgcattaaccttcccccctctacaggatgtgggtgtcctcctggcaccgaacccccggtgcttgcctctgaagtacaagcacttagggtgcgactcgagattctggaagagctggtaaagggactcaaggaacagtgcaccggcggctgctgtccagcctcggctcaggcaggaacaggccagactgacgtcagaacactgtgctctcttcacggcgtgttcgacttatcgcgttgtacctgctcttgcgagccagggtggggcgggccaacatgttctgatcccaccgacgctgagatcccacctagttccccaccttctgcatctggctcgtgccccgacgactgcaacgaccagggccgatgcgttaggggaagatgtgtgtgttttcctggctatacaggtcccagctgcgggtggccctcgtgccctggcgactgccaaggccgcggtcgttgtgttcagggcgtgtgcgtttgcagagccgggttttccggacccgactgttcccagcgatcttgtccacgggggtgttctcagagagggaggtgtgagggggggcgctgcgtgtgcgacccgggatacaccggagatgactgtggcatgcgttcttgccctaggggttgctcacagcgcggaaggtgcgagaacggtcgctgcgtgtgcaaccccggttacaccggagaggactgcggagtccggtcttgcccgcgcggttgctctcagcgagggaggtgcaaggatggtcgatgtgtttgcgacccaggatataccggggaggactgcgggactcggtcttgtccctgggactgcggggagggcggccgctgtgtcgacggcaggtgtgtgtgttggcctggatatacaggggaggattgtagtactagaacctgtccacgggactgtagggggagaggccggtgtgaagacggcgaatgtatctgcgatacaggctactcaggcgacgattgtggtgttcgctcttgccccggcgattgcaaccaacgggggcgatgtgaagatggacgttgcgtatgctggcccgggtacaccgggactgattgtgggtctcgggcctgtccgagggactgtagaggccgaggccgttgcgagaacggcgtttgcgtgtgtaatgccggttactcgggggaggattgcggcgttagaagctgcccgggggactgtaggggacgggggagatgtgagtccggtcggtgtatgtgttggcctggctataccggtcgagattgtggcaccagggcgtgtcccggagattgccgtgggcgcggacgatgcgtagacggacggtgtgtgtgcaatcctggatttactggtgaagactgtgggtcgagaagatgccccggcgactgcagaggccacggcctgtgcgaggacggtgtttgcgtctgtgatgccggttattcgggcgaagattgctcaacaagaagttgcccaggtgggtgcaggggtcgcgggcaatgtctggatggccggtgcgtgtgcgaagacggctacagtggagaagactgcggagtgcggcagtgccctaacgactgcagccaacacggcgtgtgtcaagacggcgtatgcatatgctgggagggctacgtgtccgaagactgtagcatcaggacttgtccgagtaactgtcacggtaggggcaggtgtgaggagggacgctgcttatgtgaccccggctatactggacccacttgcgcaaccagaatgtgccccgccgactgtaggggcaggggccgctgcgtgcaaggagtgtgcctgtgccacgtgggatacggcggcgaagactgcggacaagaggaaccaccggcgtccgcatgccccggcggctgcggcccccgcgagctctgcagggctggccagtgcgtctgcgttgaaggttttaggggacctgattgcgcaattcagacctgccctggggactgccgcgggagaggcgagtgccatgatggaagttgcgtttgtaaagacggctatgccggagaggattgcggtgaggaagtgccaaccatagaagggatgagaatgcacctcctggaagaaactactgtccgaaccgaatggacccctgcgcctggacctgtagatgcatacgagatccagtttatccccaccacggaaggcgcctccccaccgtttactgctcgcgttccctcctcagctagcgcctacgatcaacgtgggctagcgcccggacaggagtatcaggttacagtacgggcactccgtggcacctcttggggtttgccagcaagtaaaacaataacaacaatgattgatggaccacaggacctcagggtcgttgcagtgacacctaccacgcttgagctgggctggctgagacctcaggcagaagtggataggttcgtggtgtcatatgtctcagcaggcaatcagcgtgtccgactggaagttccacccgaggcagatggcactttattaaccgatttgatgcccggtgtagagtatgtggtgaccgtgactgccgaaagaggccgggcggtctcctatccagccagtgtgagagcaaacaccgggagttcacccctggggctactggggacaacagacgagcccccaccgtctggcccttcaaccacccagggcgcgcaggctcctctgcttcaacagcggccacaagagctgggagagttacgggtcctgggtagggacgagaccggccgcctgcgagtggtttggacagctcagcccgacactttcgcatactttcaattaaggatgcgtgtccccgaagggcccggtgcccacgaagaggtgctccccggggacgtaagacaggccctggttccaccacctccgcctggcaccccttatgaactgtcactccacggcgttccacccggcgggaagccgtctgatcctattatttaccaggggattatggataaggatgaggaaaaaccaggcaaatcgtcaggcccaccccggttaggggaattgacagtgactgaccgtaccagtgacagcctccttctgcgctggactgttcccgaaggagagtttgacagctttgtcatacagtataaagacagggacgggcagccacaagtcgtacccgtcgagggtccacagaggtcagcagttattacgtctctcgaccctggaagaaaatataagtttgtcctatacggcttcgtggggaagaagcgccatggccctcttgtggcagaggccaaaattctgcctcagtcagacccgtctcccggtacacccccccgtctcggtaacctatgggtcaccgatccaacccctgatagcctccacctctcctggaccgttccagagggccaatttgacacatttatggttcagtacagggaccgcgatggtagaccacaggtggtcccagttgagggtcccgagagatcctttgttgtttctagtctagatcctgaccacaaatacaggtttactctctttggaatcgccaataaaaagcgctacggtcccctgaccgccgacggcactactgctcccgagcgaaaagaggagccaccaaggcccgagtttctggagcagcccttactgggcgaactgacagtcacaggtgtgactcctgattctctgaggctgtcctggacagtcgctcagggccctttcgattcttttatggttcagtataaagatgctcaaggccagcctcaggccgtccctgtagccggtgacgaaaacgaggttaccgtgccgggactggatccggatcgcaaatacaagatgaacctctatggcctgcggggcagacagcgggtagggccagaaagtgtggttgctaaaactgcccctcaggaagacgtcgacgaaacccccagccctacagagctcggaaccgaggctcccgagtccccagaggaaccactgctgggagaactgacagtgactgggtcttccccagacagcctttccctcttttggactgtgcctcagggctccttcgacagctttacggtgcaatataaggacagagacggtcggcccagagccgtgcgcgtcgggggaaaggagtctgaggtgaccgtaggggggctcgaacccgggcataaatataaaatgcatctgtacggactgcacgaggggcagagggtcgggccagtgtctgctgtcggagtcaccgccccacagcaggaggaaacacccccggcaaccgagagcccccttgaacctcggctcggagaactgacggttacagacgtgactcctaattctgtgggacttagctggaccgtgcccgaaggccaatttgactccttcattgtacagtacaaggacaaagacggccagccacaggtggtcccggttgccgctgaccaaagagaggtgacagtatataacctcgaacctgaaagaaagtataaaatgaatatgtacggactccatgacggccagaggatgggaccccttagtgttgtgattgtcacggcaccccttccacctgcccccgctactgaagctagtaagccgccattagaaccaagacttggggaactgacagtgacagacatcactcccgatagtgtggggttgagttggaccgtgcctgagggcgaatttgactcttttgttgtccagtataaggatcgcgatgggcaaccccaagtggtgccggtagccgcggatcaaagagaggtgaccatccccgatcttgagccgtcgcgaaagtacaaattcctgctgtttggaatacaagatggcaaacggcgctctcccgtgtcagtggaggcgaagaccgtggcaagaggggatgcctctcccggtgcaccaccccgtctaggggagttgtgggtcaccgatccaaccccggacagtctccgcttatcttggactgtcccagaaggacagttcgattcgtttgtggtgcagtttaaagataaagacggtccccaggtcgtcccggtcgaagggcacgagcgctccgtcacggtgacgccactggacgcgggacggaagtacagatttcttctgtacggattgctgggcaagaagcggcatggccccttaaccgctgacggaaccaccgaggcccggagcgcaatggatgacaccggtacgaagaggcctcctaagcctaggctcggcgaagagcttcaggtgaccaccgtgacacaaaatagcgtcggcctaagctggacagtccctgagggccagttcgatagcttcgtggtgcagtacaaggaccgggacggccagccgcaggttgtcccggtggagggtagcctgcgcgaggtgtccgtccccggactggaccctgctcatcgttataaactgcttttgtatggcctgcaccatgggaagagagtgggaccaatatcagccgtggcgatcacggccggccgggaagaaacagaaaccgaaaccactgcacccaccccaccagccccggagcctcatctgggggagttgactgtggaagaggcaacttcccacaccctgcatttgtcctggatggtgaccgagggagaattcgactctttcgagatccagtatacagaccgagatgggcaactgcagatggtgcgcatcgggggcgatcgcaatgatattaccttgtctggcttggaatctgaccacaggtatctggtcacactgtatggatttagtgatggtaagcatgtgggccccgtccatgtggaagcactcacggtgccagaagaagaaaagccttcagagcccccaacagcaaccccagagccgcccatcaaaccgcgcctcggggagctcactgtgacagatgcaactccagacagcctctctctgagttggacagtccccgaaggccaattcgatcattttctggtgcaatatcgcaacggtgacgggcagcctaaggccgtccgggttcccggccatgaggagggagttaccatatcaggcctagagcccgaccataagtataaaatgaatctctatggcttccatggtggacagagaatggggcctgtctccgttgtaggggtgacagcggctgaggaagaaactccctctccaactgagcccagtatggaggccccggagcctgccgaggagccactgttgggagagttgacagtcaccggatcatctcctgactccctctccctctcttggaccgtgcctcagggcaggttcgacagtttcacggtgcagtataaggaccgagacggccgacctcaggtagtaagggtggggggagaggagtccgaagtcactgtaggtggattagagccaggccgcaagtataaaatgcatttgtacggtctccacgaggggcgcagagttgggccagttagtgcagtcggtgtgactgcccctgaagaggagtccccggacgcacccttggcaaagctgcgactgggacagatgacagttagagatataacatctgactccttgtcactgtcctggaccgtgcccgaaggccagttcgaccactttctggttcaatttaaaaacggggacggacagcctaaggcagtcagggtgcctggccatgaagacggcgtaaccatatcagggctggagccagaccataaatataagatgaatttgtacggctttcacggcgggcagcgggttggccccgtgagcgctgttggtttaaccgccccaggcaaggacgaagaaatggctccagcctccactgagccacctacccccgagccgccaatcaaaccaaggctggaggagctgacagttacagacgctacacctgattccttaagcctgagctggacggtgccagagggccagttcgatcattttctggttcagtacaaaaacggtgacggccagccaaaggcaacgagagtaccggggcacgaggatagagtaaccatttctggtttggaaccagacaacaaatataagatgaacctttacggcttccacggcggacagagagtgggccctgtcagtgctattggcgtgactgcagcagaagaagagaccccaagtccgacggagccttccatggaggcccctgagcccccagaggagcccctcttgggagagttgaccgtgactggttcaagccctgactcactgagcctctcatggaccgtaccacagggaagattcgattccttcaccgttcagtacaaagaccgcgatggacgcccccaggtcgtacgggtgggaggcgaggagtcggaggtcaccgtcggggggttggagccggggcgaaagtacaagatgcatctctacggcctgcacgagggtagaagggtcgggcccgtgagcactgtaggggtcactgctcctcaggaagacgtggacgagacacccagtcctacagagcctggtactgaggccccagaacccccagaggaaccccttctgggggaactcaccgtcacaggctcaagccccgatagtctgtcccttagttggactgttccccaggggagattcgacagctttacggtgcagtacaaagatcgggacggccggcctcaagccgtcagagtcggagggcaagagtcaaaagtcaccgtgcgcggtctggagccgggaagaaagtacaaaatgcacctgtatgggctgcatgagggtcgcaggcttgggccagtgtcagccgtgggcgtaaccgaggacgaagctgaaacgacacaagcagtgcctactatgacaccagaaccccccatcaaacctagactgggggagttaaccatgactgatgccaccccagactctctgtcgctgtcctggacagtgcccgaaggacaattcgaccacttcctggtccagtatagaaatggagatggacagcccaaggcggtgcgcgtgcccgggcacgaggatggggtcacaatttcgggactagaacctgaccacaagtataaaatgaatctgtacgggtttcatggtggccagcgggtcggtcccatttctgtgatcggggtaactgctgcagaagaagagacgccatcaccaaccgagctgagcacagaggcgcctgagcccccagaggagcctttactcggggaactgactgtgactggctcttcacctgactctctgtccctcagctggaccatccctcaaggccatttcgattcttttaccgtgcaatataaggaccgggatggacgaccacaggttatgcgggtgagaggtgaggaatccgaagtaacagttggggggctagagccagggagaaagtataaaatgcatttatacggcttgcatgaaggtcgaagagtgggacccgtcagtacggtgggggtgactgttccaactactaccccagagccacctaataaacccaggctgggggagttaactgtaaccgacgcaacacctgatagtttgtccttgtcctggatggtcccagaagggcagtttgaccactttctggtgcagtaccgaaatggagacgggcaacccaaggtagtgagggtgcccggccacgaagacggagttaccattagtggcctcgaacctgatcataagtataagatgaatctctatggcttccatgggggtcagcgagtagggcccatttcagtgatcggagtcacggcagccgaggaggagacccccgctccgaccgagcccagcaccgaggctccagagcccccagaagagccactactcggtgagctaaccgtgaccggcagctctcctgattcactgtcgctgagttggacgattccccaggggagattcgactcatttacggtccagtataaagacagggacgggaggccccaggttgtgagagtgcgtggggaagaatccgaggttactgtaggcggcctcgagcctggatgcaagtacaagatgcacctgtacggacttcacgaaggtcagagggtgggacctgtgtctgctgtcggcgtgactgtgcccacaatgaccccagaaccaccaattaagccgcgtttgggcgaattgaccgtgaccgacgccacaccggacagtctgtcactgtcatggatggtgcctgagggccagttcgatcacttcctggttcagtataggaacggcgatggccagcccaaggccgtacgtgtccccggacatgaagacggtgtgaccatttcaggtcttgaacctgaccacaagtacaaaatgaatctgtatggtttccacggtggtcagcgcgtgggtccagtcagtgcaatcggagttaccgaggaagagacccccagcccaacggaaccttctaccgaagctcccgaggcccccgaagagccgctgctgggagaactgaccgtcaccgggagctcccccgacagtctgtccttgtcttggactgtacctcagggtcgattcgattcctttaccgtgcaatacaaagacagggacggacagccacaggtcgtcagggtgaggggggaagagagtgaagtgaccgtcggcgggctggaacccggaaggaagtacaagatgcatctctatggactgcatgaaggacagagggtgggcccagtttcgactgtcggcatcactgcccctttgccaaccccactgccagtggagccgcggttgggtgagctggctgttgctgccgtcacatctgacagcgttggactatcttggacagtggcccagggtcccttcgattcatttcttgtgcagtacagggacgcccaaggacagcctcaagcggtgcctgtgagtggggatttaagggccgtggctgtctctggactcgacccggctagaaagtacaagtttctgcttttcggcctgcagaatggcaaaaggcatggtcctgtacccgtggaggccaggaccgctcccgataccaaacccagcccccggctcggtgagctgacagtgacggacgccacccctgacagcgtgggcttatcctggactgtccctgaaggggagttcgactctttcgttgtacagtataaggataaagacggtcgcttgcaagttgtgccagtggccgccaaccaacgcgaggtgactgtccaggggctggagcctagtcggaagtaccgcttccttctgtatggactgagcggacgaaaacggctcggccccatttctgcagactccaccacggcacccctcgagaaggaactccccccccatctgggggaactcaccgtcgctgaggagacttctagcagtctgcggctgagctggactgtagctcaaggccctttcgattcattcgtggtccaatatagggacactgatggtcagccacgggctgtcccagtggccgctgatcagagaactgtaaccgtggaggacctggagcctggaaagaagtacaaattcctcctgtatgggctccttgggggcaaacgattagggcctgtgtctgctctcggaatgacagcccctgaagaagatacacccgccccagagctcgcgcccgaggcccccgagccacctgaggaaccacggctaggggtgttaaccgtgaccgacacaacccctgactcaatgcggctgagctggagtgtagcgcagggcccctttgactcgtttgtggttcagtatgaagataccaatggtcagccacaggcattactggtcgacggagatcagtctaaaatattgatctccggcctagagcctagcaccccctaccggtttctgctgtacggtctgcacgaaggaaaacgcttgggaccccttagtgcggagggtactactggactggctccggcagggcaaaccagtgaagagagcagacccagactgtctcaactctcagtgactgatgtgaccactagtagcctgagattgaactgggaggcaccgcctggcgctttcgactctttcctgcttcggttcggcgttccttcgccttccacactggagccccacccgaggcctcttctgcagcgggagcttatggtgccagggactaggcactctgccgttctgcgcgatctccggagtggaacattgtacagcctcactctctatggcttgcggggacctcataaagcagactcaatacagggcactgcaagaacgctttcaccagtgctggagtctccaagagacctgcagttcagtgagatcagggaaacgtccgccaaggtaaattggatgccgcccccaagtcgggctgatagttttaaagtctcttaccagctggcagacggcggagagcctcagagtgtgcaggtcgatggccaagcgagaactcagaagcttcaggggttgattcccggtgctcgatacgaagtgactgtggtgagtgttagaggattcgaggagtctgagcctctcacagggttccttaccacagtgccagatggacccacgcagctgcgggcactcaatctgactgagggcttcgccgtgttacattggaaacctcctcagaacccagtcgatacctacgacatccaggtgaccgctcccggcgctccacccctgcaggctgagacgcccgggtctgcagtggactaccccttgcacgatcttgtactgcacacaaattacaccgccacggtgagagggttgagaggcccaaacttaacaagccctgcctcaatcacgtttactacgggtctggaagcaccccgggatcttgaagccaaagaagtgaccccacgcacagcacttttgacgtggaccgagccccctgtgcggccagcaggctacctgctaagtttccatactcccggggggcaaacacaggagatcttgctgcccggcggaatcacatcccaccagctgttggggttgtttccatcgacaagctataacgctcgactccaggcaatgtggggacaaagtctgttacctccagtctccaccagctttactacagggggtctccggatccctttcccccgggactgtggtgaggagatgcagaacggcgctggcgctagccgcacctccaccatcttcctcaacggaaatcgagaacggccattaattgtgttttgtgacatggaaactgatggagggggttggttggtgttccagcgccgaatggatggccagacggatttttggagagactgggaagattacgcccacggcttcggtaacatcagcggcgaattttggctggggaacgaggccctccatagtctgacacaagccggggactactccatgcgcgtcgaccttagggctggcgacgaggcagttttcgcccagtacgacagttttcatgttgattcagctgccgagtattaccggttgcacctggaaggctatcatgggactgccggtgatagtatgtcctatcattcgggctcagtgttctctgctagggaccgtgaccctaattcgctgctgattagctgcgccgtgtcttaccgtggggcctggtggtatcggaattgtcattatgccaacttgaacggcctctatggatctaccgtcgatcaccagggcgtgtcatggtaccattggaagggattcgagttttctgtaccttttacagaaatgaagctgcggccaaggaattttcggtccccagctggtggcggatag

SEQ ID NO: 201522 - DNA, 1905 bp, Artificial Sequence
  derived and/or modified sequence
tgaagcagccccctgggcctgctgggcaccaccgacgagcccccccctagtggcccctccacaacacagggggcccaggcccctcttttgcagcagaggcctcaagagctcggcgaactgagagttcttggaagggatgagaccggcaggttgcgcgttgtttggacagcccagcccgatacgttcgcctattttcaactaagaatgagggtgcctgaaggcccaggagcccatgaagaagtcctccctggggacgttcgccaggcccttgttccacccccgccccctgggaccccttacgagttaagcctgcatggtgtcccgccaggagggaagccctcagaccctataatttaccaaggcatcatggacaaagatgaagaaaaacctggtaagagctcggggcctccacggctgggggagctgacagtcacagatcggactagtgattccctcctcctgagatggactgtgccagagggcgagttcgactcctttgtgattcagtacaaagatagagacggtcagccacaggtagtaccagtcgagggtccccaacgatcagccgtaataactagcctcgacccagggagaaagtacaagtttgtactttatggattcgttggtaagaaacgccatgggcctctggttgcggaagctaaaattctcccccagagtgacccctccccaggaacaccacctcggctcgggaacctgtgggtgacagatcccaccccagattccctccatctcagttggacagtccctgaaggccagtttgacaccttcatggtccaatatcgggaccgggatggaagacctcaggtagtgccagtcgagggccccgagcgttcattcgtggtcagcagcctggatcccgaccacaaataccgctttacactatttggtatcgctaacaaaaagcggtatgggccactgaccgcggacggaacgaccgctcccgagcgcaaagaggaaccaccccgccccgaatttttggagcaacctctgcttggtgaactgaccgtgaccggcgtgaccccagactcattgcgccttagctggactgtagcccagggcccattcgactccttcatggtgcagtacaaggatgcacaaggacagccacaggctgtccccgtagctggtgatgaaaacgaggtgacagtgccgggcttggatcctgacaggaaatacaaaatgaatctgtacgggcttcgggggcggcagcgagtaggccctgagtctgtggtagccaagactgcaccgcaagaggacgttgatgagacaccctctcctacggagctgggaacggaagcaccggaatcacctgaggaaccgctcctgggggagcttacagtgaccggatcttcccctgattccctaagcctgttttggacagtgccccagggcagcttcgacagcttcactgtgcagtataaggacagggatgggcgcccccgtgctgtgcgagtcggcggcaaagagtcagaagtgaccgtagggggattggaaccaggccacaagtataaaatgcacctctatgggctgcacgagggccagcgcgtgggccccgttagtgccgtgggtgtaacggccccacagcaggaggagacaccacctgcaactgagtctccactggagcctcgacttggggagctgaccgtcaccgatgtgactcctaactccgtggggctttcctggaccgttcccgagggccaatttgattcttttattgtgcagtacaaagataaagatggacaaccacaggtcgtgcctgtagccgcagatcaacgagaagtgaccgtgtataaccttgagccagagcgcaagtacaagatgaacatgtacggcttgcacgatgggcagaggatgggcccactgtcggtcgtgatcgtcacttag

SEQ ID NO: 201523 - DNA, 12669 bp, Artificial Sequence
  derived and/or modified sequence
atgatgcccgcccagtacgccctgaccagcagcctggtgctgctggtactgctatccacggcacgtgctggcccgttcagttcgcgttcaaacgttacactccctgccccacggcctccacctcagcccggtggccatacggttggagcaggtgtaggctcaccatcaagccagctctacgagcatacagttgaagggggagagaagcaagttgtgtttacccaccgaatcaacctgccgccaagcaccggctgcggctgtcctcccggcactgagcctcccgttctggcaagcgaggtccaggccctgagagtgcgccttgaaattctggaggaactggttaaagggctaaaggagcagtgtactggtgggtgttgtccagcctccgctcaagctgggaccggccaaaccgatgtaaggacattatgctctctgcacggggtgtttgacctatcacgttgtacttgcagctgtgaacccggctggggcggaccaacatgcagcgatccaaccgatgctgaaatcccccccagctccccgccgtcagcctccgggtcatgtcctgatgactgcaatgatcaagggcgctgcgtcagaggtcgatgtgtttgctttccgggttatacgggcccctcttgcggatggccgagctgccccggggactgtcagggtagggggcgttgcgtgcagggcgtctgcgtgtgccgtgctggcttcagcggacctgattgctcgcagcgctcttgccctcgggggtgctcccagagaggccggtgcgaaggtgggcggtgcgtatgtgaccctggctatacgggtgacgattgcggaatgcggagttgtccccggggctgttcccagcggggtagatgtgagaatgggcgctgtgtctgtaatccaggctacacgggagaggactgcggcgttaggtcatgcccccgggggtgttcgcagcgagggcggtgtaaagatggacggtgcgtgtgtgacccggggtatactggcgaagactgtggaacccggagttgcccctgggactgtggcgagggagggcggtgcgtggacggccgatgcgtctgctggccgggatacactggagaagactgctcgacgagaacttgcccccgggattgcagaggaagggggagatgcgaagatggcgaatgtatttgtgacacaggttattcaggagacgattgtggcgtccgcagttgtcctggggattgtaaccagcggggcagatgcgaggacggcaggtgcgtgtgctggcccggctatacaggcacagattgcggcagtcgagcttgtccccgcgactgcagaggtcgcggaagatgtgagaacggcgtgtgtgtgtgtaacgccggctacagcggcgaggactgcggggttcgcagttgtcccggtgactgccgcggtaggggaagatgtgagagtggcagatgtatgtgctggcccggttacacaggaagggattgcggtaccagagcttgcccaggcgattgccgcggccgaggtagatgtgtggatggccgctgcgtgtgtaacccaggcttcaccggtgaggattgcgggtcacggaggtgcccaggggactgtaggggacatggactgtgcgaggatggggtgtgtgtatgcgatgcgggatactcaggggaggattgttcaaccagatcgtgtcccggtggatgccgcgggcggggtcagtgtctcgacgggaggtgtgtgtgcgaagacgggtactctggcgaggactgtggggttcgccagtgtcctaatgattgctcccagcatggagtctgtcaagacggtgtgtgcatctgctgggagggatacgtgagcgaagattgcagtattaggacctgcccatccaactgccatggccgcggaagatgcgaagaggggaggtgtctttgcgatcctgggtacactggcccaacctgcgctacccggatgtgcccagcagattgtagaggccgcggtaggtgcgtccagggggtctgcctgtgtcatgtgggttacggtggggaggactgtggtcaagaggaaccacctgctagcgcgtgtcccgggggttgtggtccaagagagctgtgcagggctggccagtgcgtttgcgtcgagggctttaggggtcccgattgcgcaatccagacctgtcccggtgactgtagaggccgaggagaatgccacgacggatcgtgtgtttgtaaagatggatatgccggcgaagattgcggtgaggaggtcccaaccattgagggcatgcggatgcacctacttgaggagaccacggtcagaaccgaatggactcccgcgccaggcccagtggacgcgtatgagattcaattcatacctaccactgaaggggcttcccctccgttcaccgccagggtcccctcgagcgctagcgcttatgaccagagagggcttgcccccggtcaagagtatcaggttacagttagggcacttagaggcacgagttggggcctgcctgcatcaaaaacgattacaacaatgattgatggcccccaggatctcagggtggtagcagttactcctacaaccctggaactgggatggctccgtccccaggcagaagtggacaggtttgttgtgtcctacgtaagtgccgggaaccaacgagtgcgtttagaagtcccacctgaggctgatggcactttgctcaccgacctcatgcccggcgttgagtacgtggtgaccgttacagctgaaaggggacgggcagttagctacccagcctctgtccgcgccaatactgggagttccccactcggactgctggggacaacggatgagccccccccgtcaggcccttcaaccacgcagggggcccaggcgccacttctgcagcaacgaccccaggagttgggtgaactgcgagtgctcggccgagatgagaccggacgccttcgcgttgtctggacagcccagcccgacaccttcgcctatttccagctacgcatgcgagtgcccgaagggcccggagcgcatgaagaggtgctacccggagatgtgagacaggctctggtccctcccccaccacccggtactccatacgagttatccttgcacggagttccacctggaggcaaacctagcgatccaatcatttaccaggggatcatggacaaagatgaggagaaacccggaaagagtagtggaccccccagactgggcgaactcactgtcaccgaccggacttcagattccctgctgctacgctggaccgtgccggaaggagaattcgacagttttgtgattcaatataaagacagagacggacaacctcaagtggtgcccgtcgagggaccacagcggtcagccgttattacttctctggacccagggcgtaagtataagtttgtgctttacggattcgtgggcaaaaagaggcatggacctcttgttgcggaagccaaaattctgcctcagagcgaccccagcccaggcactcccccgaggctgggaaatctatgggtgaccgacccaactcccgacagtctgcacctgtcatggacagtacccgaagggcaatttgacacgtttatggtccagtatcgggaccgcgatggccgcccccaagtggtgccggtcgagggccctgagaggtcattcgtcgtctcctcgctggatccagaccacaaatacaggttcacgttgtttggaatcgctaataagaaaaggtatggaccgcttaccgccgacgggaccacagcacctgagaggaaggaggaaccaccgcacccagagttcttggaacagcctctgctgggggaactgacagtgacaggcgtcacccccgattcattgagactgagctggaccgtggcccaaggaccatttgatagcttcatggttcagtacaaggacgcccaaggccaaccccaggccgtccccgtggcaggcgatgagaacgaagtgacggtccccggactcgaccccgacaggaagtacaaaatgaacttgtacgggctgcgcgggcgacagcgggtgggtccagagtccgttgtggccaagaccgcccctcaggaggacgtggatgaaacccctagtccaaccgagctcggcacagaagccccggagagcccagaagagcctctgttaggagagctcaccgtgaccggatctagccccgatagtctgtcactcttctggacagtgccccagggatcttttgatagcttcaccgttcagtacaaagaccgggacgggcggccgcgcgctgtgcgcgtgggcggaaaggagagtgaggtgactgtcgggggtttggaacccggtcacaaatataagatgcacttgtacgggctccacgagggtcagagagtagggccagtatcggctgtgggagttacagccccccagcaggaggaaactccccccgctactgagagccctttggagccaaggttaggggagcttacagtgactgacgtcacaccaaactctgtgggactgtcctggacagtcccggaggggcaatttgactcattcatcgtacagtacaaggataaagacgggcagccccaggtggtccctgtggctgccgatcaaagggaagtgactgtgtataatctggaacccgaaaggaaatacaaaatgaacatgtacgggctccacgatgggcagcggatgggtccactctctgtggtgatcgtcactgcacccttgcccccggccccagcaactgaagcatcaaagcctccactcgagccccggctcggagaactcactgtgaccgacatcacccccgacagcgtcggactgtcctggacagtcccggagggcgaattcgattcttttgtggtgcagtacaaggatagggatggccaaccccaggttgtcccagtagcggcagaccagcgcgaggtgacaatacccgacctggagcctagtcgtaagtacaagttcctgctctttggcattcaggatgggaagagacgatcccccgtcagcgttgaggccaagactgtcgcccggggagatgccagcccaggcgcccctccacggctcggcgagctgtgggtgactgatccaaccccggattcactcaggttatcctggacagtcccagagggacagtttgactccttcgtggtccaattcaaggataaggacggtccacaggttgttcctgtggaaggtcacgagagatctgtgacagtgactccactcgatgcgggaagaaaatatcgcttcctcctttacggactgctgggtaagaaacggcacgggcctctgacagctgatgggaccacagaggcacggtcagctatggatgatacaggtacaaagaggccgcctaagccccgactgggggaggagttacaggtaaccacagtcacacagaacagtgtcgggttatcttggaccgtgccagaaggccaattcgattctttcgtagttcagtacaaggacagggatggtcagccacaggtagtcccagtcgaaggcagccttagggaggtgtctgtacccggcctggaccctgctcatagatacaaactgctcctgtacggactccaccacgggaaacgtgtcggtccaatttcagctgtggccattactgcggggcgcgaggaaactgagactgaaacaaccgcgcccaccccgcccgcccccgagccccacctcggggagctgactgtggaagaggccacttcacacaccttgcacctctcttggatggttaccgagggcgaatttgactctttcgagatccagtatactgatagagatggccagctgcaaatggtgaggatcggcggcgacaggaatgacataacactctccggcctcgagagtgaccacaggtacttggttaccctttacggattctcggatgggaaacatgtgggacctgtccatgtcgaagctctcacggtccctgaggaggagaaacccagtgaaccccccactgccactcccgaacccccaattaaaccccgcctgggcgaattaaccgtgaccgatgccacgcccgattcactgtccctgagttggacagtgcccgaaggccaattcgatcattttctggtccagtatcggaatggagacggccagcccaaggcagtaagagtcccagggcacgaggaaggtgtaacaataagcggactggagccagatcataagtataagatgaatctctatggttttcacggagggcaaagaatgggtcccgtttctgttgtaggggtgacagcggctgaggaagagacgcctagtcccacggagccctctatggaagcaccagagcctgcagaagagcccctgctgggcgagctaacagtgacaggatcttctcctgattcgctatcactttcatggaccgttccacagggcaggtttgactcatttactgtgcagtataaggatcgagacggacggcctcaggtggtgcgggtggggggagaagagtctgaagtcactgtgggcggtctcgagcccggtagaaagtacaaaatgcatctatatggcctgcatgaaggccggcgcgtgggccctgtgtccgccgtgggtgttacggccccagaggaagaaagccctgatgcgcctcttgccaagctgcggctgggtcaaatgacagtccgagatatcacgtcagatagcttgtccctgtcatggactgtcccagaaggccagttcgaccatttccttgtccaattcaaaaacggcgacggccagccaaaggccgtaagagtgccaggacacgaggacggtgtgacaatttctggcctggaaccagatcacaaatataaaatgaacttgtatggttttcacggaggtcagagggtcgggcccgtcagtgcagtgggccttacagcccctggaaaggacgaagagatggcgcccgcatctaccgaacctccaactccagagccacctatcaaaccacgattggaagaacttacagtgaccgacgctacacctgattcactgagtctgtcttggacagttcctgaaggtcagtttgatcatttccttgtccagtacaagaacggcgacgggcagcccaaggccacaagggtacctggccacgaagacagagtgactatttctggattggaaccagataataaatacaaaatgaacctgtacggcttccatggcggccagcgggtcgggccggtaagtgctatcggagtcacagcggcagaagaggaaacacccagccctactgaaccttccatggaagcccctgaaccacccgaggagccgctgctgggtgaacttacggtgaccgggagcagcccagactcactttcactgtcttggacggtgcctcagggcagattcgacagttttacagtgcaatacaaggatcgtgatggaagaccgcaggtcgtgagggtcgggggcgaggagtccgaggtcacagtcggcggtctcgagccagggcggaaatacaagatgcatctgtacggtctacacgagggaagaagagtcggccccgtgagcaccgtgggggtgaccgcaccccaggaagacgtggacgagactccttcacctaccgaacctgggaccgaggcaccggaaccaccagaggaacctctattaggggagttaaccgttaccggctcctccccggactcgctgagcctttcatggacagttccccaggggagatttgactcttttactgtacagtacaaggaccgcgacgggaggcctcaagccgtgcgagtcggcggacaagaatctaaagtgaccgtgcgcgggctggagcccgggcgaaaatacaaaatgcacctgtacggcttgcacgagggtagaagattggggcctgttagcgctgtaggggtgaccgaagatgaagctgagaccacccaagctgtgcccaccatgactccggagccaccaatcaaacccagactgggtgaactgaccatgacagacgccacacctgattccctgtctctgagctggactgtccccgagggccagtttgaccattttcttgtgcagtacaggaatggcgatggccagccaaaggccgtgcgagtacccgggcacgaagatggtgtaaccatttccggcctggagccagaccataagtataagatgaatctctacggtttccacggtggccaaagagtgggcccgatctctgtgattggcgtgaccgcggcggaagaggaaaccccctctcctacagagctctctactgaagcgcctgaacctccagaggagccgctactcggtgaactgacagtgaccggaagcagtccagattcactgtccctgtcatggacaattccccagggccatttcgatagcttcacagtgcagtataaagatcgcgatgggaggccccaggtgatgagagtgagaggggaggagtcggaagtgacagttgggggcctggaaccaggccgcaagtacaagatgcatctgtacggactgcacgaggggagacgcgtgggccctgttagcaccgtcggagtgacagtgcccacaacgacacctgagccgcctaataagcctcggctgggggagctcactgttacagacgctacccctgactctctgtctctgtcttggatggtgccagagggccagttcgaccacttccttgtgcagtaccggaatggcgatggacaacccaaggtagtgcgcgtgcctggccacgaagacggcgtcacaatctctggtctggagcccgaccacaagtataagatgaacttatatggtttccacggcggtcagcgcgtcgggcccatcagcgtcataggcgtgacagcagcagaagaagagacccctgcacctacagagccgagcaccgaagctcccgagcctcccgaggagcctctgcttggcgaactcaccgttactggatcttcccccgactccctcagcctgagttggaccatcccgcagggtcggttcgattccttcaccgtgcagtataaggatcgagacggccgacctcaggtcgtacgtgtgcggggcgaagaatcggaggtgacggttggagggctggagcctgggtgcaaatataagatgcatctatatggcttgcatgaaggccagcgggtggggccggtcagtgccgtaggagttaccgtgcctaccatgaccccagagccccctatcaagccacggctcggcgagctgacagtaaccgacgccaccccagactcgctgagcctgagctggatggtgcctgaagggcagttcgatcactttctcgtgcagtatagaaacggcgacggccaaccaaaggccgtcagggtgccgggccacgaggatggggtcactatctccgggctggaaccagaccacaagtataagatgaacctttacggcttccatggtggtcaaagggtggggcccgtctccgctatcggcgtgacagaagaagagacccctagccccacagagcccagtaccgaggctcctgaggctcctgaggagccactgctcggggaactgactgtcacaggctcctctcctgattccctgtcacttagctggacgatcccccagggacgttttgacagcttcactgtccaatacaaggaccgagacgggcagcctcaggtcgtgagagtaaggggcgaggagtctgaagttactgtgggtgggctggagcccggacgcaagtacaagatgcatttgtacggcttgcacgagggccagcgggtcgggccggtttccacggtcggcattactgcgccactccccacgccactgcctgtggagccacggctaggagaactagcagtcgctgctgtgacttcagacagtgtaggtctctcctggaccgtggcgcagggcccctttgattcgttcctcgtacagtacagggatgctcaagggcaaccacaggccgtgccagtgagcggcgatcttcgcgcagtggctgtgtcaggcctcgatcccgctcgtaagtacaagttccttctctttggactgcagaatggaaagagacatggaccagtccccgtggaagcaaggacggctcctgatactaagcctagtccccggctgggcgagctgaccgttacagacgccacaccggattctgtgggcctatcttggactgtccccgagggcgaatttgactcatttgtcgttcaatacaaggataaagatgggagacttcaggtggtccctgtggcagccaatcagcgcgaagttacggtccagggcttggaaccaagtagaaagtatagattcttactctacggactgtccggcagaaaacggttgggaccaattagcgccgatagtacgaccgccccgctggagaaggagttaccaccacacctgggagaactcaccgtggcagaagagacttcttcatcccttcggctgtcttggaccgtggcccagggcccttttgacagctttgttgtacagtatagagacacggatgggcaacctcgagccgtacccgtggccgctgatcagaggaccgttactgtcgaggatctggagcccgggaagaaatacaaatttctgctatacggactgctcggaggcaagaggctgggacccgtgtccgccctagggatgacagcgcctgaagaggacacgcctgctcctgaattggcacccgaggccccagagccccccgaggagccacgtctcggggttctgaccgtgaccgatacaaccccagatagcatgagattgagctggagcgtcgcccagggtccttttgatagcttcgtcgtgcagtacgaggacaccaacggacagccacaggcacttctggtggatggtgatcagagcaagatcctgatctctggccttgagccctcaacaccttatcgcttcctgttgtacggacttcacgagggaaaaaggctggggcctctctcggcagagggcactacggggttggctccagctggtcagaccagcgaggagtctcggccacggctgtcccagttgtccgtgaccgacgtgacaacatcaagcttacgacttaattgggaggctcctcccggagcattcgacagctttctcttgcgtttcggggtgcccagcccctccaccctcgaaccccatccacgaccacttttgcaacgcgaacttatggtccccggaacccgccattcagcagtattgcgcgatttacggtcaggaaccctttattccctcaccctgtacggacttcgcggccctcataaggccgatagcatccagggaacagctcgaacactcagtcccgtgctggaatccccgcgcgatctgcaattcagcgagatacgtgagacatcagccaaggtgaattggatgcccccacctagtcgtgcagactcctttaaggtgtcataccagctggcagatggcggcgagccacagtccgtgcaggtagacgggcaggcccgaacccagaagctgcagggcctgatcccgggagctcggtacgaagtgactgtggtgtctgtgcgggggttcgaggaatctgagcctcttaccggctttctgacaactgtgcctgacggcccgacccagctgcgtgcactcaatctcaccgaggggttcgctgtcttgcactggaaaccaccccagaatcctgtggacacctatgatatccaggttacggctcctggcgctcctccactccaggcagagacacccggatcggctgtggattacccactacatgacctggtcctccatactaactatactgcaactgtgcggggtctacgtggacctaaccttacatccccagcttccatcaccttcaccacggggttggaggcaccacgtgacctcgaggcaaaagaagttacacccaggactgctcttctcacttggacagaacctcccgtacgccctgccgggtaccttctgtccttccacaccccaggcggtcagactcaggagattctcctgcctggtggcatcacatcccatcagttactcggcctgtttcccagcacaagctacaatgcaagacttcaggcaacttggggacagagcttgctaccaccagtgagcacctcgtttacgaccggcggcctacgcattcccttccccagagattgcggagaggagatgcaaaacggggcgggagcctctaggacatctactatcttcctgaacggcaaccgagagagacccctgaatgtcttttgtgacatggaaacggacggaggcggatggttggtatttcaaaggcgcatggatggacaaacagacttctggagggactgggaggattatgctcacggcttcggcaacatctctggagagttctggcttggcaacgaggcccttcattccctgacgcaggccggggattactccatgcgggtggacctcagagcaggggatgaagccgtcttcgcgcaatatgacagtttccatgttgactcagcagctgaatactacagactccacctggaaggttaccacgggacagcaggagatagtatgagttatcacagcggatcggtcttttctgccagggacagagacccgaattcgctcctgatctcctgtgccgtgtcctatcgaggtgcgtggtggtataggaactgccattatgcaaatcttaacggcctgtacggttcaactgtagatcatcagggtgtgagttggtaccattggaaaggatttgaattttctgtgcctttcacagagatgaaattaagaccaagaaattttcgttcccccgccggcggggggtag

SEQ ID NO: 201524 - DNA, 6843 bp, Artificial Sequence
  derived and/or modified sequence
atgatgcccgcccagtacgccctgaccagcagcctggtgctgctggtgctgttatccactgctcgcgcaggtccattttctagccgatctaacgtgaccttgcctgcccctcggccacctccacaaccagggggccacaccgtgggggctggggtgggcagcccgagtagccaactgtacgaacatacagtggagggaggagaaaagcaggtggtgtttactcatcggattaacttgccaccatcgacgggctgcggatgtccacctgggaccgagccacctgttctagctagcgaggtccaagccctccgcgttcgattggagatattagaggagctggtgaagggcctgaaagagcaatgcacaggtgggtgctgcccagcatcagcccaagccggcaccgggcagacggacgttcgcaccctgtgttccctccatggcgtcttcgatctgtctcggtgcacatgctcctgcgagcccgggtgggggggcccgacttgctcagatcctaccgacgccgagatacctccctctagtccaccctctgcatccggctcctgccccgatgattgcaatgaccaaggtcgttgtgtgaggggacgctgtgtatgcttccctggatacactggcccgtcctgcggttggccatcgtgtccaggcgattgccagggcagggggcgctgcgttcagggggtgtgtgtgtgtagagcaggttttagtggccccgactgttctcaacggagttgtcccagaggatgttctcagagggggcgctgcgagggaggcaggtgtgtatgtgaccccggctacactggggacgattgtggcatgaggtcttgtccccgagggtgctcacagaggggccggtgtgagaacggtaggtgcgtctgtaatcccgggtacacaggcgaggattgtggcgtccgctcctgtccccgcgggtgctcccaaagaggccgctgcaaggacgggcggtgcgtctgcgacccgggatatacaggagaggactgtggaacccgctcatgtccctgggattgcggcgagggcgggcgctgcgtggacggaaggtgtgtctgttggccagggtataccggggaagactgttcaacccgcacatgtccaagggactgtagagggcgcggcagatgcgaagatggcgagtgtatctgtgacaccggatacagcggggacgattgcggcgtgcgtagttgtcctggagattgcaaccagagaggacgctgtgaagacgggagatgtgtctgctggccaggatacactggcacagactgcggctcccgcgcatgccctcgcgactgtagagggcggggcaggtgtgagaacggagtctgcgtttgtaatgccgggtactcaggcgaggactgcggtgtacgctcctgtcctggagactgccggggcagaggaagatgtgagagcggcagatgtatgtgctggcccggctacactggacgagactgcggcactcgtgcctgccccggcgattgcaggggcagaggcaggtgcgttgatggacgatgtgtttgcaacccgggtttcactggggaggattgcgggagccgacggtgcccgggagactgccgcggacacggactctgcgaagatggggtgtgcgtgtgcgatgcggggtattccggcgaggactgctccacacgcagttgccctggtggatgtcgggggcgaggacagtgcctggatgggcgatgtgtatgtgaagatggctatagcggcgaggactgtggagtgaggcagtgcccgaacgactgctctcagcacggggtgtgccaagatggggtgtgtatctgttgggaagggtatgtgtctgaggattgttcaatccgcacttgcccatcaaattgccatggccgcggacgatgtgaagagggcaggtgcctgtgcgaccccgggtatactggccccacctgcgcgacacggatgtgtcccgccgattgtaggggaagagggcgctgtgtgcagggtgtctgtttgtgtcacgtggggtacggcggcgaggattgtggccaggaggagcctcccgcgtccgcgtgtccaggcggatgcggtcctagggagctttgccgagcagggcagtgtgtctgcgtggaaggcttcaggggtccggactgtgccattcagacttgtcctggagattgtaggggacgtggtgagtgtcacgacgggtcttgtgtttgtaaggatggttacgcaggtgaggattgtggtgaggaagtgcctacgattgagggaatgcgtatgcatctcctggaggagactacagtgcggaccgagtggacccccgcccctgggccagtggatgcttacgaaatccagtttattcccaccaccgagggagcatcccctccttttacggcgagagtgccttccagcgctagcgcctacgaccagcgagggctcgccccaggccaagaataccaggtgaccgtacgtgccctgcgaggaacttcatggggtttacctgcttcaaaaactataactacaatgatagacgggccccaggatcttcgcgtggtcgcggtgacacctactaccctcgagttgggctggttacgtccccaggccgaagtggatcgcttcgtggtttcttacgtatcggctggaaaccagcgggtgagactagaagtgccccccgaggcagacgggactctcctgaccgacctgatgccgggagttgagtacgttgttactgtgacggcagagcgcggcagggctgtctcttaccccgcctctgtacgtgccaatacagggtccagccctctaggcctgctgggcactacagacgagcccccaccctccggtccaagtaccacacagggtgctcaggcaccactgttgcagcaacgaccccaagagctgggagagcttagagtgcttggccgagatgagacagggcgcttgagggtcgtgtggaccgcacagcctgacaccttcgcctacttccagctcaggatgagggtgccagaagggccaggcgcccacgaggaggtgcttccaggcgacgtccgtcaggccttagtgccaccccccccaccaggaacaccttacgagttgtcattgcatggagtacctcccggggggaagccttccgatcccattatttatcagggcataatggataaggatgaagaaaaacccggcaaatcttccggacccccccgattaggtgagcttacagtcactgaccgcacgtctgattctctcctattgcgatggactgtgcccgagggggaattcgacagcttcgtgatccagtacaaggatagggacgggcagccccaggtagtccccgtggagggccctcagcgctccgctgtaatcacgagcttggaccccggccgaaaatacaaatttgtcttatatggcttcgtgggcaagaagcggcacgggccgctggtcgccgaggccaagatcctgccccagtcagacccttcacccggaacgcctccgcacctcggaaatctgtgggtcactgatcctactccagacagtctccatctctcttggactgtccctgaagggcagtttgatacttttatggtccagtatcgtgaccgcgacggccggccacaggtggtgccagtggaagggcccgaacgtagctttgtggtgtcctctctggaccccgatcacaagtatcgttttacgctctttggcattgccaataagaagcgatatggccctctcaccgctgatggcactaccgcaccagagcgaaaagaagaaccacctcgcccagaattcttagaacaacctctgctcggcgaattgaccgttacgggtgtcacacccgatagcttgcggctcagctggaccgtagcccagggtccattcgactctttcatggtccagtacaaagacgcacaaggccaaccccaggctgtccccgtcgctggtgacgagaatgaggtgaccgtcccaggcctggaccctgatcgcaaatacaagatgaatctgtacggactgagaggtcgacaacgtgtggggcccgagagcgttgtagccaagaccgccccccaagaagacgtagatgaaaccccgtcccctactgagcttgggactgaagcccccgagagccccgaagaacccttactgggcgaattaaccgtgaccgggtctagccctgacagtttatcattgttctggactgtgccgcagggctcctttgattcatttaccgtccagtataaggaccgggacggccggcctagggctgtgcgggttgggggtaaggaatctgaggtcacggtgggggggctcgaacctggacacaaatacaagatgcacctgtacggcttacatgaagggcagcgggttggccctgtgagcgctgtgggagtgaccgcaccacagcaggaggagacacctcctgcgacggagtctccactcgagccccgtttgggtgaacttaccgtaacagacgtgacgccgaacagtgtcggcttgtcatggactgtgcccgaaggacagtttgactcttttatcgttcagtataaggacaaggacggacaacctcaagtggtgccagtggcagccgaccagcgtgaagtgactgtgtacaatctcgagccagagcgaaagtacaaaatgaatatgtatgggctgcatgacggccagcggatgggccccctgtcggtggtgattgtgactgcgcccctgcctccagcccctgccaccgaggcttccaaacctccactagaaccacgcctcggtgaattgactgttactgacattaccccagattctgtcggtctctcatggactgttcccgaaggtgaattcgactctttcgtcgttcaatacaaggacagggatggccaaccccaagtggtccctgtggccgccgaccaacgggaggttacaataccagatcttgagccctcccgaaagtacaagtttctgctgttcggaattcaagatggcaagcggcgtagcccagtgtctgtggaggcaaaaacagtagcacggggcgacgcaagccctggcgctccaccacgcctcggcgaattgtgggttaccgatcccacaccggatagcctgcgcctgtcctggaccgtgcccgaagggcaatttgacagtttcgtggtccagttcaaggacaaggacggcccccaagtggtgcccgtggagggccacgagcggagtgttaccgtcaccccactagatgcaggacgaaagtatcggttccttctgtatggacttcttggaaagaagaggcatggacctttgaccgctgacggcactacagaagccagaagcgccatggacgataccgggacaaaaaggccgccgaagcccagactgggcgaggaactgcaggttacaactgtcacacaaaattctgtcggattgagttggaccgtgccagaggggcagttcgattctttcgtagtgcagtacaaagatagagacggtcagccccaggtggtgcccgtcgaggggagtctccgcgaggtctctgtacccggattggaccccgctcaccgttataagctgctgttatacgggttgcaccatgggaaaagggtaggcccaatcagtgcagtcgccatcaccgctggtcgggaagaaactgaaactgagacgacggcacccactccacccgctcctgaaccccatttgggcgaactgaccgttgaagaagccacctcacacaccttgcacttgtcgtggatggtgacagagggagagtttgatagctttgaaattcaatataccgatagagacggccagttgcagatggtgcggataggaggtgataggaatgacattaccctgtccggcctggaaagcgaccacaggtatctggtcaccttgtacgggttttctgacggaaagcatgtgggccctgtgcatgtagaggctttgaccgtgccagaggaggaaaaaccgtccgagcctcccaccgccacccccgagccacctattaaaccccgcctcggcgaattaacagtaacggatgccacaccagattccctctctctcagctggacggtccccgaggggcaatttgatcatttcttggtgcagtacagaaatggagacggacagccaaaggctgttcgcgtgccaggtcacgaagaaggtgtgaccataagcggcctcgaaccagatcataagtacaaaatgaatctctatggctttcacgggggccagaggatggggccagtgtcagtcgtgggcgtgaccgccgccgaggaggagactccttctccgacggaacccagcatggaggccccagaacccgcagaggaacccctacttggtgagctgactgtaacgggaagcagccctgacagtttatcccttagttggactgtgccgcagggcagattcgacagcttcacagtacagtacaaagatcgtgatgggaggccacaggttgtgcgcgtggggggcgaggagtcagaagtaaccgtaggtgggctggagccagggagaaagtacaagatgcacctgtatggcctgcacgaggggcgtcgggtgggcccagtctctgctgtgggagtgactgcacccgaagaggaatcccctgacgcccccctggccaagctgcgtttagggcagatgactgtgagggacattacttcagattccctctcgttgagctggaccgtgcctgagggacagttcgatcacttcctggtccagttcaagaacggcgacgggcagcccaaagctgttcgggttcccggacatgaagacggggttactatctcaggccttgagccagatcataagtataagatgaacttatatgggtttcacggaggtcagcgggtggggcctgtatcagctgtcggcctgacatag

SEQ ID NO: 201525 - DNA, 654 bp, Artificial Sequence
  derived and/or modified sequence
gcccccggcaaggacgaggagatggcccccgccagcaccgagcccccaacacctgaacctccaatcaaaccaagactggaggaactcaccgtgaccgacgcaacacccgattctctctctctgagttggacagtcccggaaggccagttcgatcacttccttgtgcagtacaaaaacggggatggtcaacccaaagccacacgcgtgccaggtcacgaggatcgtgtcactatcagcgggttggagccagacaataagtacaaaatgaatttgtacggtttccatggaggccagcgggtcggacccgtctccgctatcggggttacagctgccgaagaggagacaccctccccaactgaaccctctatggaggcccctgagccacctgaggagcctctgttgggcgaacttactgtgaccggaagcagtccagactcccttagtctgagctggaccgtcccgcaggggcgttttgacagctttaccgttcaatacaaggatagggatggccgcccacaggttgtgagggtcggtggcgaagaatctgaagtaaccgttgggggattagagccgggaagaaagtacaagatgcacctttatggcctgcatgaagggcgccgcgtgggccctgtgtcaacagttggagtgacctag

SEQ ID NO: 201526 - DNA, 12729 bp, Artificial Sequence
  derived and/or modified sequence
atgatgcccgcccagtacgccctgaccagcagcctggtgctgctggtgctcctgtcaaccgctagggctggacccttttcttcaagaagtaatgttactctgcccgcgccccgcccaccacctcagcccggcgggcacaccgttggtgcaggcgtgggtagcccttccagccagctgtatgagcacacggtcgaggggggagaaaagcaggtcgtgttcacccatcgtatcaatctgcccccgtcgactggctgtgggtgtccccctggaacagaacctccagttctcgcctctgaggtgcaagctctacgggtaagactggaaatccttgaggaactggtaaaggggctcaaggagcagtgcaccggcggatgttgccctgcttcagctcaggctgggacaggccagacagacgtccgcacactttgcagcctgcatggcgtttttgacctgagcagatgtacttgttcgtgcgagcctggatgggggggcccgacctgtagtgaccccaccgatgccgaaattcccccttcttctcccccaagcgcctccggaagttgcccggatgattgtaatgaccaggggcgctgtgtgcgggggagatgtgtatgttttcctgggtatactggtccgtcctgcggatggccttcatgccccggagactgccagggaagaggacggtgtgtgcagggcgtttgcgtgtgtcgagccggcttctctggaccagattgttctcagagatcttgtcccagaggctgtagtcagagaggccgttgtgaaggaggccgttgtgtgtgcgatcccggttatactggtgacgactgtgggatgagatcatgtccacggggttgctcacagcgaggacgctgtgagaacgggaggtgtgtttgtaatcccgggtacacaggtgaagattgcggcgtcagatcttgcccgcggggctgcagccaacgaggtcgctgtaaggacggaaggtgcgtttgcgacccaggatacaccggcgaggattgcggcactcgctcctgcccgtgggactgtggagaaggcggccgctgcgtagatgggcgctgcgtctgttggcccggttacaccggagaggattgcagcacccggacgtgcccccgggattgtaggggacgagggaggtgcgaggatggggaatgcatttgcgacaccggctattctggtgacgactgtggcgtgcggtcttgtcccggggactgcaaccaacgcgggagatgcgaagacggccgctgcgtctgctggcctggctataccggaaccgattgtggctctcgcgcatgtcctcgggactgtagaggcagaggcaggtgtgaaaatggcgtctgcgtgtgtaatgccgggtactccggggaggactgtggcgtgaggtcgtgccccggcgattgccgcggtcgcggccgctgcgaatccggcaggtgcatgtgctggccaggttataccgggcgcgattgtggcacgcgtgcgtgtccaggcgattgccgtggaagagggcggtgtgtcgacggcagatgcgtctgtaacccgggatttaccggagaggactgcgggtcgaggagatgtcccggggattgccggggacatggtctgtgtgaggatggggtgtgtgtatgtgatgcaggctactccggcgaggattgcagcacaaggagctgcccagggggatgccgaggacgcggtcagtgtcttgatgggcgttgcgtgtgcgaagacgggtattcaggagaagattgtggtgtgcgtcagtgcccaaacgattgttctcagcatggcgtgtgccaagatggtgtttgtatttgctgggagggttacgtgagcgaggactgtagtatacgcacttgtccgtcaaattgtcacggccggggacggtgcgaggaagggaggtgcctttgcgaccctggatatactggacctacttgcgctactcggatgtgccccgcggattgccgcgggaggggacgttgtgtacagggcgtttgcctgtgccatgtgggctacggcggggaagactgtgggcaagaggaaccacctgcaagtgcgtgtcccggcggttgcggcccgagggaactttgtcgggcgggccagtgcgtctgtgtggagggcttccgaggtcctgactgtgctatccagacatgtcctggggactgcagggggaggggagaatgtcacgacgggagctgtgtgtgtaaggacgggtatgccggcgaagactgcggcgaggaagtacccaccattgagggtatgagaatgcacctcttggaagaaaccaccgtgaggaccgaatggacacccgcaccaggccccgtcgatgcatacgagattcagttcatcccaaccactgagggtgcttcccctcctttcactgctcgggtgcctagcagtgcctcagcttatgaccagaggggcctggcacccgggcaagagtaccaagtcaccgtccgtgccttacgagggaccagctggggattgcctgcctcaaagaccatcactaccatgatagatggcccgcaagacctccgagtagtagccgtgaccccaactactctcgagctgggctggctgaggccccaggctgaagtggatcggttcgtggtgagttacgtatccgccggaaaccaaagggtgagactggaagttcctccagaggcggatggtaccctcctgaccgatctcatgccaggcgttgaatacgtcgtaaccgttactgccgagcgaggtcgggcagtctcttaccccgcctctgtacgcgccaataccggttcatcaccgctgggactgcttggcacgactgacgagccccctccatctggaccgtccactacacagggggcacaggcacctcttctgcagcagcgaccccaggagctgggcgagctgagagtcctaggccgtgatgagaccggtcggctgcgagtcgtgtggaccgctcagcctgatacattcgcatactttcagctgaggatgcgggtcccagaggggcctggggcgcatgaggaagtattgcctggtgatgttagacaagcactcgtcccccccccccctccggggaccccatatgaattgagtttgcacggggtcccaccgggtggcaagccctccgatcccattatctatcaaggaattatggataaagacgaagaaaagcctggaaagagttccgggccccctagactgggcgagctgaccgtcaccgacagaacatccgactcactactgctccgttggaccgtcccagagggagagttcgactcttttgtcattcagtataaggaccgcgatggccaacctcaggtagttcccgtggagggcccacagcgcagcgcggtgatcacctcactcgacccaggaaggaagtacaagttcgtgctttatgggtttgttggcaagaaaagacatggtcctctggtggctgaagccaagatcctcccccagtctgacccttccccaggcactccgccacggcttggaaatttatgggtgaccgaccccacgcctgattcgctgcatctgtcatggacagtccccgaggggcagtttgataccttcatggtccagtaccgagatcgggacggacgcccacaggtggtgccagtcgaaggtcctgagaggtcgttcgttgttagctctctggacccagatcacaagtacaggttcacgcttttcggtatcgcgaacaaaaagcgatacggcccactgaccgcagacgggaccactgcaccagagaggaaggaggaaccccctaggcctgaattcttggagcagcctctcctaggcgaacttacagtgaccggcgtgacacccgactccctgcgattatcttggacagttgcccaggggcccttcgattcattcatggtccagtataaagatgcgcaaggccagccacaggccgtgcctgttgccggagacgaaaacgaggtgactgtgcccggcctggatcccgaccggaagtataagatgaacctgtatggcttgcgaggaaggcaacgagtgggacccgagtccgttgttgcaaaaacagcacctcaggaagatgttgacgaaaccccgtctccaaccgaattagggactgaggcccccgaatcccctgaggaacctctgcttggcgagctgactgtaactggcagttcccctgacagtctgagtttattttggaccgtgccacaagggagtttcgattcattcacggttcagtacaaggaccgcgacgggaggcctcgtgcagttcgggtgggtggcaaggagagtgaagttactgtgggcgggctcgagccggggcacaaatacaaaatgcacttatacggactacacgagggacaaagagtgggaccggtgagcgctgtgggtgtaacggcacctcagcaggaggagacgcctccagcaactgagtctcccctcgaacccagacttggcgaacttacagtaactgacgtgactcccaacagtgtgggtctgagttggacagtaccggagggacaatttgacagttttattgtgcagtacaaagataaagacggacagccacaggtcgtgcccgtggctgctgatcaaagagaggtgacggtgtacaacctagagcctgagcgtaagtataaaatgaacatgtatgggctgcacgacgggcagaggatgggtccactctctgtggtgattgtgaccgctccacttcctcctgcacccgctactgaagcatccaagccccctcttgaacctcgtttgggagagctgacagtgaccgatattaccccggattcagtcggcctctcttggacggttcccgagggggaatttgattcctttgttgtgcagtacaaggatcgtgacggacagccacaggtggtgcctgtggcggcagaccagcgcgaggttaccattcctgacctggaaccatcacggaaatacaagttcttgctgttcggcattcaggacgggaaaaggagatcccccgtgtccgtggaggccaagaccgtcgcccggggcgacgcatctccaggcgcccccccacgacttggcgaactgtgggtgactgacccaacacccgacagcctccggctgagttggacagtgcccgagggacagtttgactcatttgtggttcagttcaaggacaaggacggacctcaggtggtgcccgtagagggccacgaacggagcgtgaccgtaacccctctcgatgcaggaaggaaatatcggttcctattgtacggcctgctgggtaagaaaagacatggcccactcaccgcagacggcacaaccgaagcgcggtcagcaatggacgataccggcaccaaacgaccccccaagcccagacttggcgaggaactgcaggtgaccaccgtcacccagaattccgtcggactgagctggaccgtgccggagggccagttcgactcttttgttgtgcagtacaaagaccgggacggacagccccaggtggtccccgtcgagggcagtctgcgggaagtgtcagtgccgggtctggatcctgcacatagatacaaacttctgctgtacggattacaccatggaaagcgggttgggcccatatctgccgttgccattacggcaggccgggaggagaccgaaaccgaaactacggcccctacaccacccgccccagaaccccatctgggggaattgactgtagaagaagctacatctcacactctgcatctgtcctggatggtaacagaaggagaattcgactcctttgagatccagtacaccgacagagacggccagctgcagatggtcaggattgggggagacagaaatgacataactctcagtggtctggaatccgatcacagatatctggtcaccttgtacgggttttccgatggcaaacatgtggggcccgtgcacgttgaagctttaacagtaccagaagaagagaagcccagcgaaccaccgaccgcgacgcctgaaccccccattaagcccagactgggcgaacttacagtgacggatgccactcccgattccctatctctgtcatggacagtccctgaaggacagtttgaccatttcctggttcaatatcggaacggcgatggacagccgaaggcggtgagggtgcctgggcacgaggaaggagtgacgatttccggcctagaaccagaccacaaatacaagatgaacctttatggcttccacgggggccagagaatgggcccagtgagtgttgtgggagttaccgccgcggaggaggagaccccttcacctaccgagccttctatggaggctcctgagccagccgaggaaccactgctgggagagctaacggtcactggcagctcccctgacagcctttctctgagctggacagtaccccagggtcggttcgattccttcaccgttcaatataaggacagggatggcagaccacaggtggtgcgggtggggggcgaggagtcagaagtcacagtgggagggttggaacccggaaggaagtataaaatgcacttgtacggacttcatgagggaaggagggtggggcccgtgtcagccgttggtgtgaccgcccccgaagaggagtctcctgatgccccactggcgaaactacgtcttggccaaatgaccgtgagagacattaccagcgattccttatccctaagctggactgtacccgagggacaattcgatcacttcttagtacagttcaagaacggggacggccagcctaaggccgtgagagtcccagggcatgaggacggtgtgacaatctctggcctggaacccgaccacaagtacaaaatgaacttgtacggctttcacggggggcagagagtgggtcctgtgtcggccgttgggcttaccgctcccggaaaggacgaggaaatggctccggcttcaactgaaccacccactcctgagccacccatcaaaccacggctggaggaactaaccgtgacagatgctacacccgatagcttgagtctgtcatggacagtgcccgaaggacaattcgatcactttctagtccagtataagaacggtgacggccagccaaaagctaccagagtaccagggcatgaggaccgcgtgacaattagcggcctggaaccagataacaagtataagatgaatctttacggattccatggaggacagagagtcggcccagtatcagcaatcggagtgacagcggcggaggaagaaacccccagtcccaccgagccctcaatggaggctccagagccaccagaggagcctctgctgggtgagctcactgtgaccggatcatctcctgactccctgagtctatcctggacagtgccacaaggccgctttgactccttcaccgtacagtataaagatcgagacggcagacctcaggtggtgagagtgggcggggaagaaagtgaggtcacagtggggggcttagaaccaggcaggaaatataagatgcatctctatggtttgcacgaaggccggcgggtaggaccagtgtccactgtaggcgttacagctcctcaggaagatgtggacgagaccccatccccaactgaacccgggacagaagcccctgagcctcctgaggaacctctgctcggcgaactgacggtaaccgggagctcgcctgacagcttgtccttatcatggactgtgccacaagggcgtttcgacagcttcacagtgcaatataaggacagagatggccgtcctcaagcagtacgggtcgggggccaggagtctaaagtcaccgtgagagggctggagccgggcaggaagtataagatgcacctgtatggattacacgagggccgcaggctgggaccagtgtccgcagtaggcgtgaccgaggacgaggccgagactacgcaggccgtgcccactatgactcccgagccccctatcaagccgaggctaggcgagctgactatgactgatgctaccccagacagcttgtccttgagctggacagtgcctgagggccaattcgaccattttctcgtgcaatatcgtaatggcgacgggcaacctaaagccgtgcgggtccctggtcatgaagacggcgtgacaatttccggactggagccagatcacaaatataaaatgaatctgtacgggttccacggtgggcaacgcgtaggccctatcagcgtgattggcgtaaccgcagctgaggaagaaacccccagcccaacagaactgagcactgaggcccccgagcctcccgaggaaccattgctgggggagctgactgtaaccggttctagcccagactctcttagcctgtcctggaccataccacagggccactttgattctttcactgtccaatataaagaccgcgacggtcggcctcaggtcatgcgggttcgcggcgaggagtccgaggtgactgtggggggactggagccgggtaggaagtacaagatgcacctttatggacttcacgagggccgacgggttgggcctgtctccacagtcggtgttacagaagatgaagctgaaactacgcaggccgtcccaaccactacacccgaaccaccaaacaaacccagactcggagaactgaccgtaaccgacgccactccggactctttgagtttatcttggatggtcccagaaggccagttcgaccatttcctcgtgcagtaccgaaatggggacgggcagcctaaagtcgtaagggtgcctggacatgaagacggggtcacaatttcgggtctggaaccagatcacaagtataaaatgaacctctacgggttccacggagggcagcgcgtgggacccatctctgtaatcggggtgaccgctgccgaagaggaaaccccagcccccactgagccctcgacagaagcccctgaacctccagaagagcccctgctcggcgagctcacagtcacagggtcatcccccgatagcctctctctgtcatggactattccacagggacgattcgactcctttacagtgcagtacaaggatagagacggtcggccccaagtggtccgtgttcgcggggaggagtcagaagtcacagtgggcgggcttgagcccgggtgtaagtacaagatgcatctgtatggcttgcacgaagggcagcgtgtcgggccagtgtccgcagtaggagttaccgccccgaaggatgaagctgagacaactcaagcggtgcccaccatgactccggagccacccattaagcctagactcggggagctgacggtgaccgacgctaccccggactcattaagtctaagctggatggttcctgagggacaattcgaccatttcctcgtacagtacagaaatggagacggtcagcccaaagctgtgcgcgtaccaggacacgaagacggggtgactatcagcggcttagaaccggaccacaaatataagatgaatctgtacggattccacggcggccagcgggtaggaccggtctccgccatcggagttactgaagaagagacaccctcccctactgaaccatccactgaggcccctgaagcacctgaggagccgctgctaggagaactaacggtgaccggctccagccccgattctctttcactatcttggactgtcccccagggaagattcgactctttcacagtgcaatacaaggaccgcgacggacagcctcaagtggtccgtgtccgtggggaagagtccgaggttaccgtggggggcctggagcccggccgcaagtacaaaatgcatttatatgggctgcacgaaggacaaagggtcgggcctgtgagcacagtgggcatcactgctccactccccacacctctgcctgtggagccaaggctgggggagctcgccgtggcggcagtgacctcagatagcgtagggctgtcatggaccgtcgctcagggacctttcgacagctttctggtccagtaccgggatgctcaagggcagccccaggccgttccagtctctggcgatctgcgggctgttgccgtgagcgggctggatcctgcccggaagtacaaattcctgttgttcggtctgcagaacgggaaacggcatggaccggtgccagtagaagccagaactgcccctgatactaagccttcgcccaggttaggagaacttaccgtgacagacgcaacaccagactcggtaggcctgagttggacggtccctgagggcgagtttgactcttttgtggtgcagtataaagacaaggacggccgcctgcaagtggtgccagttgccgcaaatcagagagaggtcacagtgcaggggttggagccgtcacgcaaatataggttcttactctacggactgagtggacgaaagcgactgggccccatcagcgcagacagtactacagctccgctggaaaaggaactgccaccacaccttggtgaattgacggtcgcagaggagacatccagcagccttcgcttgagttggaccgtggctcaaggcccctttgattcgttcgttgtgcagtacagagatactgacgggcagccccgcgccgttcccgtcgctgccgaccaaagaactgtgaccgtggaggatttggaaccagggaagaaatataaattcttactttacggcctgttagggggaaaaaggttgggaccagtgagcgccctaggcatgaccgctccagaagaagacacacccgccccagagttggcccccgaagccccggagcctccggaggaacctcgtctgggcgtactcaccgtgacagacacaactccagatagtatgcggttgtcttggtccgtggcgcaggggcctttcgattccttcgtcgtgcagtatgaagatacgaatggacaaccacaggctcttctggttgacggtgaccagtcgaaaatacttatctctggtcttgagccttcaactccctaccgcttcttactttacggactgcacgaagggaagaggctgggacctctctcagctgaaggcaccacgggcttagcgcctgccggccagacgagcgaggagagccgcccacgcttgtcccagctttcagtgactgatgtgactacttcctctctgagactcaattgggaggctccccctggcgccttcgattcgttcctcctgcggttcggcgttcctagcccaagcactttggaaccgcaccccaggccactactacagcgcgagctgatggtgcctgggactagacacagcgcagtcctgcgcgatttaagatcgggaaccctctactcgctgaccctatatggcctcagaggacctcacaaagccgacagcattcagggcactgctaggactctcagccctgtacttgagtctcccagagatctacagttcagcgaaatacgggagacaagcgccaaagtgaattggatgcccccgccatcacgcgccgatagcttcaaggtgtcgtatcagctcgctgacggaggcgaaccccagtccgtacaagtggacgggcaagctcggacccaaaaactgcagggcctaatcccaggcgccaggtacgaagttacggtggtgagtgtgcgcggctttgaggaaagcgagcccctcaccgggtttctcacaaccgttccagatgggcctacccagctgcgagcactgaatctgacagaaggcttcgccgttctgcattggaagccaccacagaatcccgtggatacctacgatatccaggtgactgcccctggagcgccaccacttcaggccgaaacccccgggtccgcagtcgattacccactgcatgatcttgtgttgcacacgaactatacagcaaccgttcgagggttgagggggcctaatctaacctccccagcttctatcaccttcacaaccggactggaagccccacgcgacctggaggcaaaggaggtcacaccacggacagcccttttgacatggaccgagccaccggttcgaccagccggatatctgctgagcttccatacaccaggaggccagactcaagaaatacttctaccaggaggcattacatcccatcagttactcggcctttttccttctacatcatataatgctcggctgcaggctatgtggggacagtctttgctcccccctgtgtcaactagttttactacaggcggcctcagaattcccttcccacgggattgtggcgaagagatgcaaaacggcgctggcgcctctcggacatccacaatctttctgaatgggaacagagagagacccttaattgtgttctgcgacatggaaacggacggagggggctggttagtctttcaaagacgaatggatggccagacggatttttggagggattgggaggactacgctcatggattcgggaatattagcggggagttttggttggggaatgaagctctgcactccttgacccaggcaggcgactattcgatgcgtgtcgacctgcgggcaggggacgaggctgtgttcgcacagtacgattccttccatgtcgactccgctgccgaatactacagattacacctggagggatatcacgggacggcaggggattccatgtcttatcatagcgggtccgttttctcagcaagggatcgcgatcctaacagcctcttaatcagctgcgctgtaagttataggggcgcctggtggtatcggaactgtcattatgccaatcttaacggcctgtacggttccacggtcgatcatcagggtgtgagctggtatcactggaaggggttcgagttcagtgttccattcactgagatgaaactgaggcctcgtaacttcaggtcccccgcaggaggcgggtag

SEQ ID NO: 201527 - DNA, 12729 bp, Artificial Sequence
  derived and/or modified sequence
atgatgcccgcccagtacgccctgaccagcagcctggtgctgctggtgctactcagcacagcacgcgccggaccattctccagcaggtccaatgtgacactgcctgctccgcgtccacccccacagccgggcggacataccgtgggagccggtgtggggagcccctccagtcagttgtacgagcatacagtggaggggggcgagaagcaggtcgtgttcacacacagaatcaatttacccccttcaacggggtgcggatgcccgccgggaaccgagcccccagtgctggcctctgaggtgcaggccctgagggttcggctggagatcctcgaagaattggtgaagggcctgaaagaacagtgtactggcggctgttgcccggctagtgcccaggcaggaacagggcagaccgacgtgcggaccctttgcagcctgcacggcgtttttgatctgtcgcgttgtacttgttcttgtgagccgggttggggaggtccaacctgctcggacccgaccgacgccgagatccccccatcctccccgcctagtgcttcaggatcatgccccgatgactgcaatgatcagggcagatgtgtgcgaggtagatgcgtgtgctttccaggatacactggaccatcttgcgggtggccatcctgtcccggggactgtcagggccgtggccggtgtgtgcaaggggtatgtgtgtgcagggcggggttttctggaccagactgctctcagcgaagttgcccacggggctgctcacagaggggacggtgtgagggtgggcggtgtgtatgtgatcccggttataccggcgatgactgcggtatgcgatcctgccctagaggttgttcacaaagggggaggtgcgaaaacggacgatgcgtctgcaatccgggatacgcaggcgaagactgcggggtgagaagttgccccagaggctgcagccagaggggccgctgcaaagatggccgctgcgtgtgtgaccccggatacaccggcgaggactgtggaactcgctcatgtccgtgggattgtggtgaggggggacgatgcgttgatgggaggtgtgtgtgctggccaggatacactggagaggattgttccacaaggacctgtcctagagattgccgagggcgaggtcgttgtgaggacggcgagtgcatttgcgatacgggctactccggagatgactgcggcgtgcggagctgtcctggggactgtaaccaacgcggcaggtgcgaggacggaaggtgcgtgtgttggcccggatacactgggaccgactgcggtagtagagcttgccctcgggactgccgcggccggggcaggtgcgagaatggggtgtgtgtttgtaacgctggctacagcggcgaggattgcggagtgcgctcttgtcccggggattgtcgtggccgtggcagatgtgagtcgggacgatgtatgtgttggccaggctacactgggagggactgtgggactagagcctgcccaggagactgtcgcggcagaggccggtgtgtcgatggtaggtgtgtgtgcaatccaggtttcacgggagaggattgcggcagccgaaggtgtcctggggattgtcggggccacggtctttgcgaagacggagtgtgtgtgtgtgatgccggctatagcggcgaggactgcagcactagatcttgccctggcggctgccgcggccgcggtcagtgtcttgacggacggtgcgtctgtgaggatggctacagcggggaagactgcggtgtcaggcagtgcccaaatgactgcagtcagcatggagtatgtcaggatggcgtgtgcatatgttgggagggatatgtctccgaggactgttctatcaggacgtgccccagcaactgtcatggcaggggtcggtgtgaggaggggcggtgtctgtgtgacccagggtacaccggccccacatgtgctacaaggatgtgtcctgccgattgcagaggccgcggtcgttgcgtgcagggggtgtgcttgtgccatgttggttacggcggtgaagactgcggacaggaggagccaccggctagcgcctgcccagggggttgcgggccgcgagaactctgccgagcaggtcagtgcgtgtgcgttgagggatttcgcggacctgactgtgcaatacagacatgtcccggcgattgcagggggagaggtgagtgtcacgatggatcctgtgtgtgcaaagacggttatgccggggaagactgtggagaggaagtccctacgatcgaaggcatgcggatgcatttacttgaagagactaccgtgcgtaccgagtggacaccagccccaggccccgttgatgcgtacgagattcagtttataccgactacagagggcgcgtcccccccttttaccgccagggtgccttctagcgcctctgcttacgaccagcgcgggctggcacccgggcaagaatatcaggttacagtgcgcgccttaagaggaacttcttggggccttcctgcaagcaagaccatcacaactatgatagatggcccccaggacctgagagtggtcgcagtgactcccaccacactggagcttggctggctgagaccccaggctgaagtggacagattcgtcgtgtcttacgtgtccgccggaaaccagagggtgcgactggaggttccccctgaggccgacggcactttgctaaccgacctgatgcctggcgttgaatatgtggtgacggtgactgctgagcgcggaagagcagttagctatccagcctcagtgagggccaataccgggtcttctcctctaggattgctgggcaccactgatgaacctcctccatctggacctagcaccacacagggggcacaggctcccttgttacagcagaggccccaagagctcggagagctgagggtgctggggcgcgatgagacaggccgactacgggtggtgtggacagcccagcccgacaccttcgcatactttcagttgcggatgcgcgttccggaaggacccggcgcccacgaggaggttctgcccggtgacgtgcgccaggcgttggtgcctcctccgccacccggaacaccttatgagctgagtttgcacggcgtcccgcccggcggaaagccgtccgatcctatcatttaccagggaatcatggacaaggatgaagagaaacctggtaagagtagcggtccgcctagactaggggagttgaccgtcacggacagaacttcagacagcctgttgctcagatggacagttcctgaaggagaatttgacagcttcgtcatccaatacaaggatagggatgggcagccccaggttgtgcctgtcgaaggtcctcagaggtccgccgtcatcactagtttagacccaggacggaagtataagttcgtgctgtatggattcgtggggaaaaagcgccatggaccactggtggcagaagcaaagatcttgccccagtcagacccttcccccgggactcctcctcatctcggaaacttgtgggtcaccgatccaacacccgattcactccacctatcgtggactgtgcccgaagggcagttcgatacttttatggtgcaatacagagaccgggacggccgccctcaggtggtgcctgtcgaaggacccgagcgaagttttgtcgtatcttccctagatcccgatcataagtatcggttcaccctctttggtatcgctaacaagaagcgatatggacctttgaccgccgatggtaccacagcccccgaaagaaaggaagaaccaccacgacccgaatttctcgagcaacctctcctgggggaactcacggtcactggcgtgacccccgacagcttgcggctcagttggacagtggcccagggcccatttgattcattcatggtgcagtataaagatgcccaggggcagccccaggccgtgcccgtggccggtgacgagaacgaggtgacagtgcccggtctagatccagaccggaaatataagatgaacttatacggactgcgaggacgccagcgcgtcggacctgagagcgtcgttgctaaaactgctccccaggaggacgtggacgagacaccctcaccaaccgagttaggtacagaagccccagaaagtcctgaggagccgctgctaggcgaactgacagttaccggttcatcaccagactctctgagtttgttctggacggtcccgcaggggtctttcgattcttttactgtgcagtataaggacagagatgggaggcccagagccgttagagtgggggggaaggagagcgaggtcaccgtgggcggcctcgaaccagggcataagtacaagatgcatctttacggtctgcacgagggtcagagagtgggacccgtgtcagccgtgggggtgaccgctccccagcaggaggagacccccccggcaacagagtcccctttagaaccacgtctaggtgaactcacggtgacagatgtgacacctaacagcgtgggtctctcttggactgtaccggagggccagtttgactcctttatcgttcagtataaagataaggacgggcaaccccaggtagttccagtggcagcagatcaaagagaggtcaccgtttataacctagagccagaaaggaagtataagatgaatatgtacgggctccacgatggacagagaatgggacccttgtcggttgtgattgtcaccgctccacttcctcccgcacccgccaccgaagcgtcaaagccacctttggaaccgaggttgggggagctgacggtcactgatataaccccagacagtgtggggctaagttggaccgtgcccgagggagagtttgactctttcgtagtgcaatacaaggaccgggacggccagcctcaagtcgtccccgtggcggccgatcagagagaggtcactattccggacctggaacccagccgaaagtataagttcctattgttcggtattcaggatggaaagcgaaggagcccagtgtccgtagaagcgaagacagtcgctcgcggggatgcttccccaggcgcacccccaaggctgggcgaactatgggtgaccgaccctacccctgattcacttcggctcagctggactgtcccagaaggccagttcgattccttcgtcgtgcagttcaaggataaagacggaccccaggtggtgccggtggaggggcacgaacgaagcgtgacggtgactccgctcgacgccggaaggaagtaccgcttcctgctatatgggctgctgggcaagaaaaggcatggtccacttaccgccgacggtaccactgaggcgaggtccgccatggatgacacagggacaaaacggccccccaagccaagactgggtgaagagttacaggtgactacagttacccagaattccgttgggctgtcatggaccgttcccgagggccaatttgactcattcgttgtgcaatacaaggatagagacggccagcctcaggtcgttccagtggaggggagtctcagagaagtgtccgtcccaggcctggatcccgcacatcgatataaattactgttgtatggcctgcaccatgggaagagagttggacccatatcagctgtcgccattacagctgggcgggaggagaccgagactgaaacaactgctcctacacccccagcccccgaaccccacctcggagagctgaccgtggaggaggccacgtctcatacgctccatctgtcatggatggtgacagagggcgagtttgatagcttcgagattcaatatacagaccgtgacggccaactccaaatggtgcgcattggcggtgatcgcaacgatattaccttaagtggactcgagtccgatcaccgctaccttgtcacgctgtatggttttagcgacggtaagcatgtaggcccggtgcatgttgaggcacttaccgtgccagaagaggaaaaaccatctgaacctcctacggccacacctgaacctccaataaagccgcgcttgggagaactgaccgtaactgatgccaccccggatagcctctcgttgagctggactgtaccagagggacaattcgaccactttctcgtccagtacagaaatggggacggccagccgaaggctgtgcgcgtcccaggccacgaagaaggtgtaacaattagcggcttggaacccgatcataaatacaaaatgaacctttatggctttcacgggggacaaaggatgggccctgtttccgtagtgggcgtgacagcagccgaggaggagacgccatcccccacagaaccttctatggaagcccccgaacccgcagaagagcccctcctgggggagctcaccgtaactgggtccagtcctgattccctctctctctcatggactgttcctcaggggaggtttgacagctttacagtccagtacaaggaccgcgatggacgaccccaagttgtgcgagtgggtggggaggaaagcgaggtaaccgtgggtggcctggaaccagggcgcaagtataagatgcacttgtatggactgcacgaagggcgcagggtgggtccagtctctgccgtgggggtcaccgcacctgaggaggaatccccagacgcccccttggctaagttaagattggggcaaatgacagtacgagacattacctccgatagtctctctctatcgtggaccgtccctgaaggccaattcgaccactttctggttcagttcaagaacggcgatggccaacctaaggctgttagagtgcccggccacgaggatggcgtaactatctccggcctcgaacccgaccataagtataaaatgaacctatacgggtttcacgggggccagagggtgggtcccgtgtcagcagtcggcttgactgcgccaggcaaagacgaggagatggctcccgcatccaccgagccacctactcccgaaccaccgattaaacctaggctcgaagaactcacagtcacagatgctacccctgactctctttccctgagctggacagtgccagaggggcagttcgatcattttcttgtgcaatataaaaatggagacggccaaccaaaggctaccagagtgcctgggcacgaggaccgggtcactatcagtggtttagagcccgataataaatataagatgaacctctatggcttccacggcggccagcgtgtgggccccgtgtcagctattggagtgactgccgcagaggaagagaccccctcacctactgagccgtctatggaagcacctgagcctccagaggaacctcttctgggagagctgaccgtcacaggcagcagcccagactccctgagcctcagctggaccgtgccacaaggccgattcgactcttttactgtgcagtataaagacagggatgggcggcctcaggtcgtccgcgtgggcggagaagagtccgaagttacggttggtggattagaacctggacgcaaatataagatgcatctgtatggtcttcatgaaggcaggcgggtgggaccagtgtccactgtgggcgtcaccgcccctcaagaggacgttgatgaaactcccagccctacagaacctggaaccgaggcgcccgaaccccctgaggagccactcctgggggagttgaccgtgaccggcagttcacccgattcactgtcgttgtcatggaccgtgcctcagggacggttcgacagtttcacggtccaatataaggatcgcgatggacggcctcaggcggttcgggttggcggccaagagagcaaggtgacagtgcgcggacttgagcctgggaggaagtacaaaatgcacctgtacggattgcatgaggggcgcaggttaggccccgtatccgcagtcggcgtgacagaagatgaggcagagaccacgcaggccgtccctacaatgactccggagccccccattaaaccaaggctgggggagctcacgatgacagacgcaactcccgactccttatctctctcctggactgtgcctgaaggacagttcgaccattttcttgtgcagtacaggaacggggatggccagccgaaggccgtccgagtgcccggacatgaggatggcgtgaccatctctggcttagagcctgatcacaagtacaagatgaatctctacggatttcacggcggacagagagttggccctattagtgtgattggagttactgctgcagaggaagaaacacctagccctacagaactgtcaaccgaagcgccggaaccgcctgaagagccgctccttggagaactaacagtgactggctcatccccggactccctgagtctgtcctggacaataccccagggacactttgacagctttaccgtgcagtataaggaccgcgatggcagacctcaagtcatgcgcgttaggggtgaagagtccgaagttacagttggagggctggaacccgggcgaaagtataagatgcatctgtatggcctacatgagggccgtcgcgtggggccagtgtcgactgtcggagtgacagaggacgaggcagaaaccacccaggcagtgcccaccaccaccccagagccgccaaacaaaccacgactgggcgaactgacagtgaccgacgcaaccccagacagccttagcctatcctggatggtgccagagggccagtttgaccacttcctggtccagtaccgaaacggtgatgggcagccaaaggtagttcgagtacccgggcacgaagacggtgtcactatttcaggccttgaacccgatcacaaatacaagatgaacctttatggcttccacggcggccagcgagtgggccccatcagcgtcattggcgtgaccgctgccgaggaagaaactcccgctcctaccgagccctcgactgaagcccccgaaccccctgaagaacctttgttgggagaacttacagtcacaggttcttctccggacagcttatccctctcttggacaattccacaggggcgcttcgattccttcactgtgcagtacaaagacagagatgggcgccctcaggtggtcagagtaaggggcgaagaatcagaggtgactgttgggggcctggagccagggtgtaagtataaaatgcacctgtatggtctccacgagggccaacgcgtgggtccagtgagcgcagtgggcgtgaccgctcctaaggatgaggccgaaacaacccaagccgtccccacaatgacaccggagccacccattaaaccaaggctgggtgagctgacagttaccgacgccacgccagactcactaagcctgtcgtggatggtccccgaaggtcagtttgaccatttcttagtccaatatcgtaacggagacggacagccaaaagcggtgagggtccctgggcacgaagatggcgttaccatctctgggctggaaccagaccacaagtataaaatgaacctgtacggtttccacggtggccagagagttggacctgtgagtgctattggcgtaacggaagaggagactccaagccccactgagcctagcactgaggcgcccgaggcacccgaggagccgctcttgggcgagctgacggtcacgggatccagccccgattccttatctttgagctggaccgtcccccagggccggttcgatagcttcaccgtccagtacaaagatagggatggacagccccaggtggtgagggttcgaggtgaagagagcgaggtgacagtgggaggcctggagcccggtaggaagtataagatgcacttatacggcctgcacgaaggccaacgagttgggcccgtttccacagtggggattaccgccccattgcccacccccttacccgtggaaccaaggttgggagaactggcagtcgccgctgtcacctccgattccgtaggcctgagttggactgttgcacagggaccctttgactcgttcctggtgcagtatagagatgctcaggggcaacctcaagcagtccctgtgagcggtgatttgcgtgccgtggctgtcagcggcctggaccccgccagaaaatataaattcttgttattcggtcttcagaatggcaagcggcatggtccagtgcctgtcgaggcccgtaccgctccagacacaaagccgagccctcggctgggtgagctcacggtgactgacgctactcccgattctgtggggctctcctggacggtgcccgagggggaattcgattcatttgtcgtacaatacaaggacaaagacgggcggctgcaagtggtgccggtggcagccaatcagcgcgaggtgacagtccaaggcctggaaccaagcaggaagtaccggtttttactgtacgggcttagtggaagaaagagattgggacccatttccgccgacagcaccacagcccccctcgagaaagaattgcctccgcacctcggcgagcttaccgtcgccgaggaaacgagctcctcgctcaggctgagttggaccgtggctcaggggccttttgactcattcgttgttcagtatcgcgacacagatgggcagcctcgagccgtacccgtggctgccgaccagaggaccgtgacagttgaagacttagagccagggaagaaatacaaattcctgttgtacgggctgttgggcggaaagaggttggggcccgtgagtgcactgggcatgaccgcacctgaagaggacacccctgctcccgagctggcaccagaggctcctgagccacccgaagaacctagactcggggtacttaccgtcactgatacaaccccagactctatgcgactttcgtggtctgtcgctcagggaccctttgatagctttgtggtacaatacgaggatacaaatgggcaacctcaggcgctactggtggacggggaccagtctaagatacttattagcggtcttgagccgtctacgccatacagatttctcctgtacggtcttcacgaaggcaaacgtctgggaccattgtctgcggaaggcaccactggactggctccagcaggccagacctccgaagaatcgcgcccacgcctctcacagttgtcagtcaccgacgtaactacgagcagtttgaggctcaactgggaggccccccccggcgcgttcgactcctttttacttaggttcggtgttccctcccccagcacactcgagccccatcctcgccctttattgcaacgggaactgatggtgccaggtacacgccacagcgcagtcctcagagacctacggtccggcaccctgtactccctgaccctgtacggcctgcgtggaccccataaggcagactccatccagggcactgcccgaaccctgagcccagtcctggagagccctcgagacctacaattcagcgagatccgagagacaagtgctaaagttaactggatgcctccaccttccagagccgatagttttaaggtgtcataccaactggctgatggcggagagccacagtccgtgcaggtggatggccaggctaggacccaaaagctgcaaggtctgattccaggcgcgcggtatgaggtcactgtagtgtccgtgcgcgggttcgaagagagtgaaccgttgacagggttcctgacaacagttcctgacgggcctacacagctgcgcgctctgaacttgacggaagggttcgctgtactgcattggaaacctcctcaaaacccagtcgatacctacgacgtgcaagtgacagctcccggtgcccctcctctccaggcggagaccccagggagtgcggtggactacccccttcacgacctggtgctgcatacgaattacaccgcaaccgttcgagggctgcgaggaccaaacttaacgtcacctgcctcgattacattcaccaccggacttgaagccccacgggacttggaggcgaaggaggtaaccccccggaccgctctattaacatggactgaacccccagtccggccggcggggtacctgctctcctttcacaccccaggtgggcagaaccaggagattctgctgcctgggggaatcacaagccaccagcttctaggtctttttccatcgacaagttacaacgcccggctgcaggctatgtggggtcagtcactgttgccccctgtgagcacctccttcaccacaggtggactccggatcccattcccgagagactgcggggaggagatgcagaacggggctggagcgagcagaacatccacgatctttctcaacggcaaccgtgaaaggcccttgaatgtgttctgtgacatggagacagacggcggaggttggctcgttttccagagacggatggacggccagacagatttttggagagattgggaagattatgcacatggatttggaaacatctcaggcgaattttggttggggaacgaagccctacactctcttacgcaggccggggattactctatgcgtgtggatttgcgtgccggggacgaggctgtttttgcacaatatgatagctttcacgtggatagcgctgcagaatattataggctacacttagaagggtaccatggcacagccggcgattccatgtcttaccatagtggcagtgtcttctctgcaagagatcgtgaccctaacagtctcttgatctcctgcgccgtgtcctatcggggcgcctggtggtatcggaattgccactatgcaaacctcaacggcctgtacggctccaccgtcgaccatcagggggtttcatggtatcactggaagggatttgagtttagcgtccccttcacagagatgaagctgcgcccaaggaattttcgaagtcctgccggcggcggctag

SEQ ID NO: 201528 - DNA, 843 bp, Artificial Sequence
  derived and/or modified sequence
atggtgaccgagggcgagttcgacagcttcgagatccagtacaccgatagagatggccagctgcaaatggtgcggatagggggcgataggaacgatataaccctgagtgggctcgaatcagaccatcggtacctcgtgacactttatggtttcagtgatggcaagcatgtcggtccagtgcacgtggaggccctgactgtacccgaggaggagaagccttccgagcctcccacggccacacctgaacctccgataaagcctcggttaggagaactgactgtcaccgatgccacaccagactccctaagcctaagttggacggtccccgaaggacaatttgaccatttcctggtccagtataggaacggggatggacaacctaaggccgtacgggtccccggtcacgaagaaggcgtgaccatcagcggattggaaccagatcataagtataagatgaacctgtatggcttccacggtggccagcgcatgggtccagttagcgtcgttggggtgaccgctgccgaggaggaaacacccagccccacggagcctagtatggaagctcctgagccagctgaggagcctctgttgggggagctgactgtcaccgggtcctcccccgacagcctgtccttgagctggacagtgccacaaggccgcttcgacagttttacggtgcagtacaaagatcgggacgggcgtccgcaggtagtgagagtcggcggtgaggagtctgaggtgacagtgggcggcctggagcccggtagaaaatacaaaatgcacctttatgggctacatgagggccggagggtgggtcccgtaagcgccgttggcgttacttag

SEQ ID NO: 201529 - DNA, 12729 bp, Artificial Sequence
  derived and/or modified sequence
atgatgcccgcccagtacgccctgaccagcagcctggtgctgctggtgctgctttctacagcaagagccggaccgttctcttccaggtcgaatgtgacactgccagcccctcgtccacctccacaaccaggaggtcacaccgtaggagcaggtgtcgggtccccatcttcccagctgtatgaacacaccgtcgaaggtggtgaaaaacaggtggtcttcacccacaggattaatcttccccccagtacagggtgtggatgtcctcctgggaccgagccgcccgtgctcgcatcagaagtccaagcgctgagagtgcgactggaaattctggaggaactggtcaaggggctgaaggaacagtgcactggaggatgctgtccagccagcgctcaggccggaaccggccagaccgacgtcaggactctatgttctctgcacggggtgttcgacttaagtcgctgtacgtgcagctgtgaacccggatggggtggaccgacatgcagcgatccaaccgatgctgagattcctccttcctcccctccttctgcgtcagggagctgtcccgacgactgtaacgaccaaggtagatgcgtgaggggccgctgtgtgtgtttccccgggtacaccggaccatcttgcggatggccctcttgccctggcgactgccaagggcgcggacggtgcgtgcagggagtgtgtgtatgcagagccggcttttcgggaccagattgtagccagaggtcatgccccagaggctgctcgcagcgcggcaggtgcgagggaggcaggtgtgtgtgcgaccccgggtatactggggacgactgtggcatgcgctcctgccctagaggctgctcccagcgtggacggtgtgagaatggcaggtgcgtgtgcaaccccgggtacactggtgaggattgcggcgtaaggtcatgtccccgcggctgttctcagcgtgggcggtgcaaagacggcaggtgcgtctgtgatccaggctacacgggagaagactgcggtacccgaagttgtccttgggactgtggggagggcgggcgctgtgttgatggtcggtgtgtgtgttggcccggatatactggcgaagattgcagtaccaggacctgccctcgtgattgccgcggccgtggccgctgtgaggatggtgagtgtatttgcgacaccggctactccggtgatgattgcggcgtgcgcagctgtccaggtgactgcaaccaaaggggaagatgcgaggatggccgatgcgtatgctggccaggctatactggcactgattgtggttcccgagcctgtccacgcgattgtcggggcagaggccgatgcgaaaacggagtgtgcgtgtgtaacgccggctacagcggggaagactgcggggttaggagttgccccggcgattgtagagggcgcggaaggtgtgagtctgggcggtgtatgtgctggccaggttataccgggcgagactgtggaacccgcgcctgccccggcgactgtagggggcgcggaagatgcgtggatggccgatgtgtctgcaatcccggcttcaccggcgaggactgcggctccaggcggtgcccaggggattgcaggggacatggactatgcgaagacggcgtgtgcgtgtgtgatgccggttattccggcgaggattgctctacgcgtagctgtccagggggatgccggggaaggggtcagtgcctggacggcaggtgcgtttgcgaggatggctactcaggagaggactgtggcgttagacagtgtccaaatgattgtagtcagcatggggtctgccaggatggcgtgtgtatctgttgggaggggtacgtgagcgaggactgctccataaggacctgtcctagcaactgtcacggcagaggacgctgcgaagagggcagatgcttgtgtgatcctggatataccggcccaacatgcgctacacggatgtgccccgccgattgtcgcggaagagggagatgtgtgcaaggggtctgcctctgccacgttggctatggtggcgaagattgcggacaagaggagccaccggcttcagcctgtcccggggggtgcggtcctagggaattatgcagagctgggcagtgtgtgtgcgtcgaagggttcaggggccccgactgcgccattcaaacctgtcctggagattgtagaggccgcggagagtgtcatgacgggagctgcgtctgtaaagatggttacgctggtgaggattgtggtgaggaagtccccacgatcgaggggatgagaatgcatcttctcgaggaaacgaccgtcagaacggaatggacgcctgcccccggacctgtagacgcatacgagattcagttcattcccactacagagggagctagcccaccctttactgctcgggtcccctcctctgcaagtgcttacgatcagcgagggttggctccaggccaggagtatcaagtgaccgtgagggccctgcgcggaacatcctggggcctgccagcctccaaaacaattacaactatgattgacggtcctcaagacctacgtgtagttgccgtaacgcctacaacactggaactgggctggcttagaccacaggctgaggtggacaggttcgtggtctcgtacgtgtcggcgggcaaccaaagagttagacttgaagttccccccgaagccgatggaactctgctgaccgatctaatgccaggggttgagtatgtcgttaccgtgactgccgaaaggggtcgcgctgtctcctatccggcttccgtgagggcgaataccggctccagccccttgggtctgctcggcaccacagacgagcctccaccttcaggaccttcaactacccagggggcgcaggcccctctgttacagcaacgcccgcaagaactcggcgagcttcgggtcttggggcgcgacgaaaccgggagactgagggtggtttggaccgcccaaccagacacctttgcgtatttccagctgagaatgcgggtcccagaaggacccggagcacatgaggaggttttgcccggtgatgtcaggcaggcgctggtcccacctccaccacccggaaccccgtacgagctgtctctccacggtgtgccgcctgggggaaaaccaagcgatccgatcatataccaaggtattatggacaaggatgaagagaaacctggcaaatcgtcgggaccacccagactcggggagctcacagtaaccgatcgcacttcagattcgctactcctgcggtggacggttccagaaggtgagttcgactcattcgtcattcagtacaaagatagagatggacagccgcaggttgtgccagtggaggggcctcaacgctccgctgtaatcacatccctcgacccagggcggaaatacaagtttgtgctgtacggctttgtggggaaaaaacggcacggtccgctggtcgccgaggctaagatcttgccacagagtgatcctagtcctggaacgccccctaggcttggaaacctgtgggtcacggatcctacccctgactctctccatctgtcatggacggtcccagaaggtcagtttgatacattcatggtgcagtatagggaccgcgatggacgaccacaggtagttccagttgaaggtcccgaacggtcgttcgtggttagcagccttgaccctgatcacaagtatagattcactctgtttggaatcgctaataaaaagcgatacggtccgctgactgccgacggaacaacagcgccggagcgcaaggaggaacctccacaccccgaatttctggagcaaccgctgctgggagaactgactgtaactggtgtgactcccgactccctgaggttgtcatggactgtagctcaaggcccatttgatagtttcatggtacagtataaggatgcccagggacagccccaggccgtccctgtggccggcgatgagaacgaggtgaccgtgccaggcctagacccagatcgtaagtacaaaatgaatttgtacggcttacggggtagacagcgggtgggtcctgaatcggtcgtggccaagacggcccctcaggaggatgtggacgaaactccttctccaaccgaactcggtactgaggcgcccgagagccctgaggaaccactgcttggtgaattaacggtcaccggtagcagtcctgacagtttatcgctcttttggaccgttccacagggctcttttgattcgtttacagtgcaatataaagatagagacggacggccaagggccgttcgggtaggaggcaaggagagtgaagtaacggtcgggggtctagaaccaggacacaaatacaagatgcacttgtacggtctgcacgaggggcagagagtcgggcccgtctccgccgtcggagtgactgcaccccagcaggaggagacacccccagccactgaatcacccctggagccgaggctgggtgagctgactgtcacagatgttacgccaaattcagtgggactgagttggacagtcccagaaggccagtttgactcattcatcgtacagtataaagataaggacggacagccccaggttgtgccagttgcagccgatcagagagaggtgacggtgtacaatttagaacccgaaaggaagtataagatgaacatgtatgggctgcatgacggtcagcggatgggccctctgtcagtggttatcgtgacagctcccttaccgcccgccccagcaacggaagcctccaaaccgcccctggaacctaggctcggcgagctgacggtaacggatatcacaccggactcggtcgggctttcatggaccgtacccgagggagagttcgatagcttcgtggtccaatataaagatagagatgggcagccacaggtagtgcctgtggctgcagatcagcgggaggtcacaatcccagacctggagccatcacgaaaatataagttcctactattcggtatccaggatggcaagcgccgctcccccgtatccgtggaagctaaaaccgtggctaggggggatgctagccctggcgcccctcctcgcctaggcgaactctgggtcacagatcctaccccggattccttgaggttgagttggactgttccagagggccagttcgactcattcgtggtccaattcaaagataaagacggcccccaggttgtcccggtggagggtcatgagcgaagtgtcacagtaacacctctcgacgctggaaggaagtacaggtttctgctctacgggctgctgggaaagaagaggcacggtcctttgacagcggatgggaccacagaggctagatccgctatggacgacaccggtactaagcggccgccaaagcccaggctgggggaagagcttcaggtcaccactgtaacccagaatagcgtcgggctatcctggacggtacccgagggtcagtttgattcctttgtggtgcaatataaggatagggacggacagccccaggtggtgcccgtcgagggctcacttcgcgaggtgtcggtcccgggtcttgacccagcccatagatataagctactactgtacggcctgcatcacggcaagcgcgtcggacctatctccgctgtagcgatcacagcaggacgggaagagacagagaccgaaaccacggctccaaccccccccgccccagagccccaccttggagaactcaccgtcgaggaggccacctctcacacacttcatctctcatggatggtcaccgaaggtgagttcgatagctttgagattcagtacaccgatcgggatggccagcttcagatggtgcgcataggaggagatagaaatgatattacactttccggccttgaaagcgaccacagatatcttgtgaccctctacgggtttagcgatggcaaacatgtaggtcccgtacacgttgaagcgctgaccgtgccagaagaagaaaaaccctcagaaccccccaccgccacccctgagccgccgattaaaccgagactgggggaattgaccgtgaccgacgctacaccagactcactaagtctgtcgtggactgtgcccgagggtcagttcgatcacttcctagtgcagtatagaaatggagatggccagcctaaagctgtgcgcgtgccagggcatgaggagggggttacaatctccggactcgagccagaccacaaatataaaatgaatctgtacgggtttcatggcggccagcggatggggcctgtaagcgtagtgggagtgaccgccgccgaggaggagaccccaagccccaccgagccaagcatggaagctcccgagcctgcagaagagcctctcctgggcgagcttaccgtcacaggctcatctcctgactccctcagtcttagctggacagttccccaaggtaggttcgacagctttaccgtccagtataaagatagagatggaagaccacaggtagtcagggtcggaggcgaggaaagtgaagtgaccgttggtggcctggaaccggggagaaagtataagatgcacctctacggcttgcatgaagggagacgcgtgggtcccgttagtgctgtcggagtaacagcccccgaagaagagtcgccagacgctccgctcgcgaagctgcgactcggacagatgactgttagggacatcacaagtgactctctcagcctgagttggaccgtgcctgaaggccagttcgaccattttctggtgcagttcaagaacggggacggccagcctaaagctgtgcgcgtgcctggccacgaagatggtgttacaatctccgggcttgagcccgaccacaagtacaaaatgaatctgtatggctttcatggcggccagagggttggcccggtctctgccgtgggcctcaccgcgcccggaaaggacgaagaaatggcccctgcaagtaccgaaccaccgacacctgaaccacccataaagcctcgactggaggagctcactgtcactgacgctacccccgactctttgtcactgagctggacagttcccgagggacagttcgaccactttttggtacagtataaaaatggggacgggcagcctaaggctacacgcgtgccgggccacgaggatcgcgttaccatctccggtctcgaaccggataataagtataagatgaatttatacggctttcacggagggcagagagtcggtcctgtgagtgctatcggcgtgactgccgctgaggaagaaacccccagccctaccgaaccaagcatggaagcccctgagccaccagaggagcccctgctgggcgaattgactgtgactggaagtagccccgatagtctcagcctaagctggaccgttccccaggggcgctttgattcctttaccgtgcagtacaaagatcgtgacggcagacctcaagtggtccgtgtcggaggcgaagagagcgaggtgaccgtcggaggattggagccgggacgcaagtataagatgcacctgtatggccttcatgaaggccgccgggttggccctgtgtcaaccgtgggcgtcactgccccacaggaggatgtggatgagaccccttcccccaccgagcccggcacggaggccccagagccaccggaagagccactcttgggtgaactgaccgtaaccggttcttccccagatagcttgtctctctcttggaccgtgcctcaagggcgatttgatagcttcactgtgcagtataaggatagagatggcagaccgcaggctgtgagggttggagggcaggaaagcaaggtcactgtgcggggacttgagcccggcaggaaatataaaatgcacctgtatggcctgcatgaaggaagacgcctaggtccagtatctgcagtgggtgttaccgaggatgaggccgaaactactcaggctgtcccgacgatgactcctgaaccccccattaagcctcggctgggcgagctcaccatgacagacgctacacccgacagcttgtccctcagctggactgtgccggaggggcaattcgaccatttccttgtgcaataccggaacggtgacggccagcctaaagcggtgagggtcccaggccacgaagacggtgttaccatctctggcctagagcctgatcacaagtacaaaatgaatctgtacgggttccacggaggacagagggtgggcccaatttctgtcatcggcgtgactgctgcggaggaggaaactccctcacccaccgagttgtctactgaggccccggaaccccctgaggaaccgctactcggcgaactaacagtgacaggctcaagccctgatagtctttccctctcttggactatcccacaggggcatttcgacagttttactgttcagtacaaagaccgggacgggaggcctcaggtcatgcgcgtgcgtggcgaggaatctgaagtgacagtgggcgggctggaaccaggaagaaagtataagatgcacctgtatgggctccacgaaggcagaagggtgggaccagtatccacagtcggcgtcaccgaggacgaggctgagacgactcaggcagtacctaccactactcccgaacccccaaataagccacgccttggggagctgacagtcacagacgccacccccgatagcctgtctctgtcttggatggtcccagaaggccagtttgaccattttctggtgcagtataggaatggtgacggacaacctaaggtggtcagggtcccgggtcacgaagacggagttacaatatctggtcttgaacctgatcataaatataagatgaatctttacggtttccacggtggacagagagtgggtcctatttccgtgattggggtgacagccgctgaggaggagacacccgcacccaccgagccttcaactgaggcccccgaacctccagaggagcctttactgggcgaactcacagtcaccgggtcttcccctgactcattgagcttgtcctggactattccacagggtaggtttgacagcttcactgtgcagtataaggaccgggacggcagacctcaggtggtgagagtgcgcggggaggagagtgaggtcacggtggggggcctggaacctggatgcaagtacaagatgcatctttacggcttgcacgaaggccagagggtgggccccgtgagcgccgtaggtgtgacagcgcctaaggacgaggccgagaccacacaggcagtgccaacaatgacacccgaaccccccatcaaacccaggctgggagaacttaccgtcacagatgctacgcccgactctttatccctctcatggatggtgcctgaaggccaattcgaccacttcctcgttcagtaccggaacggggacggtcagcccaaagctgtacgagtccctgggcatgaggatggcgtcactatttccggcctggagccggatcataagtataaaatgaacttatacggctttcacggaggacagagggtggggcctgtgtccgctattggcgtcactgaagaggagactccaagccctactgagccatctacagaagctcccgaagcaccagaggaacctctcttgggtgagctcaccgtgaccggttcgtcacctgactccctctctctgtcctggaccatacctcaggggagatttgatagttttaccgtgcaatacaaggacagagatggccagccccaagtggtgagggtccggggcgaggaaagcgaagtcaccgttggcggtcttgagcctggtagaaaatacaaaatgcacctgtacggactgcatgaaggccagcgggtcggtccagtgagcacagtaggaattacagcacccttgcccacccctctccctgtagagcctcgcctgggggaacttgcagtggctgcagtgacgtcagactccgtgggactgagttggacagtggcccaggggcccttcgattcttttcttgtccaataccgggacgcgcaggggcagccgcaggctgtccccgtgagcggcgacctccgtgcagtggcggtctctgggctggaccctgcgagaaagtataagtttctactgtttggcctgcaaaatgggaaaaggcacgggccggtccctgtggaagcacgcactgctcctgatactaagccgtctcccagactcggagaattgacagtgacagatgctaccccggacagtgtggggcttagttggacggttcctgagggcgaattcgactcattcgtggtgcagtataaagacaaagacggcaggctccaggtggtgccagtggctgccaaccagcgggaggtcaccgtgcagggcctggaaccctcaaggaagtatcggttcctgctgtacggactttccggcagaaagcgcctcggacctatttcagccgacagcacgaccgcaccactggagaaggagctgcccccccatctgggcgagctgaccgtggcagaggaaacctctagttccttgcgactgagttggacagttgcgcagggccctttcgatagcttcgtggtacagtatcgtgatacagatggtcaacccagagctgtcccggtggctgccgatcaacggaccgttacggtcgaagacctggagcctggcaagaaatataagttcctgctgtacggcctgctgggaggcaagcgtctgggacctgtctcagcgctcggaatgactgctcctgaagaggataccccggctccagagctagcccccgaagcgcccgagcctcccgaagaacctaggctgggtgtgctgaccgtcacagacaccactcctgatagcatgcgcctaagctggtccgtggcccaaggccccttcgacagctttgtagtgcagtacgaggacacgaacggtcagcctcaagcactcttggtagatggagatcagtccaagatcctgatttctggtctggagcctagcaccccctataggtttttattatatggcctgcatgagggtaaacggttgggcccgctgtccgccgagggcacaaccggcctggccccagctgggcaaaccagtgaggaatcacgacctcggctgagtcagctctccgtgactgacgtcacaacctcctcgcttaggctgaactgggaggcacctccaggagcctttgattccttccttctgaggttcggagttccctccccctctactctggagccacatccaagaccactgttgcagcgcgagctgatggtacccggtacccgtcatagtgcggtcttgcgagaccttcgtagcggaacactttattcactgactctgtatggtctgcgaggccctcataaggccgattcaattcagggcaccgcccgcactctcagtccggtgctcgaatcacctcgagatcttcagttttcagaaatacgggaaacctcagccaaagtgaactggatgcctccgccctctcgagcagattctttcaaagtcagctatcagcttgcagatgggggtgagccacagtctgtgcaggtcgatgggcaggcaagaacacagaagctccaggggctgattcctggcgcccgctatgaggtcaccgtggtatccgtacgcggctttgaagagagcgagcctttaactgggtttctgaccacagtgcccgatggaccgacacagcttcgtgccctgaacttgactgaaggcttcgcggtgctccattggaaaccgcctcagaaccctgtcgatacttacgatatccaagtcactgcgcctggcgccccgccactccaagccgagacgcctggatcagccgtggactatccgctccacgatctggtgctgcatactaactacaccgccacagtgcgcgggctgagaggtccgaacctgaccagccccgcctcaatcacgttcactacgggcctggaggctccaagggacttggaagccaaagaggtcacaccccgcacagctcttctgacatggaccgaacctcctgttaggcccgccggctacctgttgtctttccacacgccgggcgggcagacgcaggagatcctgctgcctgggggcatcacctctcatcagctcctggggctgttccccagcacctcttacaatgctcgactgcaggcaacatggggtcaatccctgctgccacctgtttcaacttccttcactactggcggactgagaatccccttcccaagagactgcggggaagagatgcaaaatggggcaggggccagtcggacaagcactatctttctgaatggtaatcgcgagcgacccctgaacgtgttttgcgatatggaaaccgacggcggcggctggcttgtgttccaaaggcgtatggacggccagaccgatttttggagggactgggaggattatgcgcacggttttgggaatatctccggagagttctggcttggcaatgaggctctgcacagccttactcaggcaggagactattcgatgcgggttgatttgagagccggggacgaagccgtgtttgcccagtacgactcgtttcacgttgactctgccgccgagtactaccgactccaccttgagggataccacggtaccgccggtgattccatgtcttatcactcagggtctgtgttttccgcgagagatagggatcccaacagtcttctgatcagttgtgcagtgagttacagaggagcgtggtggtatcgtaactgtcactatgctaacttgaatgggctgtatggaagcactgtcgaccatcaaggagtttcatggtatcactggaagggtttcgaattcagcgtgccgttcactgagatgaagttgaggccacggaatttcagatctcctgccggcggggggtag

SEQ ID NO: 201530 - DNA, 654 bp, Artificial Sequence
  derived and/or modified sequence
gcccccggcaaggacgaggagatggcccccgccagcaccgagccccccacgcccgagcctcctatcaaaccacgccttgaagagttaacagtgactgacgcaacccccgacagtctgagtctctcctggacggtccccgagggccagttcgaccactttctggtgcagtacaagaatggagacggacaacctaaggccacccgggttcctggacacgaggatcgcgtcacgatcagcggccttgagcctgacaacaaatataagatgaatctatacgggtttcatggcggtcagagagtggggcccgtcagcgcgatcggggtgaccgcagcggaagaagagactccatcgccaaccgagccctccatggaggctccagagccacccgaagagcctcttttaggagaactcacagtgacgggatctagccctgacagtctgtcactttcctggacggtgccacaaggtcgatttgacagttttacagtccagtacaaggatagggatggtcggcctcaggtggtgagggttggtggtgaggagagcgaagtgaccgtgggaggactcgagcccggtcgcaagtacaaaatgcacttgtatggtctgcatgagggccggagagtgggaccagtttctacagtgggagtcacttag

SEQ ID NO: 201531 - DNA, 942 bp, Artificial Sequence
  derived and/or modified sequence
accgagcccggcaccgaggcccccggcccccccgaggagcccctgttaggcgaacttaccgtcaccggatcgtctccagatagcctgagcctaagctggacggtcccacaggggcgattcgattcttttacagttcagtataaggacagggacgggcgcccccaggcagttcgggttgggggacaggagagcaaggttacagtcaggggcctagagcccggcaggaaatataaaatgcacctttacggtttgcacgagggccggaggctcggtccagttagtgcggtgggagtgactgaggacgaggcagagactactcaagcagtccctacgatgacaccggagccgcctatcaagcccagacttggtgagctcactatgactgatgctacgcctgattctttgtccctttcctggacagttcctgaggggcagttcgaccacttccttgtccaataccggaatggagacgggcagccaaaagccgtgcgcgtaccagggcacgaagacggtgttaccatctccggactggagcctgaccacaaatacaaaatgaacctttatggctttcacggagggcaacgggtggggcccatcagtgtgatcggcgtaaccgcggcagaagaggaaaccccaagccctacagaactgtcgacggaggcacccgagcctccagaggagcccctgctcggagagttaacggtgactggatcatccccggattccctttcccttagttggacaatcccccaggggcattttgattccttcacagttcaatataaggatcgagacgggcggccgcaagttatgcgtgttcggggggaggagtcggaagtcacagtgggcggcctggagcccggtcggaagtacaagatgcacctatacgggcttcatgaggggaggagggtcggacccgtttcaaccgtaggcgtgacatag

SEQ ID NO: 201532 - DNA, 942 bp, Artificial Sequence
  derived and/or modified sequence
atgacccccgagccccccatcaagccccggctgggcgagctgaccatgaccgacgcgacccctgactcactttctttgtcttggacagtgcctgagggccaatttgaccactttttggtgcagtataggaatggggacgggcagcctaaagcagttcgggttcccgggcacgaagacggagtgaccattagcggcttggagcccgatcacaaatataagatgaacctgtacgggttccacggtggccagcgcgtcggccctatttcagtcacaggcgtgaccgctgctgaggaggagaccccatcaccgactgaactgagcacggaagcacccgagccccccgaggagcctctgctcggggagctgaccgtgacagggtcatctcctgacagtctgagcttgtcttggacaatccctcagggccattttgacagctttactgttcagtacaaggatcgggacgggagacctcaagtgatgagagttcgaggcgaagaatctgaggtaacagtggggggtctagagccaggacggaagtataaaatgcacctttatggtctgcacgagggaaggagggtgggacccgtgtccacagtcggagtcactgcacccgaggacgaagaggaggaaactcccgcacccacagagccctctactgaagccccagagccaccagaggaacccttgcttggcgaacttaccgtgacaggatctagccctgactccctcagcctgtcctggaccattcctcagggcagattcgacagctttaccgtgcagtataaggaccgagatggccgaccacaggttgtgcgagtgagaggagaggaatctgaggtgaccgtgggcggtctcgagccaggatgtaagtataaaatgcacctctatgggctccatgagggacagagagtggggcctgtcagtgcagtgggtgtgacttag

SEQ ID NO: 201533 - DNA, 1281 bp, Artificial Sequence
  derived and/or modified sequence
gccggcgaggactgcggcgaggaggtgcccaccatcgagggcatgaggatgcacttgctggaggaaactacagtcagaacggagtggacaccagcaccgggccccgtcgacgcttatgagatccaatttattcctacgaccgagggcgcaagcccgccgtttactgctagggtgccatcatcagcttcggcctacgaccagcgaggcctggcccctggacaagagtatcaagtcaccgttagagcattacgcggcacatcttggggcttgcctgcttcgaaaaccattactaccatgattgacgggccacaggacctgcgggtggtggccgtcactcccacaacgctggagcttggctggctaaggcctcaggccgaagtggacaggtttgtggtgtcttatgttagtgccggtaaccagcgcgttcggcttgaggtgcctccagaagccgatggaacccttctaacggacttgatgcctggagtggaatacgtggtcacagtaaccgctgagagggggagagcagtttcttatcccgcgagtgtacgggcaaataccgggagcagtcccctgggtctgttaggcaccaccgacgagccaccacccagtggcccctccactacacagggcgcccaagcccctctcctccagcagaggccccaggagctcggcgagctgagggtgttaggccgcgacgagactgggagactgcgtgtagtgtggacagcccagcccgatacatttgcatacttccagctccggatgagagtccctgagggacctggcgcgcatgaggaggtcctccctggtgatgtcaggcaggctctggtgccacctcctccacccggcacaccctacgaattgtctctgcacggcgttccgcccggaggaaagccaagtgacccaattatctaccagggcattatggataaagacgaagagaagccgggcaagtcgagcgggccaccaagacttggcgaactgacggtaaccgataggacctccgatagcttgctcttaaggtggaccgtgccggaaggggagtttgattcttttgtcatacagtataaagaccgggatggccagccacaggtcgtgcctgtcgaaggaccgcagaggtccgcagtgatcactagtcttgacccaggccgcaaatacaagttcgtcttgtacgggttcgtcggcaagaagcgccatgggcctttggtcgctgaggctaagattcttcctcaaagcgacccttcacccggaactccgcctcacttgggaaacctgtggtag

SEQ ID NO: 201534 - DNA, 2598 bp, Artificial Sequence
  derived and/or modified sequence
ctgtacggcctgcggggccggcagcgggtgggccccgagagcgtggtagccaagacagcacctcaggaggacgtggatgagaccccctccccgacagaactaggcactgaggcacctgaatctcctgaggagcccttacttggcgagctgacagtgacagggtccagtcctgattctctgtcgttgttttggaccgtgccccaagggtcctttgacagcttcacggtgcagtataaggacagagatgggagaccaagagccgtccgggtgggagggaaggagagcgaagtgactgtggggggactagaaccaggccacaaatataaaatgcacttatatgggttgcatgaaggacagcgagttggcccagtaagtgctgtgggcgtgaccgctccacaacaggaggaaacccctcctgctacagaatcacctcttgaaccacggctcggagagttaaccgtgaccgatgtaacccccaatagcgtaggtctgtcctggacagtgcctgagggccagttcgactcattcatagtccagtacaaagataaggatggtcagccacaggtcgtccccgtggcggcggatcagcgagaggtgactgtgtacaacctcgagcccgaaaggaagtacaagatgaatatgtatggcctgcacgatggacagcggatgggacctctgtctgtggtcatcgttaccgcgccgctgcctcccgcccccgccactgaagcgagcaaacctcctctagaaccacgacttggtgagctgacagtgaccgatattactcctgatagtgtgggactgagctggaccgtgccagagggtgagttcgacagcttcgtggtgcagtacaaagacagagacgggcagccccaggtcgtgcccgtcgccgcagaccagagggaagtgaccatccctgacttggaaccatctagaaaatataagttccttctcttcggaattcaggatggaaagagaagaagcccggtctccgtggaagcgaaaacagtcgctaggggcgatgcttctccaggagcccctccccgtcttggcgaactgtgggtcaccgaccctaccccggattctctgcgcttgtcctggactgtccccgaggggcagttcgactcatttgtggtgcagttcaaggacaaagacggccctcaggtggtgccagttgaaggccacgagcggtctgtgaccgttactcccctcgatgccggaaggaaataccggtttcttctgtatgggttgttgggcaagaaacgccacggcccactgaccgccgatggcaccaccgaggctcggagcgctatggacgacacagggaccaaaagaccccctaagccacggctgggggaagagctgcaggttacgacagtaacccagaattctgtcggtctgagctggacagtaccggaaggccagttcgactctttcgttgttcaatacaaggaccgcgatgggcagcctcaggtggtgccggtggaggggagcctgagggaggtgagcgtaccgggcctcgacccagcacataggtacaagctcctcctctacggcctgcatcacggtaagcgcgtgggtcccatctctgcagtggccatcacagccgggagggaagagactgagacagagaccactgcccccactccacctgccccagagccacacctgggagagctcactgtggaagaagctacttctcacaccctgcacttaagctggatggttacggagggagaattcgacagcttcgagatacagtatacagaccgggacggccagctccagatggttaggatcgggggcgacagaaacgacataactctgtctggactcgagtccgatcacagatacctagtgacgctctatggcttctcggatggaaagcacgttggacctgtgcacgtggaggccctgacagttcctgaagaagagaaaccttccgaaccaccaacggccacccccgagcctcctattaagcctcgcctgggagagctgaccgtgaccgacgccacccccgactcactcagtctcagttggacagttccagagggccagttcgaccatttccttgtccagtatagaaatggagacggccaacccaaggctgtccgggtcccaggccacgaagaaggcgtgacaatatctgggctggagcccgatcacaagtacaaaatgaatctgtatggttttcacggaggccagcgtatgggccctgtgtctgttgtcggcgttaccgcagctgaagaagaaacaccttcgccaacggagccatcaatggaagcgccagaacccgcggaggagcctttgttaggggaattgactgtcacggggtcctctccagatagcttaagcctgtcttggaccgtcccccaggggaggttcgatagttttacggttcagtataaagaccgggacggtcggcctcaagtggtccgggtcggtggagaggagtcagaggtgaccgtgggtggtttggaacctggcaggaagtacaagatgcatctctacggcctgcatgaagggcggagggtgggtcccgtttctgcggtgggtgtgacggcccccgaggaggaatcccccgatgccccattggcctag

SEQ ID NO: 201535 - DNA, 12669 bp, Artificial Sequence
  derived and/or modified sequence
atgatgccagcccaatacgcactgaccagcagcctggtgctgctggtgctattgagcactgctagggccggtccctttagttcacgctctaacgtcacactccctgccccaagacccccaccccaacccggaggccataccgttggtgccggtgtgggcagtccctcgagtcaactctatgaacacaccgtggaaggaggggaaaagcaggtggtgtttacacacaggatcaacctacctccctcgacaggatgcggttgcccacccggtactgagccgccagttctagcaagcgaagtgcaggccctccgggttaggctagagatcctcgaggagcttgtcaaagggcttaaggaacagtgtactgggggatgctgcccagcaagtgcccaggcagggaccggacaaaccgacgtccgaaccctatgctcacttcatggagtgtttgatctctcccggtgtacctgttcttgcgagcccggttggggtggacccacctgttcagatcccaccgatgccgaaatccccccttcctctcccccatctgccagcggcagttgccccgatgactgtaatgaccaggggcgatgtgtgcggggacggtgtgtctgctttccaggctatactggcccttcctgcggatggccatcgtgccccggagactgtcagggacgcggtagatgtgttcagggcgtctgcgtgtgtcgggctgggttcagcggcccagactgttcacagaggtcctgcccaagggggtgttctcaacggggacgctgtgagggtggtcgttgcgtgtgtgatcccggttatacaggcgatgattgtgggatgagatcttgccctcgcggatgcagtcagagggggagatgtgaaaatggcaggtgcgtctgcaatccagggtacgccggtgaggactgcggagttcgcagctgccctagaggttgtagccagcgaggcaggtgtaaggatgggcgatgcgtttgtgaccctgggtataccggcgaggactgtggaacgcgctcttgcccatgggactgcggagaaggaggtcggtgcgtggacggacgctgtgtgtgctggcccggatacaccggagaggactgttcaacccggacatgccccagggattgtaggggcagaggcagatgcgaggacggcgaatgcatatgcgacaccggttacagcggcgatgactgtggggtacggtcttgtcccggagactgtaatcagcgtgggcgatgtgaggatggaaggtgcgtgtgctggcctggatatactgggaccgattgcgggagtagggcatgccccagagattgtcgcggtagaggcagatgcgaaaacggggtctgtgtttgcaatgccggttatagcggggaagactgcggtgtgcgctcgtgccctggagactgtagaggcagagggagatgcgagagtggtcgctgcatgtgctggcccggatatacagggagggactgtggaaccagggcgtgtcccggagactgccgcggaaggggacgatgcgttgacgggagatgtgtttgtaaccctggctttacaggagaggattgtggatcacgacgctgcccaggtgactgtaggggccatggcttgtgcgaggatggggtgtgcgtatgtgatgcgggttactccggcgaagattgctccacccgttcgtgccctggagggtgccgcggacggggacaatgcctcgacggtaggtgcgtttgcgaggatgggtacagcggcgaggattgtggagtgaggcagtgccccaatgactgtagccagcacggtgtgtgccaggatggggtgtgcatctgttgggaaggttatgtgtctgaagattgctcaattcgaacttgtccaagcaactgtcatggtcgaggacgctgcgaagaggggaggtgtctctgtgatccgggatacaccgggcctacatgtgctacaagaatgtgccccgcagattgtcggggacgtggcaggtgcgtgcagggggtttgtctctgccacgtgggttacggcggagaggactgtggacaagaggagccaccggctagcgcttgtcccggtggttgcggacccagggaactttgtcgcgcaggtcagtgcgtctgcgtggaaggtttccgcggaccagactgtgccatccagacatgcccaggcgactgtcgtggacggggagaatgtcatgacgggtcttgcgtgtgcaaggacggatacgcaggtgaggactgcggtgaggaagtgcctacgatagaaggcatgcggatgcatttactggaggagacaaccgtgagaaccgaatggacacctgctcctgggccagtcgatgcatatgagatccagtttatccctaccacagaaggagcaagtcccccttttactgcacgcgttccctcatccgcatccgcgtatgaccagcggggattggcccctggccaggaataccaagtgacagtgcgagctcttagagggactagctggggactgcctgcctctaagacgataactactatgatcgatggcccacaagacctgagagtcgtggcggtgactcccacaacgctcgaattggggtggctcagaccacaagcagaggtagaccgtttcgttgtgtcctacgtgtccgctgggaatcagcgtgttcgactggaagtgccacccgaggccgacggaaccctgctaacagacctgatgcccggtgtcgaatatgtggtgaccgtgaccgcagaacggggaagagccgtgtcctacccagctagtgttagggccaacactggctcctctcctcttggtctgctgggcacaacggacgagcctccgcctagcggcccttccactacccagggcgctcaggccccactcctgcagcagcgcccacaagagcttggagagctgcgagtgctgggaagagatgagaccggtaggctccgtgtagtgtggacggctcaaccggacacgtttgcttatttccagctccgcatgcgcgtgccagaaggacctggtgcccacgaggaggtgctccctggcgatgtgcgccaagccctggtgcctcctcctcctcccggaaccccttacgagctgtcattgcatggtgtaccaccaggaggaaaacccagcgaccccatcatctatcagggcattatggacaaggatgaggagaagcctggcaagtcatccggtcccccaaggctaggagagcttacggtgacagaccgaacaagtgattcgttactgttacgttggacagttccggagggagagtttgattccttcgtgatccagtataaagaccgggacggccagccacaagtcgtgcccgtggaggggccacagagaagtgcagtcattactagcttggatccgggacggaaatataagtttgttctttacggtttcgtcggaaagaaacgccacggccctctcgttgccgaggctaagattcttcctcaaagtgatccttcgcctgggactccaccacatctgggcaacttatgggtgaccgaccccaccccagactctttgcacctgtcttggaccgttccagaaggtcaattcgatacatttatggtccagtaccgggatcgggatggaagaccccaggttgttccggtggaaggacccgaacggtcatttgtggtctcgtcattagaccccgaccataagtaccgctttactctgtttggcattgccaataagaagagatacggaccactgaccgcagatggcacgaccgcccctgagcgcaaagaagaacctccacgacccgagtttctggagcagccactgttaggtgaactgaccgtcaccggggtgactcccgattcgctaaggttaagctggacagtggcccagggtccattcgactcattcatggtccaatataaagacgcccaagggcagccacaggcagtgcctgttgctggcgacgagaatgaagtgacagtgcccggattagacccagatcggaaatacaaaatgaatctgtatgggttacgcggaagacagagagtcgggccagagtcagtggttgctaagacagcaccgcaagaggacgtggatgagaccccgtcccctaccgaactggggacggaagctcctgagtctcccgaagaacctctgctaggcgaactgacggtgactggaagcagtcctgattcactttctctgttctggaccgtgccacagggatctttcgactcctttaccgtgcaatacaaggatcgcgatggacgccctcgggcagtgcgcgttggcggaaaggaaagcgaagtgactgttggagggctggaacctgggcacaagtataagatgcatctgtatggactgcacgaggggcaaagagtgggccctgtgagcgctgtgggtgtcacagccccacaacaagaggaaacgccacccgcaaccgaatccccattggaaccgcgactaggtgagttgaccgtcacagacgtcaccccaaacagcgttgggctgagttggactgtgcccgagggtcagttcgattccttcattgtgcagtataaggataaggatggccaaccacaggtcgtgcctgtggccgcagatcagagagaggtcaccgtttataacttggagcccgagcgtaagtataagatgaatatgtacgggctgcatgatggacagagaatgggccctctctcagtggtaatcgtcactgccccactgccacccgctcctgctactgaggcctctaagccgcctttagaacccagattaggggagctgaccgtgacggacattacccctgattctgtgggattgtcctggacagttccggaaggcgaatttgactcctttgtagtccagtataaagaccgcgacggacagccccaggtcgttcctgtggctgctgaccagcgagaagttactattcctgatctagagcccagcaggaagtacaagtttttgttgtttggcattcaagacggaaagcggaggagcccagtctctgtggaagccaaaaccgtagctagaggggatgcttctccgggagcgcctccccgacttggggaactgtgggtgaccgatcctaccccagatagcctgaggttatcttggaccgtgccggagggccaattcgactcgtttgtggtgcagtttaaggacaaggacggtccgcaggtcgttcctgtcgaagggcacgagagaagcgtcaccgtgactccactagatgccggtcggaaatatagatttctgctgtacggcctgcttgggaagaaaaggcatgggcctttaacagccgacggaactaccgaggctcgctccgccatggacgataccggcacaaagaggccacccaaacctcgcctcggtgaagaactccaggtgaccacagtgacacagaactctgttgggttgtcttggactgtgcccgaaggccagttcgattccttcgtagttcagtacaaagatcgggacggccagccacaagtggtgccggtggagggcagtctccgggaggttagcgtcccaggtctggatcccgcacaccgatacaagttgctcctctatggcctgcaccacggaaagcgagtgggacccatttcagcagtcgccattaccgctggaagagaggagacggaaaccgaaaccacagcccctaccccacctgcacctgagccacatctgggagaattaacagttgaagaggcaaccagccacacccttcacctgtcctggatggttacagagggggagttcgacagctttgagatacaatacaccgatagagacggccagctgcagatggtccgcattggcggtgacagaaacgacatcaccctctcaggactggagtctgatcatagatacctcgtcaccctgtacgggttcagtgacggcaagcacgtgggccctgttcacgtagaagcactgacagtgcctgaggaagaaaagccttcagagcctccaacggctacccctgaacctcccattaagcccagattaggcgagttgacggtgactgatgccacccctgattctctgtcactgtcttggaccgtgccagaagggcagttcgatcattttctggttcagtaccgtaacggagatgggcagcctaaggccgttagagtgccaggccatgaggagggcgttactattagcggtttggaacctgaccacaaatataagatgaacttatatgggtttcatgggggacagcgaatgggccctgtcagcgttgtcggagtgaccgcggctgaggaggagactcccagtcctactgagccatctatggaggcccctgaacccgctgaagagccactgctgggagagctaacagtgacaggatcatctcctgactctctatccctatcttggaccgttccacaaggaaggtttgattcattcaccgtccagtacaaggaccgggatgggaggccccaggtggtcagagtgggaggcgaagaatcggaggttactgttggcggacttgagcctggaagaaaatataaaatgcacctgtacgggctccacgaaggtcgacgtgtgggtcctgtgagtgctgtcggtgtgactgccccagaggaggaatcccctgatgccccactggccaagttacggctggggcagatgacagtccgcgacattacctctgattctctgagcttgtcctggacagtgccagaagggcagttcgaccacttcctggttcagttcaagaacggcgatggccaaccaaaagccgtcagagtgccagggcacgaggacggggttactatctcgggcctcgagccagaccacaagtataaaatgaacctatacggatttcacggaggccagcgggttggtcctgtaagcgctgttggcctcacggcacccggtaaagacgaggagatggccccagcttctactgaaccccctacccccgaaccgccaatcaaaccccgactggaggagttgactgttacagacgcaacaccagactcactgtccttgagttggaccgtcccagagggacagttcgatcacttcctggtgcagtacaaaaatggggatgggcaaccaaaggccactagagtgccgggacatgaggaccgagtcactatctctggtctcgaacccgataacaagtacaaaatgaacttatacggattccacggaggacaaagagtgggccctgtcagtgctataggggtaacagcggcagaagaggaaactcctagccctaccgagccttccatggaagcaccagagcccccagaggaacccctcctcggcgagctgaccgtcaccggaagcagtcccgacagcctgtcgctgtcttggaccgttccccaaggcaggtttgacagtttcactgtgcagtacaaggatcgtgatggcaggcctcaggtggtgcgggtggggggagaggaaagcgaggtcacagtgggcggactggaacctggcaggaaatacaagatgcacttgtatgggctgcacgaggggagacgcgttggcccagtctctacggtgggggtcacggctcctcaggaagacgtagacgagactccttccccgaccgagcctggcacagaggcaccagagccaccagaggagcctctgcttggcgagctgactgtgacaggcagctctcccgattccctgtccctttcttggaccgtgccgcagggtcgattcgattcgtttacagtgcagtacaaggatcgcgatgggaggccacaggcagtgcgggtgggcggacaggagagcaaggtcaccgtgagaggactcgaaccaggcaggaagtacaagatgcacttgtatggcttgcacgagggtaggaggcttgggccagtaagtgccgtgggagttaccgaggacgaggccgaaacaacccaggccgttccgactatgacacctgagccacccataaagcctcggctcggggagctcacaatgacggatgcaacaccggattctttatctctgagctggactgttcccgagggccagtttgaccactttttggtgcaataccggaatggggatggacaacctaaggccgtcagagtgcccggacacgaggatggagtcaccatctctggcctcgagcccgatcacaagtacaagatgaatttgtatgggtttcacggagggcagagggtagggccaattagcgtgataggcgtcacagccgcagaagaggaaaccccttctcccaccgagctttcgaccgaagcgcctgagcctcccgaggaacctctgctcggagagcttaccgtgactgggtcttctccagactctctaagtctcagttggaccataccacaaggccactttgatagcttcaccgtgcagtataaggatcgtgatggtagaccacaggtcatgcgagtccgcggagaggagagtgaagtcaccgtgggcggactggaacccggaagaaaatataaaatgcatctgtacggactgcacgagggcaggcgcgtcgggcctgtgtcgactgttggcgttacagttcctactacgacaccagaaccccctaacaagcccaggctgggagagttgacagtcactgatgcaactccggactcactgagcctctcgtggatggtgcccgagggacagtttgatcactttctggtgcagtatcggaatggggacggccagccaaaggtagtacgagtgcctggacacgaggatggcgttacgattagcggtttagagcctgaccataaatacaaaatgaacctgtacgggtttcatggcggacagcgggtcggccctatatcagtgatcggcgtgaccgcggcagaagaggaaactcccgcacccacagagccgagcaccgaggcacccgagcccccagaagagccacttctgggagaattgacagtaacgggatcatcccccgactcattgtccctttcctggacaatcccccagggcaggtttgattccttcaccgttcagtacaaggatcgggatgggaggccgcaagtcgtccgcgtccgcggagaagaaagcgaagtcactgtaggagggctggaacccggatgcaagtacaagatgcacctttacgggctccacgaaggacagagagtcgggccagtgagtgccgtgggcgtgaccgtgcctacgatgactcccgaaccgcctatcaagccaaggctcggtgaactgacagtgaccgacgcaacacctgacagtctgagtctatcttggatggttcctgaaggccaattcgatcattttctggttcagtatagaaacggagacgggcagccgaaagccgtcagggtgcccggacacgaggacggtgtcactataagtgggctggaacctgaccacaaatacaaaatgaacctgtacggattccatggcggtcagagagtgggcccagtgtcggcgataggggtgacagaggaggaaacccccagtccaactgagcccagcaccgaggccccagaggccccagaggagccactccttggcgaactgactgtgaccggcagttcacctgactcactctcattgtcgtggaccgttccccagggccgatttgattcattcaccgtccagtacaaagaccgcgacggtcagccacaagtggtccgagtgcggggagaggaaagcgaggtcacagtcggaggactggagccaggcaggaaatacaagatgcatctatatggcctgcacgaagggcagcgtgttggcccagtgtcgactgtggggatcactgctcccctgcccacgcctctccctgtggagccacgcctgggcgagctggctgtggcggctgtgacctcagatagtgtcgggctgtcctggacagtcgcccaaggccctttcgattccttcctcgttcagtatagggacgcccaaggacagccacaggcagtgcctgtctccggcgaccttcgggctgtagcagtgtcagggctcgaccctgctcgcaagtataagttcctgttattcggtctgcagaacggcaaacgacatggcccagtgcccgtggaagccaggactgcgcctgacaccaaaccttccccacggctgggagaactcacagtaacagatgctacaccagactctgtggggctgtcttggactgttcccgaaggggaattcgatagttttgtggtacagtataaggacaaggacggaaggctgcaggtcgtccctgtggctgccaaccaacgcgaagtgacggtccaggggctagaaccatctcgcaagtatcggtttctactctacggtttgtccggtcggaaacgactcggccctatctcagcagattccacaaccgcgccactcgagaaggagctccccccacatctgggtgaactgaccgtagctgaggaaacaagtagtagcctacgcctcagttggaccgtcgcccaaggccctttcgactcctttgtggtgcaataccgggacacagatggccaaccacgggctgtgcccgttgccgcagaccaaaggaccgtcacagtggaagacctggagccaggtaagaaatacaagtttctcctgtacggtctgctggggggtaagagactcggacccgtttccgccctcgggatgaccgccccagaggaggacacgccagctccggagctagccccagaagccccagaacccccagaagagccacgattaggtgttctcactgtgacagacaccacacctgatagcatgcgtctatcgtggtcagtggctcaggggccattcgacagttttgtcgtgcagtacgaagatacaaacggccagccacaggcactgcttgttgacggggaccagagtaagattttgatttccggcttggagcccagcacaccctaccggtttttgctgtacggtctgcacgagggcaagagattgggacccctgtcggccgaaggaacgactggattagcaccagctgggcagaccagtgaagagtccaggccaagactttcacagttaagcgtgacagacgtcacaacctcctctttgcgactcaactgggaagccccaccgggagctttcgacagtttcctactgaggtttggcgtgccgagccctagtactctggaaccccaccctagacccctccttcaacgcgagctgatggttccagggactcggcatagcgcagtgttacgcgatcttaggtctggtaccctgtacagtctgactttgtacggcctgcgcggtcctcacaaagcagacagcatacagggcaccgcacggacattatcccctgtgctcgagagtccaagggatcttcagttcagcgagatcagagaaaccagcgccaaggtaaactggatgccaccgccttctcgcgctgactcattcaaagtctcttaccagttagccgatgggggagagccccagtctgtacaggtggacggccaagctagaacccagaagctccaggggctgattcctggagccaggtatgaggttaccgtagtgagcgtaaggggttttgaggagtctgaacctctgaccggctttcttactaccgtgcccgacgggcctacccaacttagagctctcaatctgacggagggctttgcagtgctccactggaaacctccccagaatcctgtcgatacctacgatgtccaggtgactgcacccggtgcaccgccactgcaggcagagaccccgggatcagccgtagactaccccctgcacgatctcgttttgcataccaactacaccgccaccgtaagaggactgcgcggtccgaatcttacaagccctgctagcattaccttcacaaccggacttgaagccccaagagacctggaggctaaagaggtcacgccacgcaccgccttactgacctggaccgagccacctgtgcgcccagcaggttacctgctcagcttccacaccccgggaggacagaatcaagagatcctgctgcccggaggtatcactagtcatcagctgcttggacttttcccaagcacatcctacaatgcacgcctccaagccatgtggggccagagcctgctgccccctgtctcaacttcctttacaacaggtgggctgagaatcccattcccacgcgactgcggagaggaaatgcagaatggcgcaggtgcaagtcgcacgtctaccatatttttaaatggcaaccgggaaagaccactgaacgtgttctgtgacatggagacagatggtggcggttggcttgtctttcaacgtagaatggacggacaaacagacttctggcgagattgggaggactatgctcatggattcggaaatatctccggggagttttggctgggaaacgaggccctgcacagcctgacccaggctggagactattccatgagagtagatctgcgggctggcgacgaagctgtctttgcccaatatgactccttccacgtcgatagcgcggcagagtactacaggttacacctggaggggtaccacggcactgctggtgacagcatgagttaccattctggaagcgttttcagcgctagagacagagaccctaatagtctgcttatttcctgtgcggtgtcatacagaggagcatggtggtacaggaattgccattatgccaacttgaacgggctatacggcagcactgtagaccatcagggcgtctcatggtatcattggaagggctttgagttcagtgtcccttttactgaaatgaagctcagacccagaaacttccgcagccctgccggtggcggatag

SEQ ID NO: 201536 - DNA, 6449 bp, Artificial Sequence
  derived and/or modified sequence
taagctgaagaggaaacaccatccccgaccgagccgagcatggaagccccagaacccgctgaggagcctctgctcggtgaactgactgtgaccggctcctctcccgactccttgagcttgtcatggacggtcccgcagggcagatttgacagtttcaccgtccagtacaaagatcgcgacgggaggccccaggttgtgcgcgtggggggagaagaatccgaggttacagttggaggcttggagccaggccgaaaatacaagatgcacctgtacggtttacacgaagggagaagggtggggccagtatccgcagtaggagtcactgcccctgaggaagagtcccccgatgctcccctcgccaagctgcggctaggccagatgaccgtgagagacattactagcgactcgttgtctttgtcttggaccgtccccgaggggcagttcgatcacttcctcgtgcagttcaagaacggggatggccagccaaaggccgtccgtgtcccagggcacgaagacggtgtcacaatctctggactagagcctgaccacaagtataagatgaacctgtatggattccatggtggtcagagggtgggccctgtgtctgccgtgggcctgacagctcctggcaaggacgaggagatggctcccgcttcgacagaacctccgacccccgagcctcctattaagcccagactcgaggaattgacagtaaccgacgccactcccgatagcttatccctctcttggactgtccctgaaggacagtttgatcacttcctcgtgcagtacaaaaacggagacggccagccaaaggcaaccagagttcccggtcatgaggatagagtaactatctctggactggaaccagacaacaagtataagatgaatttatacggcttccatggaggccagcgagtcggaccagtctccgcaataggggtaaccgccgcagaagaggaaacgccatcccctaccgagccttctatggaggcaccggagcccccagaagaacctctgctgggggagttaacagttacaggctcgagccccgattccctgtccctgagctggaccgtgcctcaagggagatttgactcattcaccgtgcagtacaaggacagggacgggcgaccccaggtggtgcgggtgggcggtgaggaaagcgaggtgaccgtgggaggtctcgagcccggaaggaaatataaaatgcatctgtacggcctgcatgaagggagacgggtcggtccggtgagtaccgttggtgtgactgctccgcaggaggacgttgatgagacaccgtcccccacagaacctgggactgaggctcccgagcctccagaggagccactccttggggaacttactgtcacgggtagcagtcccgattctctttctctgagctggacagtacctcagggtcgattcgattcattcacagtgcagtacaaggaccgggacggaaggccgcaggctgtacgcgtcggcggacaagagagcaaggtgaccgtcagaggtctcgagcctggtcgcaaatacaagatgcacctctatggactgcatgagggcagaagactgggcccagtctccgccgtgggtgtgaccgaagacgaagcagagaccacccaggctgtcccgaccatgactcctgaacctccaatcaagccacggctgggagagctgaccatgaccgatgcgactccagatagtttgtccctgagctggactgtccccgaaggtcagttcgatcattttcttgtccagtatcgcaatggtgacggccagcccaaggcggtgagagtgccaggacacgaggacggggtaactatctctggtctggagcctgaccacaaatacaagatgaatctgtatggttttcacggtgggcagagggttggccctattagtgtgactggagtgacagccgctgaagaggagactccatcccctacagaactgagcaccgaggcgcctgagccacccgaggaaccccttctgggtgagctcacagtcacagggtcctcgcccgactctctcagcctgtcctggacaataccacagggacacttcgacagctttaccgttcagtataaagacagagacggcagaccccaggtgatgcgggtgagaggcgaggagtccgaagttaccgtgggaggtctggaacccggacggaagtacaaaatgcacttgtacgggctacatgaaggccgaagagttgggccagtgtcaactgtgggtgtcaccgtgcccaccactacacctgagccacctaacaaaccgaggcttggtgagctcacggtgactgacgccacccccgactcactgtccctgtcctggatggtgcccgagggccagtttgatcattttctggtacagtaccggaacggggacggccaaccaaaagtggtgcgagtgccgggtcacgaggatggggtaactatcagtggactggagccggatcacaagtataagatgaacctgtacgggttccatggtggccagagggttggcccaatctccgtgatcggcgtaactgccgcagaggaagagacaccagcccctaccgagccaagtacggaggcgccagaacctccagaggaacctttgctgggagaactaacagttacagggtctagccccgacagtctttcgttgagttggacgatacctcagggcaggtttgattcctttaccgtgcaatacaaggatcgggacggcagacctcaagtcgtgagagtacgcggtgaggagtctgaggtaaccgtgggaggtctcgagcctggctgtaaatataaaatgcatctctatggactgcatgaagggcagagagtgggccctgtgtcggctgtgggcgtgacagtcccaaccatgacccctgaacccccaatcaaacctcgactgggagaactcactgtcaccgatgcaactcccgattcacttagcctttcctggatggttcccgaaggccagttcgaccacttcctagtccagtaccgaaacggcgacgggcagccgaaggctgtccgtgtaccgggtcacgaggacggcgtgactatctcaggcttggaaccagaccacaaatataagatgaacctttatggcttccacgggggacaacgcgtcggcccagtttctgcaatcggcgtgaccgaagaggaaacaccttcccctactgagccctcgaccgaggcgccagaggcccctgaagaacccttgctcggcgaactgaccgtcaccggctcctcacccgacagtctgtcgctgtcatggacagtgccccagggtagatttgactcctttacagttcagtacaaggaccgggatggccaacctcaggtcgttcgagtccgaggcgaggaaagcgaggtcaccgtcggcggtctggagcctggacgaaagtacaagatgcatctgtacgggctccacgaaggccagcgcgtcggcccagtttccactgtgggcattacagctcctctgccaacacctctgcctgtcgaacctcgcttaggagagctggcggtggccgctgtaacaagcgattccgtaggtctctcttggaccgtggcccaggggccatttgacagctttttagtgcagtatcgggacgctcaaggacaaccccaagcagtgccagtgtcgggggacctgcgggctgtcgctgtgtctggtcttgatcccgctagaaagtacaagttccttctcttcggcctccagaacggtaagcgtcatggaccagtccccgtggaagcccgtactgctcctgatacaaagcctagtccaagactgggcgaattgacggtgaccgacgctaccccagatagcgtgggtctgtcctggaccgttcccgagggcgagtttgattcgttcgttgtccagtataaggataaggacggcagacttcaggttgtgcccgtggcagccaaccagagggaggtaaccgtccagggacttgagccatcaagaaaatatcgctttctgttatacggactttccggcagaaagcgtctgggcccaatctccgctgattctacaacagctccactggaaaaggagctaccccctcatctcggcgaacttactgttgcagaggaaacttcaagtagcttacgattgagctggactgtcgcccaagggccatttgactcctttgttgtccaatatagagacaccgacgggcagccccgagctgtccccgtggcagcggaccaacgcactgtcactgtcgaagacctggagcccggaaaaaagtataaatttcttttatacggtttgctggggggaaaacgtctggggccagtatctgccttggggatgaccgcccctgaggaagatacacccgcaccggagctagctcctgaagctccggaacccccagaggaaccaaggctgggggtccttactgtgactgatacaacaccggacagcatgaggctttcttggagtgttgctcaaggtccgtttgactctttcgtcgtacagtacgaggatacaaacggacagccacaggccctgctggttgacggcgaccaaagtaaaatcctcataagcggcttggaaccgtcaaccccatacaggtttctgctgtatggactccatgaaggcaaacgattggggcctcttagtgctgagggcacaaccggcctggcccctgctgggcaaacaagcgaagagtcccgaccacgcctctcccagctgagtgtaaccgacgttacaacatcctcactgcggctgaactgggaggccccacctggtgcctttgattcgtttttactacgctttggggtcccttctccctccactctggagccacatccaagacctctcttgcagagagaactgatggtgcctgggactcgacatagcgccgtgctgcgagatctacgtagcggaacgctgtattcactgaccctgtatggcctgcgaggaccgcacaaggctgactctattcagggtactgcacgcacactctctccagtcttggagtctccacgggatctgcagtttagcgaaatcagggaaacgtccgcaaaggtaaattggatgccccctccctcacgggctgattcatttaaggtttcatatcaactggcagacggcggagaaccccagtccgtccaggtagacggacaggctcgcacccagaaactgcagggactcatccctggagctcgttatgaggtcactgttgtgtccgtccgcggatttgaggaatccgagcccctcaccggtttcttaacaacagttccagatggtcccactcaattgagagccctgaatctcactgagggctttgccgtgctgcattggaaaccaccccagaaccctgtggacacttacgacattcaagttacggcacccggtgctccacccctgcaggctgagacccccggtagcgcggtagactacccacttcacgacctggtgctgcacacaaattatacagccactgtgcggggactaagaggccctaacttgacctcaccggctagcatcacttttaccaccgggcttgaagcaccaagggatttagaagccaaagaggttacaccacggacagctcttctcacttggaccgaacccccagtgcgcccagccggttacctactgtctttccacactcctgggggacagactcaggaaatcctgctccccggtgggataacatcccaccagctgctggggttgtttcctagtacttcttacaatgctcggttacaggccatgtggggccagtccctgcttccaccagtctcgacatccttcactacaggcggtctgagaatcccttttccacgggactgcggcgaggagatgcagaatggagcaggcgctagtcgcaccagtaccatcttcctgaacggcaaccgggagcgtcctcttatagttttctgtgacatggagaccgatggcggaggctggttggtgttccagaggcggatggacgggcagactgatttttggagggactgggaggattacgctcatggcttcgggaacatctctggggagttctggctcgggaatgaggcgcttcattcgctgacacaggccggtgactactcaatgagggtcgacctgagagccggagacgaggcggtgtttgctcaatacgacagtttccacgtcgacagtgcggcagaatactatagactccatttggaaggataccacggtactgcgggagactccatgtcctatcattcggggtctgtgttcagcgcgagagaccgagacccaaattctctgctgatatcatgcgccgtgtcataccggggtgcatggtggtataggaactgccactatgccaatcttaatgggctgtatggctcaaccgtggatcaccagggtgttagttggtaccattggaagggcttcgagttctcggtgcccttcacggagatgaaacttaggccgagaaatttcagatctcccgcaggcggtggcta

SEQ ID NO: 201537 - DNA, 9890 bp, Artificial Sequence
  derived and/or modified sequence
taatcaagtcccctgggtctgcttggcactactgatgaaccgccaccctcaggaccctccactacccaaggagcccaggctccgctgttacagcagaggccccaagagctgggggaactgcgcgtcctgggcagagacgagaccggcagacttagggtcgtctggaccgcccagccagacaccttcgcctattttcagctgagaatgagagttcccgagggacctggggctcatgaagaagtgttgccaggtgacgtgagacaggcgctggtcccacccccaccccctggaacaccttacgagctgtccctgcatggcgtccctccaggcggtaagccatcagatcctattatatatcaagggattatggataaagacgaagagaagcccggaaagagctctggccctcctcgcctgggcgagctcacggttaccgatcggacttcggacagtctcctgctgcgctggaccgtgccagaaggagagtttgatagctttgtgatccaatataaagatagggatggacagccacaggttgtgccagttgagggaccacagcgatctgctgtgatcacctctttggaccctggaagaaaatacaaatttgtgctctacggatttgtaggaaaaaagagacatggacctttggtggcagaagctaagatccttcctcagtccgaccccagccctggcaccccaccacatctcggtaacctgtgggtgacagaccctaccccggattctttacacctgtcatggacagtacccgaagggcagtttgatacgtttatggtgcagtatagagacagagatgggaggccacaggtggttccagtggaagggccagaaaggagctttgtggtttctagtctggacccggaccacaagtaccggttcaccctatttgggatcgctaataaaaaacgatacggccctctgacagccgatggaacaacagcccctgagagaaaggaagagccacccagacccgagtttctcgaacaacccctgctgggcgagctaaccgttacgggggtgacacctgattccctacgcttgtcttggacggtagcccagggcccatttgatagttttatggtgcagtacaaagatgcccaggggcagccccaggccgtgccagttgctggagacgaaaatgaggtgaccgtgcccggtttagatccggaccgaaagtataagatgaacctatacggcctgcggggaaggcagcgagtcggcccagaatccgtggtagctaagacagccccacaggaggacgtggacgaaaccccatcgccgactgaactcggtacagaagcaccagagtctccagaagaacccttgctgggcgagcttactgttaccggctccagtccagatagcctgtccctattttggacagtgccacaaggatctttcgacagttttactgtccagtacaaggaccgagatggaagacctcaggctgtgagggtgggtggcaaggaaagtgaagtgaccgtgggtggacttgagccaggccacaagtataagatgcacctgtacggtctgcacgagggacagcgggttggcccagtgtctgctgttggggtcaccgcccctcagcaggaggaaactccccctgccaccgagtctccactggaacccaggctgggagaactgactgtgacagatgtcacccctaattccgtagggttgtcttggaccgtcccggagggtcagtttgattctttcatcgtccaatacaaggacaaggatggtcagcctcaggtggtgcctgtcgccgcagatcagagggaagtcactgtatataacctcgagcctgaacggaagtacaagatgaatatgtacggcttacacgacggacaacggatggggcctttatctgtggtcatcgtgacagcgccattgccccctgccccagccacagaggcaagtaagcctcccctagagcctcggttaggtgaactgactgttactgatattacacctgactcagtcggacttagttggactgtaccagaaggagaattcgacagcttcgtggtgcagtataaggatcgagacgggcagccccaggtggttccagtggcggcagatcagcgtgaggtgactattcctgaccttgaaccatcccggaagtacaaatttcttctgttcggtatacaggacggtaagcgcaggtcgccggtttccgtggaagccaaaaccgtggctaggggagatgcttcccctggagcccctcctaggctgggtgaactgtgggtgacagaccctaccccggatagtctgcggctatcttggactgtgccagaaggccaatttgattcattcgtggtgcaattcaaagacaaagacggcccacaagtggtgcctgtggaagggcatgaacgcagcgtaacagtaacgcctctggatgccggacgaaagtataggttcctcctgtacggcctgctcggaaagaaacgacacgggccactcactgccgacggcaccactgaggcccgatccgcaatggacgacactggaactaagcgcccacctaaacctcgattaggggaagaactccaggtgactactgtgacacagaacagcgtcgggctgtcttggacagtgcctgaaggacagtttgactccttcgtggtccaatacaaagatcgagatggacagccccaggtcgttcccgtcgagggcagccttagggaagtttctgtgcctggacttgacccagctcaccgatataagttgctcctctatggactacaccacggcaaaagagttggcccaataagcgcagtggctattacagccggaagggaagagacagagactgagacaacagccccaacgcctcctgcccctgagcctcacctcggcgaactcacagtcgaagaggccacctcccacacccttcacttgtcctggatggtgacggagggagagtttgactcctttgagatccagtatacggaccgtgacgggcagctccaaatggtccgcattgggggagacaggaacgacatcaccttgtccgggctggaatccgaccaccggtatctagttacactctatggcttcagtgacggaaagcacgtggggccagtccacgtcgaggcccttactgtccctgaggaggaaaaaccttccgaaccaccaaccgcgactccagaacccccaattaaaccaagactcggagaactcacagttacggatgccacaccggactcgctctcactctcctggaccgtgcctgagggtcaatttgaccattttcttgtccagtatcggaatggagacggccaaccaaaggctgtcagagtccccggacacgaagagggtgtgaccattagtggacttgagcccgaccacaagtataagatgaatttgtatgggttccatggcggacagcggatgggacccgtgtctgtcgtgggagtgactgctgctgaagaggagacaccttcccctactgagcccagcatggaggcgccagaacccgcagaagaaccgcttctaggggagctaacggtgaccggctcctcgcccgattctttgagtctctcgtggacggtgccacaagggagattcgacagctttaccgtgcaatataaggatcgcgatggcagaccgcaggttgtgagagtgggcggtgaggaaagtgaagtcacggtcggaggtttggagcccggtaggaagtacaaaatgcatctctacggcctgcatgagggtcggagggtgggccctgtcagtgcggtgggagttacagccccagaggaggaaagtcccgatgccccattagctaagctgaggctgggccagatgactgtgcgggacattactagtgattccttgagcctgtcctggactgtgcccgagggacagttcgaccattttctggtgcagttcaagaacggagatggccagccaaaggctgtgcgagtgcccggacatgaagatggagttactatctctggtctcgaaccagatcataagtacaaaatgaatctttacggcttccacggtggccaacgggttggtcccgttagcgcagtaggtctgactgctcccggaaaggatgaggaaatggcacctgcctccacagaaccccctactcccgagcctcccataaaaccaaggttagaggaattgactgtcactgatgccacaccagattctctgtccctctcatggactgtgccagagggccaatttgaccatttcctggttcagtacaaaaacggtgatgggcagcctaaagccaccagggtgccagggcacgaggatcgggtgacaattagcggcctggagcccgacaacaaatacaagatgaacctgtacgggttccatggaggtcagagggtcggcccagtctctgctatcggcgtgactgccgctgaagaggagacaccatcaccgaccgaaccaagtatggaggcccctgagccgccagaagagccattgctgggcgaactgaccgtgaccgggtcctctccagacagcctgagcctctcgtggaccgttccccaggggcgattcgattcttttacggtgcagtataaagatagggacgggcgaccccaggtggtccgcgtcggcggagaggaatctgaggtgacggtgggtggtttggagcctgggcgaaagtacaagatgcacttgtacggcctgcacgaaggacggagggtcggtccagtgtcaactgtgggcgtgacagcaccacaggaagacgtggacgagaccccatcccctacggagccgggaaccgaggcacccggacccccagaagagcctctgctgggtgaactgactgttactggctctagtcccgattcactttcactgtcttggacagttccgcaagggagatttgatagttttacagtgcaatacaaggaccgtgacggccgaccccaggcagtgcgtgttggcggacaggagagcaaggtgactgtaagaggtcttgaacctggtcggaaatacaaaatgcacctgtacggactgcatgaaggcaggcgcctggggccagtgtctgccgtgggtgtgaccgaggacgaagcagaaactacgcaggcagtgccaactatgacacctgaaccaccaattaagcctcgtctcggcgagcttaccatgacagacgcgacacctgactccctatcactttcatggaccgtgccagaaggccagttcgatcattttcttgtccagtaccgcaatggggatggccagccaaaagctgtgcgtgtgcccggtcacgaggacggagtcaccatttcagggctggaaccagatcataagtataagatgaacttgtatggctttcacggcggacagcgcgtcgggccaatctcagtcattggcgtgacagctgcagaggaagaaacgcccagccctacagagttgagcaccgaagcgccagagcctcctgaggaaccgcttttgggcgagttgactgtaactggcagctcccctgattcactgagccttagttggactatacctcagggccacttcgactcattcaccgtgcagtataaagaccgcgatggccgtccacaggtgatgcgcgtcaggggggaggaaagcgaggttacagtggggggactggagcctggtcggaagtataaaatgcacctatacgggctgcacgaggggaggagagttgggccagtatctaccgttggagtgacagtccctaccacaacacctgagcccccaaacaagccaagactgggagaactcacggtgacagacgccactcccgacagtctgagcctctcttggatggtgcccgagggccaattcgaccactttttagtccaataccgaaacggtgatggacagcccaaggtggttagggtacccggtcacgaggatggagtgacaatctccgggctggaacctgatcataaatataaaatgaatctttatggctttcatggtggccagagggttggacccatatctgtaattggagtcaccgctgctgaggaggaaacgccagcgcctaccgagccatccacggaagctccggaaccacccgaggagcctctcctgggtgaactgaccgtgacaggaagctctcccgactcattgagccttagctggacaataccacaggggagattcgattcttttactgtacaatacaaagatcgggacgggcgtccccaggtggtgcgggttcggggtgaagagagtgaggtcaccgtgggcggacttgagcctggctgtaaatataaaatgcatctatacggacttcacgaagggcagagagttgggccagtgtcagccgtcggcgtcactgttccaacgatgacccctgagccacctataaaacctcggttaggtgaattgaccgttactgacgcgacccctgactccctctctctttcctggatggttccggaagggcagttcgaccatttcctggtccagtacaggaatggtgatggacaacccaaagcagttagagtcccaggccatgaggacggggtgacaattagcggcttggaacctgatcacaaatataaaatgaatctctacggctttcacggaggtcaaagggtgggacccgtctcagccattggcgtcaccgaggaggaaactccctccccgactgagccctcaacagaagcccctgaggccccagaggagccactcctgggtgagctcactgtgactggttcttcaccagacagtctgtccctgtcctggacggtccctcaggggcgttttgattcatttaccgtccaatacaaagaccgtgatggacagccacaggtggtgcgcgttcgtgtggaagagtcagaggtgaccgtgggaggattggagcctggtaggaaatacaaaatgcatctttatggtttgcatgaaggacagagggtgggtccggtgtccaccgtgggcatcactgcaccactgcccacacctctgcccgtggagccaagactcggcgagctcgctgtggctgccgtcacaagtgattcagttggacttagttggacagttgctcagggccctttcgacagttttctagtgcagtatagagacgctcagggtcaaccccaggccgttccagtcagtggcgacctacgggctgtggccgtgagcggtctagatcccgcacgaaagtacaaatttctcctgttcggtcttcagaatggcaaacgtcacggcccagttcccgttgaagccaggaccgcaccagataccaagccgagccccaggctcggtgaacttaccgtcacggatgccacccctgacagtgtgggtctgtcatggacagtcccagagggggagttcgattcttttgtagtgcagtataaggataaggacggacgactccaggtggtccccgtggcagctaatcagagggaggtgacagttcagggccttgaaccgtcgaggaagtaccggttccttttatatggactctcaggacgcaagcgactcgggccaattagtgcagattcgacaaccgccccactcgaaaaggagttgccaccacaccttggagaactgaccgtagccgaggagacatcttcttccctgcgtctcagctggacagtggcccaggggccttttgactcatttgtcgtccagtaccgggacacagacggtcagcctcgggctgtgcctgtggccgctgaccagaggaccgtgaccgtggaggacctggaaccagggaaaaagtacaagttcttactgtacgggctgctggggggaaagaggctgggcccagtgagcgccttggggatgaccgcacccgaggaggatacacctgctcccgagctggctcccgaagcccctgaaccgcctgaagagcccagactgggagtgttaactgtaacagacaccactcccgacagtatgagactcagttggtcagtggctcagggtcccttcgatagctttgtcgttcagtatgaagacactaacgggcagccacaggcgttactggtggatggagaccaatccaaaatcctgattagtggtctggagccgtccactccctacagattcctgctctacggactacacgaaggcaaacgattgggccctctgtctgcggagggtacaactggcctcgcgccagcgggtcaaacatccgaggaatctcgcccaagacttagtcagctttctgtcacagatgtcacaactagctccctccgtcttaactgggaggctcctccgggagctttcgattcctttctgctaagattcggggtcccatccccctctactctggagccacatcctcggccactcctccagagagaactaatggtgcccggtactcggcattctgctgtgctgcgcgatttgcgctccggcaccctttatagtctaacgctatacggtttgcggggaccacacaaagctgacagcatccagggcactgcaaggaccttgtcaccggtgctggagtccccaagggacctgcagttcagtgagattcgcgagacaagtgcgaaggttaactggatgcctccccctagccgcgcagactcatttaaggtgtcttaccagttggccgatgggggagaaccccaatctgtgcaggtcgacggacaggccagaacccaaaaacttcagggattgattcccggagctagatacgaggtgactgtcgtaagcgtacgaggattcgaggagtctgagcccctgacaggcttcctcacaacggtacctgatggaccgactcagcttcgggctctcaacctgacggaaggctttgcagtactgcactggaagccacctcagaatccagtcgatacatatgatgtccaggtgactgctcccggtgcccctcctctccaggccgaaacccctgggagtgctgtcgattacccccttcatgaccttgtcttgcacaccaactatacagccactgtacggggacttagaggacctaacctcacatccccagcatcgatcacatttaccaccggcctggaggcgccaagagacttggaggccaaggaagtgacaccgagaacagcactgttgacatggacagagccacctgtgaggcccgctggatatctgctgagctttcacacacccggtggccagaatcaggaaattttgctcccgggaggaattacgtctcatcaactcctggggctgtttccttccacctcctataacgctcgtctccaggcaatgtgggggcagtctctcttacctcctgttagtactagttttaccacaggaggcctgaggataccttttccacgcgactgtggcgaagagatgcaaaatggagcgggtgcatccaggacctcaaccatcttcttgaacggcaacagagaaagacccctaaatgtgttttgcgacatggagacagacgggggtggttggctggtctttcagcgccgaatggacggtcagaccgacttctggcgtgattgggaggactatgcccacggtttcggtaacatttcaggtgaattctggctcggcaacgaggcactgcactccctgacccaggctggagactacagtatgcgagttgatctgagagccggagatgaggccgtgtttgcacagtacgattcctttcacgtcgactcagctgcggaatactaccgattgcacttggaggggtatcatggtaccgccggtgacagtatgtcctaccactctgggagcgtgttctcagcccgagatcgagacccaaactctctgttaatcagctgtgccgtgtcttaccgtggggcatggtggtatcgcaattgtcactatgcaaatttaaacgggctgtatggatctaccgtggaccaccagggtgtgtcatggtaccactggaagggcttcgagttctccgtgcctttcacagaaatgaagctccgcccaagaaactttcgttcgcccgcaggaggtggtta

SEQ ID NO: 201538 - DNA, 12669 bp, Artificial Sequence
  derived and/or modified sequence
atgatgcctgctcagtacgctctcacctcttctctggttctcttggtgctgctgtccactgctcgggctggccctttctccagccggtcaaacgttaccctgccggcacctagacccccaccccaacctggcggtcataccgtgggcgcaggcgtaggaagtccatcctctcagttatacgagcacaccgtggaaggcggagagaagcaagtggtttttacacaccgcatcaacctgccgccaagcactggctgtggctgtcccccaggcaccgagccccctgttctggcaagcgaggtccaggcactcagagtgcggttagagatattggaggagctggtgaagggcctgaaagagcaatgcacgggaggctgttgccccgcatccgcacaggctgggaccggccagactgatgtgcgtactctgtgttccctccacggggtcttcgatttgtcccgctgcacttgttcttgtgaacctggctggggtggccctacatgttccgacccaacagacgctgagataccaccctctagcccgccttcagcaagcggctcttgccctgatgattgtaatgaccaggggagatgcgtgcgtggcagatgcgtgtgtttcccagggtatacaggccctagctgtggttggcccagctgtcccggagactgccagggtcgcggacgttgcgttcagggagtgtgtgtctgtagagccggattctcaggcccagattgttcccagcgaagttgtccaaggggctgtagtcaaagaggacgatgcgaaggagggcgatgtgtatgtgaccctgggtacaccggtgatgattgcggtatgagaagctgccccaggggatgctcccaacgtgggcgttgtgagaatggcaggtgcgtgtgcaacccagggtacacgggtgaagactgcggagtgcgatcttgtcccagaggctgtagtcagagagggaggtgtaaggacggccgatgcgtctgcgatcccggttacaccggagaagactgtggtacgcggtcatgtccctgggattgtggtgaaggaggacgctgtgtcgatggtaggtgcgtttgctggcccggatataccggtgaggattgctccacacgcacatgcccaagagactgcagaggcaggggtcggtgtgaagacggagagtgcatttgcgacaccgggtacagcggtgacgattgcggagtgcgatcctgtccaggtgactgtaatcagagaggtaggtgcgaggatggacgatgcgtttgctggcctggctacacggggactgattgcgggtccagagcatgccctcgagattgcagaggaaggggtcggtgcgagaatggcgtatgtgtgtgcaacgcgggatattccggggaggactgcggggtgcggagttgtcccggagattgtaggggtagaggtcggtgtgaaagcggccgatgtatgtgctggcccggatacacaggacgcgattgcggcactcgtgcttgccctggggattgccgtgggcgtggcaggtgtgtggacgggcgttgcgtatgcaatccaggcttcaccggcgaagactgtggctcccgccgttgcccaggggactgccggggacacggcttgtgtgaagacggagtgtgtgtgtgcgacgccggatacagtggagaggactgttccactcgcagctgtcccggagggtgtcgagggaggggccagtgtctcgatggaaggtgtgtttgcgaagacggatatagtggtgaggattgcggagttagacagtgccccaacgattgtagccaacacggcgtctgtcaagatggtgtgtgtatctgttgggagggttatgtgtcagaagactgctcaattcggacgtgccccagcaactgtcatggcaggggccgatgcgaggagggaagatgtttatgcgaccccggttacaccggaccgacctgcgccactcggatgtgcccagcagactgtagggggagggggagatgtgtccagggggtgtgcctctgccatgtcggttacgggggagaagactgcggtcaggaggagcctcctgccagcgcatgcccagggggatgtggacctagggagctgtgtcgcgctggtcagtgtgtgtgtgtcgaagggttccgaggacctgactgtgccatccagacatgccccggagactgccgcggaaggggtgagtgtcacgacggtagctgtgtgtgcaaagacgggtacgcaggagaggattgcggggaggaggtgcctaccattgaggggatgcggatgcacttgttggaggagaccacagtgaggactgaatggactcccgctcctggaccagtggatgcttatgagattcagtttatcccaaccaccgagggggcttcaccccctttcacagcacgcgtcccatccagtgcaagcgcttacgaccagcggggacttgcacctggacaggagtaccaggtaactgtccgagccctgagaggtacctcttgggggttacccgcaagcaaaacaatcacaacaatgatcgatggcccacaggatctcagagtggtcgcagtgacaccgacaacgcttgaattggggtggctgcgcccacaggcagaagtagatcgattcgttgtgagctacgtcagcgctggcaaccagcgagtgcgtctggaagtgccaccagaggcggatggcacactgctcacggacctgatgcccggagtggagtatgttgtgacggttacagccgagcggggacgagcagtgagctatcctgcgtccgtaagagccaacaccggaagcagccccctcggcctgctgggcactactgacgaaccccctccatctggcccaagcactacccaaggtgcccaagccccacttctgcagcagagacctcaggagctgggagaactgcgtgtgttgggtagagacgagaccggtcggttgcgcgtggtgtggactgcccagcctgacacattcgcctacttccagcttaggatgagggtgccggaggggccaggggcacacgaggaggtactccccggagacgtacgccaggcattggtcccccctccccctccaggaacgccttatgaattgagcttgcacggagtgcctcctggaggtaagccctccgatccaattatctaccaggggattatggacaaggatgaggagaagcctggcaagtcttcgggccctcccagactaggggagttaaccgttaccgaccgaacgagtgatagtctgctgctgcgatggacggttcctgagggggaatttgattcttttgtgatacagtacaaagaccgggacggacagcctcaagttgtgcctgttgagggcccacagagatccgcggtgatcacatccctggacccgggacgcaagtataagtttgtcctctatggtttcgtagggaaaaaacggcacggaccattggtggcagaagccaaaattctgccccagagcgatccttccccagggactccacctcggctaggcaatctatgggtgacagacccgacacccgacagcctgcaccttagctggaccgttccagaaggacagttcgatacgttcatggttcaatacagggacagagacggccgacctcaggtagtccctgttgagggcccagagcggtcattcgtggtaagttctctggatcccgatcataaataccgctttacacttttcggaatagcgaacaagaaacggtacggtcctctgaccgcagacggaactaccgctcccgagcgcaaagaggaaccccctagaccagagttcttggaacagccccttctgggggaattgaccgtgacaggggttactcctgattcactccgcctgtcttggactgttgcgcagggaccattcgatagtttcatggttcagtacaaggatgcccagggccaaccacaggccgtccctgtcgcaggagatgagaatgaagttacggttccaggactggatcctgataggaaatataaaatgaacttgtacggtctgcgaggtcgccagcgggttggtcctgaaagcgttgtggcgaagactgccccacaggaggatgtggatgaaacaccttccccaaccgaactagggaccgaggcccctgaaagccccgaggaacccctgctcggcgaactgactgtcacgggatcctcccccgactcactgtcgctgttttggacagtcccacaaggtagcttcgactcattcactgtccaatacaaggatcgcgatgggaggccaagggcagtgagagtcgggggaaaagaaagtgaggtgaccgttggcggtctggaacccggtcataagtataagatgcatctgtacgggttgcatgaagggcagagggtcgggccagtctctgcagtaggcgtgacggcccctcaacaggaggagacaccccctgcaaccgaaagtcccctggaaccacgcttgggcgagcttaccgtgacagatgtcaccccaaattccgttggattgagttggaccgttcctgaagggcagttcgactctttcatcgtgcagtataaggataaggatggccagccgcaagtggtaccagtggccgctgatcagcgagaagtgactgtctacaacttggagcctgagcgcaagtataagatgaacatgtatggattacatgacggacaacggatgggaccgctgagtgtcgtaattgtgaccgcaccccttccgcctgcaccagctactgaagcctcaaaacctcctctggaacctcggctgggcgagctgacggtgaccgacataacaccagatagcgtgggtctctcttggaccgttcctgaaggagaatttgatagcttcgtcgtgcagtataaggacagagatggacagccccaagtggtgcctgtcgccgctgaccagagagaggtaactattcctgatctggagcctagcagaaagtacaagtttcttcttttcggcatccaggatgggaaaaggcgctcccccgtctctgtcgaggctaagacggttgctaggggtgacgctagcccaggagcccctccaaggctgggagagctctgggttacggaccccacccctgatagtctgaggctgagttggacagtccccgagggtcagttcgattcctttgtcgtgcaattcaaagacaaggacggcccacaggtagtgcccgtcgagggacacgagagaagcgttaccgtaacccctcttgatgcagggcgtaaataccgatttctcctttatggactgcttggtaaaaaaaggcacgggcctctcacggccgatgggactaccgaggctcgaagtgcaatggacgacaccggaactaaacggcctcctaaaccaagactaggcgaagaacttcaggtgacaaccgtaacacaaaattcagtcggcctgagctggacagttccggaggggcaatttgacagtttcgtggtgcaatataaggatcgggacgggcagcctcaagtggtgccggttgagggctcacttagggaggtgtctgtgccaggactggatccagcccatcgctataaactcctgctgtacggcttacatcacggcaaacgggtcgggccaatcagtgccgtcgctattacagccggaagagaagaaaccgagactgagaccaccgctccgactcctccagcacctgagccccatctgggagaacttaccgttgaagaagcaacatcccacacactccatctgtcatggatggttaccgaaggggaattcgacagctttgaaattcagtacaccgatcgcgatggtcagttacagatggtaaggataggtggtgatcggaatgacattaccctgtctggcttggagagcgaccaccgctatctcgttactctgtatggcttttccgacggtaaacatgtgggccctgtgcatgtcgaagcactgactgttcccgaggaggagaagccctctgaacctcccacagccaccccggaacccccaatcaagcctcgcttgggggagctgacagtgaccgatgccactccggattctctgtctctgtcatggaccgtgcccgaaggacagtttgaccattttctggtgcagtatcgaaatggtgacggacagcctaaggctgtgcgggtaccagggcacgaagaaggcgttaccatttcgggcctcgagcctgatcacaaatacaagatgaacctgtacggtttccacggtggccaacgtatgggtcctgtatcggttgtcggagtcaccgccgctgaggaggaaacccctagtcctacagaacccagtatggaagccccagaaccagctgaggagcccctgctgggcgagttgactgttaccgggtctagcccggacagtctgtctctctcctggacagtaccccaggggagattcgacagtttcactgtacagtataaggaccgcgacggccgtccacaggttgtccgggttggaggcgaagaatcggaggtgacagtgggagggctcgagccaggacgaaagtataaaatgcacctgtatgggttacatgaagggcgtagagttgggccagtttccgcggtgggcgtgacggcccctgaagaggagtctcctgacgcccctcttgccaagctgaggctaggtcaaatgactgtgcgagacattacctccgactcactctccctcagttggaccgttcccgagggccaatttgatcactttctggtgcaatttaaaaatggtgatggccagccgaaggcggtgcgcgtacctggtcacgaggacggggtgacaatcagtggccttgagccagatcacaagtacaaaatgaatttgtatggtttccatggcggacagagggtgggcccagtgtctgctgtgggacttaccgccccagggaaggacgaagagatggcccctgcaagtacagagccgccaacgcccgaacctccaatcaagcccagattggaggagctgactgtcaccgatgccaccccggacagtctgtccctatcatggactgtgccagaaggtcagtttgatcacttcctggtgcagtataagaatggggacggacagccgaaagctacacgagtcccaggacacgaggatcgggtcaccatctccggactggaaccagacaataagtacaaaatgaacctgtacggttttcacggcggtcagcgtgtcggacctgtctctgccattggcgtcacagccgcagaggaggaaaccccctcccctaccgagccctctatggaagcacccgagcctcccgaagagcccttgctcggagagttaaccgtgactggttccagcccagactcgctttctctgagttggaccgtcccacagggacgctttgatagtttcactgtgcaatacaaggaccgtgatggtcgtccccaagtcgttcgcgtcggaggagaggaaagcgaggtaaccgttgggggactcgaaccgggaagaaagtataagatgcacctgtacgggctgcacgaagggagacgcgttggtccagtgtctacagttggggtaactgcaccgcaggaagatgtagacgagaccccctctcccaccgagccaggcacagaagcccctgaaccgccagaggagcctctcctgggcgaactgacagttactggctcctcccccgacagcctgagtttgtcatggaccgtgccccaaggacggttcgactctttcactgtgcaatataaagatcgagatggacgccctcaggccgtaagggtgggtgggcaggagtccaaggtgactgtcagaggcttggaacctgggcgaaagtacaaaatgcatctctacggcctacatgaggggagacgactcggcccagtgagcgccgtgggcgtgacagaggacgaggctgaaactacgcaggcggtacccaccatgacacccgaaccaccaattaaaccaagactgggcgaactgactatgaccgacgcaacgcccgactcgctgtctttaagctggaccgtgcctgagggtcaattcgaccacttcctggtgcagtacaggaatggtgatggccagccaaaggccgtgcgtgtccccggacatgaagatggcgttaccatctctgggctggagcccgaccataagtataagatgaacctctacggattccatggaggccagagggtcggccctatcagtgttatcggagtgaccgcagcagaggaggaaactccttctcccacagagctttcaacagaggccccagaacctcccgaggaacccctcctcggtgaattgacagttactgggagctcgcccgactctctatccctcagctggaccattccacaaggccattttgactccttcacggtgcagtacaaggaccgggatggtaggccacaggttatgcgagttcggggtgaggagagcgaagtcacagttgggggactggagccaggccgaaaatataaaatgcacctgtacgggctgcatgagggaagaagggtgggccctgtgtccaccgtgggcgtgacggtcccaactacaaccccagaacctccaaataagccaaggcttggcgagctgaccgtcaccgacgctactcccgacagtctgtcccttagctggatggtgcctgagggccagttcgatcatttccttgtgcaataccgcaatggtgacggccagcccaaggtcgtccgggtgccgggacatgaagatggagtgacgatctcaggtctcgaacccgaccataagtacaaaatgaacctgtatggattccacggcggtcagagggtcggaccgatctcagtaataggcgtgaccgcggcagaagaggaaactcccgctccaacagaaccgagcactgaagccccagagcctcccgaggaacccctgctcggcgaactgaccgtcaccgggtcaagtcccgatagtctgtccctgagttggacaataccccagggacgcttcgactcttttaccgtgcagtataaggaccgtgacggtcggccacaggtagtgcgcgtgcgaggggaggagtccgaggtgaccgttggcggactggagccaggctgtaaatataaaatgcatctctacggcctacatgagggccaacgagttgggcctgtgtcagccgtgggggtcaccgtgcctacaatgacccctgaaccccctatcaagcctaggctgggggagttgacggttaccgatgccacaccagacagcctctcactgtcttggatggttcccgaggggcagttcgaccactttctggttcaatacagaaacggggatggtcagccgaaggccgtgagggtgcccggacacgaggacggggttaccatctcgggattagaacccgatcacaagtacaagatgaacctgtatggttttcatggcggacagcgggtgggacccgtgagcgctatcggagtcacagaggaagagactccttcccccaccgagccctcaaccgaggcacccgaggccccagaggagccgctgctgggggaattgacggtgactggttcatcaccagactcactatcattatcctggaccgtcccccagggacggttcgacagcttcaccgttcagtacaaggacagagacggtcaaccacaggtggtacgagtcagaggcgaggagtccgaggttacagtcgggggactagagcccggaaggaaatataaaatgcacctgtacggtctgcatgaaggccaacgcgtgggtcccgtgtccacagttggtatcaccgctccactgcccacacccctccccgtggagccacggttgggagaattagcggtggctgccgtgacttcagactccgtggggctctcctggaccgtggcccagggtccctttgacagctttcttgtgcagtacagggacgctcaaggccagccccaagcggtccctgtatccggggacttgcgggctgtcgcagtctcagggttggatcctgccaggaaatacaagtttctcctgttcggcctgcagaacgggaaaaggcacggccctgtgcccgtggaggcccgaactgccccagatacgaaaccatccccaagactcggggagctgacagtgacggacgcaaccccagactccgttggcctgtcctggaccgtgcctgagggcgagtttgacagcttcgtggtgcagtataaagacaaggacggccgattgcaggtggtgccggtggctgcaaaccagcgtgaagttactgtacagggtctcgaaccgtcccggaagtaccgcttcctgctgtatggactgagtggaagaaagagacttggccctatctccgccgactcaaccacagcaccattagagaaggaactgccgcctcacttgggggaactgactgtggctgaagaaactagttcgtcattaaggttaagttggaccgtggcccaggggccattcgacagcttcgtggtgcaatatcgcgatactgacggacaacccagggcagtgccggtagccgcagaccagaggactgtcacggttgaggacctggaacccggaaagaaatataagttcctcctgtacggtctactgggcggaaaacgtttgggtcctgtgagtgctttggggatgactgccccagaagaggatacccccgctccggagctggcccctgaagctcccgagccgcctgaagagcctcggctgggcgttttgaccgttacagatactacacctgacagcatgcgattaagttggtctgtcgcccaggggccatttgactccttcgtagttcagtatgaggatacaaatggacagccacaggctttgcttgtggacggcgatcaaagcaaaatccttatttcaggactagaaccttccactccctaccgctttctgctgtatggcctgcacgagggaaagcggcttgggccattgtctgcagaggggactacggggctggccccagccggtcagacctcagaggagagccgtcccaggctgtctcagctgagtgtcacggatgtgacaacatcttctctccggcttaactgggaggctcctccgggtgcctttgacagcttccttctgagattcggagttccttctccctccaccctggagccccacccccgaccacttctgcagcgggaactgatggtcccgggtactagacattccgccgtcttacgcgacctgcggtctggcacgctctactctctgacactgtacggcctgcgcggtcctcacaaagccgactccattcagggcaccgccaggacactgagtcccgtgttagaatctccccgtgatctgcaattttccgaaattcgcgagacaagtgccaaggtgaactggatgcccccacctagcagggcagattcattcaaagtttcctatcagttggcggacggcggagagccccagtcagtccaggtggacggacaggctcgcactcaaaaactgcaaggactcatccctggcgctaggtacgaggtgacagtcgtttccgtccggggatttgaagaatcagagccattaactggttttctgactacggtgcctgacgggccaacacagctgagagccctgaacctgaccgagggtttcgcagtgctgcattggaagcccccacagaacccagtagatacctacgatatccaggtgaccgctccaggcgcacctcccctacaggcagagactcccggatctgctgtagactacccattacacgacttggttctgcacacgaactacacagcaactgttcgcggactccgaggcccaaaccttacttctccagccagcatcacattcacgacaggcctagaggctcccagggatctcgaagctaaggaggtgaccccacggaccgccctgctgacgtggactgagccgcctgtccgccctgcgggatacctgctatccttccatactcccggaggacagacccaagaaatcctgctacccggagggatcacgtcccaccaacttttgggccttttcccaagcacctcttacaacgctaggctgcaggctatgtggggccaaagtctgctgcctcctgtgtccacctcgttcaccactggagggctgcgcatacccttcccccgtgattgcggcgaggaaatgcaaaatggagccggtgcctcacgaactagtactatatttctgaacggtaatcgagaaagaccactcatcgttttctgcgacatggagaccgacggagggggatggcttgttttccagcggcgaatggatggtcagacagatttttggcgcgactgggaggattatgcccatggctttggaaatatttctggcgagttctggttaggcaatgaagcactccattccctcacccaggcaggggactactctatgagagtggacctgagagcaggagatgaggcagtattcgctcagtacgatagctttcacgtggattcagccgctgagtattaccggctccatttagaaggctaccatggaactgcgggtgattcgatgtcttaccattctggcagcgtgtttagcgcaagggaccgcgatcccaattcattgttgatttcctgcgcagtatcctacaggggggcatggtggtaccggaactgccactacgccaacctgaatggcttgtatgggagtaccgtggatcaccagggagttagctggtatcattggaaaggttttgagttttcggtaccgtttactgagatgaagctgcgccctaggaacttcagatcccccgctggcggaggttac

SEQ ID NO: 201539 - DNA, 1905 bp, Artificial Sequence
  derived and/or modified sequence
taaagctcccccctggggctcctcggcacaaccgatgaacccccacctagcgggccttccacaacacagggggcacaagcccctcttttgcagcagcgtcctcaagagctgggagagctcagagtgctgggtagggatgaaaccgggaggttgcgggtggtctggactgcacaaccggacactttcgcctacttccagctgcgtatgagagtgccagagggaccaggcgcacacgaggaggttctgcccggagacgttaggcaggcgctggtgccaccacctcctccgggaactccttacgaactctcgctgcacggggtgccccctgggggaaaaccttcagaccccatcatctatcaggggatcatggataaagacgaagagaaacccggtaagtcaagcggaccccctaggcttggggaacttacagtgactgatcgtaccagtgacagcctgctactaaggtggacagtgccagagggagagttcgatagcttcgtgattcagtataaggatcgcgatggacagccacaggttgtccctgtggaggggcctcaacggtcggccgttatcacgagcctcgatcccggacggaaatacaaattcgtgctgtatggttttgttggtaagaagcggcatggacccctagtcgcagaggccaaaatccttccccaatccgacccaagtccgggaacccccccaaggctggggaacctctgggtgacagatccaacccccgattctctgcacctaagctggactgttcctgaaggccagttcgatacatttatggtgcagtacagagatagagacgggcgtccacaagtggtgcccgtggaagggccagagaggtcttttgttgtgtctagtttggatccggatcacaaatatcgttttactttgtttggcatcgcaaataaaaagaggtatggacctctcactgcggatggcactaccgcccctgaacgaaaagaggagcccccaaggccagaattcttggaacaacctcttctgggagagctcacagtgactggagttacgcccgactcgctaagactctcctggacggtggcccagggaccctttgattccttcatggtgcagtataaagatgcccaaggacagccgcaggcagtgcctgtggctggagatgagaacgaggttacagttcctggacttgatcctgaccgcaaatataagatgaacctctatgggctccgcggacgccagagggtggggccagagtcagtcgtggcgaagacggcccctcaggaagatgtggacgagactccaagcccaaccgaactgggtacagaggcaccagagtctcccgaagagcccctgcttggtgagttgaccgtgacgggcagctctcctgattccctctcactgttttggactgtgccccagggcagcttcgactcattcacagtgcaatataaggatagggacggacgccctagggccgtccgtgtgggaggaaaggagtctgaagtgacggtcggcggattagaacccggtcacaaatacaaaatgcacctttacggtctgcatgagggccagcgtgtcggtccagtgtccgccgtgggagttacggctccgcagcaggaggagactcctcctgccacagagtcacctctcgagccaagactgggagagctcacagtcaccgacgtgacccctaattctgtgggacttagctggaccgtgcctgagggccaattcgacagtttcatcgtccagtataaggacaaggacggacagccccaggtggtgccagtcgccgcagatcagagggaagttacggtgtataacctcgagccggaaagaaagtacaaaatgaatatgtatgggctccacgatggacagcgtatgggacccttatccgtggtgatagtcacctag

SEQ ID NO: 201540 - DNA, 12668 bp, Artificial Sequence
  derived and/or modified sequence
atgatgccggcacagtatgctctaacttcctcgctggtgctcctggtcctgctgagcacagctcgcgctggcccattttcttcccggtccaacgtaacactcccagcgccacgacctccgccacaaccgggtggacacacagtgggcgcaggcgtcggtagcccatcctcacaactgtacgagcacacagtggaaggaggcgaaaaacaggtcgttttcacacatcgcatcaacctgccgccttccactggctgcggctgcccacctggaaccgagcctcctgttttagcctcagaggtgcaggcattgcgggtaaggctggaaattctggaagagttggtcaaaggcctgaaagaacagtgtaccgggggttgttgtccggcaagcgcccaagcgggaacgggacaaaccgatgtcagaactctgtgctcattgcatggcgtcttcgatctgtcccgttgcacctgcagttgtgaacccggatggggcggtccgacctgtagcgacccaactgatgcagaaattcctccctcctctccaccctctgcctcgggcagttgtcctgacgattgcaacgatcaggggagatgcgtcaggggacgctgcgtctgctttcctgggtacaccgggcctagttgtggctggccgagctgccccggtgattgccaaggtcggggtagatgcgtgcagggcgtttgcgtctgcagagccggattctccggacccgattgttcccaacgaagttgcccacgcggatgttcccaaagaggcagatgcgagggcggtaggtgcgtctgcgaccctggctatacgggcgacgactgtggtatgcggtcgtgcccacggggatgctctcagcgagggaggtgtgaaaatgggaggtgcgtgtgtaacccaggatatacaggagaagactgcggggtacggtcatgtcctcgtggctgctcgcagcgcggacgctgtaaggacgggagatgcgtttgtgacccaggctatacaggtgaggactgtggaacccgatcttgcccctgggactgtggagaaggtggcagatgcgtggatggacgctgcgtttgttggcctggttatacaggagaagactgttcaactaggacgtgcccccgtgactgcagggggagggggaggtgtgaagatggagaatgtatctgtgacaccggttactctggagatgattgcggagtgagatcatgccctggagactgcaatcagagagggaggtgcgaggacggacgctgcgtgtgttggcccggttacacaggaacggactgcggttcacgggcttgtcccagggattgtagagggagggggagatgtgaaaacggcgtgtgcgtgtgcaacgccggatacagcggtgaagactgtggggtgcgatcgtgcccaggggattgcagaggcagaggcagatgcgagtccggaaggtgtatgtgctggcccggttataccggtcgggattgcggtacacgggcatgtccaggcgactgccgaggcaggggtagatgtgtggacgggaggtgcgtgtgcaaccctggctttaccggggaagactgtgggagtcgcaggtgccccggtgactgtagaggacacggactgtgcgaggatggcgtgtgcgtgtgtgacgccggttattcaggggaggactgctctactaggtcctgtcctggcggatgtagaggccgtgggcaatgcctggacggcagatgtgtctgtgaagacggctacagtggcgaggactgcggggtgcgtcagtgccctaatgactgctctcagcacggagtgtgtcaggacggggtgtgtatatgttgggagggctacgtgtctgaggactgcagtattaggacgtgcccgtctaattgccatggccgagggaggtgtgaagagggcaggtgcctctgtgacccaggctataccggcccaacttgcgcaacgagaatgtgcccagctgattgccgagggaggggaaggtgcgtgcagggcgtgtgtctttgtcacgtcgggtatggaggcgaagattgcgggcaggaggagccacccgcaagcgcgtgtcccggtgggtgtggtcctagggagctgtgtcgggcagggcaatgtgtctgcgtcgaaggcttcagggggccagattgtgccatacagacttgccctggcgattgcagaggaaggggcgaatgccacgacggctcatgtgtgtgcaaggacggctatgcaggggaagattgtggggaagaggtgccaactatagaaggcatgagaatgcatttgttagaggagactaccgtgcgcacagaatggactcccgctcccggacccgtggatgcatacgagatccaatttatacctaccacggagggagcctcgcccccattcacagcccgagtcccttcgagtgctagtgcctatgatcagcggggactggctccaggacaagagtaccaggtcaccgtccgggctctgaggggcacaagctggggtctaccagccagtaagacgatcaccaccatgatcgacgggccacaggatcttagggtcgtggccgtgaccccgactaccctcgagctggggtggctgcgaccccaggcagaagtcgataggttcgtcgtgtcgtatgtgagcgccggtaaccagagagtcagacttgaagtgccccctgaagccgacggcactctcctgaccgaccttatgccaggagtggaatatgtagtgacagtgacagcggaacgcggacgagccgtgtcctatccagcgagcgtgcgagccaacaccggcagtagtccacttggactcttggggaccaccgacgagccccctccatcaggaccctccacaacgcagggagcccaggcgccacttctgcaacagcggcctcaagagctgggcgaactgcgcgtcctgggacgcgacgagaccggcagacttcgcgtcgtgtggaccgctcagcctgatacgttcgcatactttcaactccgtatgagggttccagagggcccaggagcacacgaggaggttcttcccggagacgtgcggcaggcacttgtacccccaccccctcccggtacgccctacgaactgagccttcacggagtcccacctggtggcaagccatccgacccaatcatttatcaaggaatcatggacaaagatgaggaaaaacccggtaagtccagcggcccacccaggttaggcgaactcaccgtaaccgacaggacatctgattcattactcttacgctggaccgtgccagagggagagtttgactcctttgtgattcagtataaggatcgggacggtcagccacaggtggtgcccgtggaggggcctcagcgcagtgcagttatcacttctctggatcccggacgcaagtacaagttcgttttgtacggcttcgtggggaagaagagacacggacccttggtcgcggaagctaaaattttgcctcagagtgatccttcgccaggtactccccctagactgggcaatctgtgggtgaccgatcctacacccgattcgctccatctctcatggactgtgccagaagggcagttcgacacgtttatggtgcagtatcgggatagggatggaagaccccaggttgtaccggttgaaggaccggagagaagttttgtcgtcagctctcttgacccggaccataagtataggtttacgcttttcggtatcgcaaacaagaaacggtatgggccactgactgcagacgggactactgcgcctgagcggaaggaggaacctccacaccccgagtttctggaacaaccactgctaggagaactgacagtgacaggggtgactcccgattctttgagactgagctggacagttgcccagggcccatttgacagttttatggtgcagtacaaagacgcacagggccagccgcaagccgttcccgtggctggcgacgagaacgaggtgaccgtaccagggctggacccagatagaaaatacaagatgaacctgtatggcttacgagggagacagagggtgggtccagaaagtgttgtggccaaaaccgctccccaagaggacgtggatgaaaccccgtctcccacggagctgggtacggaagcaccagaatctcctgaagaaccactcctgggagaattaaccgtaactggaagctcacctgattcactgagcctcttttggactgtgccacagggatctttcgattcttttaccgtacagtataaggaccgcgatggcagacctagagctgtgcgggtcggaggcaaagaatctgaagtgacagtggggggactcgagccgggtcacaaatataaaatgcacctgtacggactgcacgaaggccagagggtgggcccagtgagtgccgtgggcgtgacagcgccacagcaggaagagactccaccagctaccgagagtcccttggagccacgcctgggagagctgactgtaacggatgtcacgcctaattcggtgggcctctcctggactgtgcccgaggggcagtttgatagcttcatcgtccagtataaggacaaagatggtcagccgcaagttgttcctgttgccgcagatcagagagaggtgacagtgtacaaccttgagccagagaggaagtacaagatgaatatgtacgggctacatgacggtcaaaggatgggaccactctcagtggtaatcgtgaccgcccctttaccaccagctccagccaccgaagccagcaaaccacctctggaaccccgactaggcgaattaactgtgaccgacattacgccagatagcgtgggcctgagctggaccgtgcctgaaggcgagtttgatagctttgtggtccagtacaaagaccgagacggtcagcctcaggttgtgcctgtcgccgcagatcagagagaagtgacgattccagacctcgagccttcccggaagtataaatttcttctgttcggaatccaggacgggaaacggagatctccagtgagcgtcgaggccaagaccgtggctcgcggagacgcatcacccggtgctccccctaggctcggcgagctgtgggtcaccgacccgacgcctgattccctccgcctttcttggaccgtgcctgagggccagtttgattcctttgttgtacagtttaaagacaaagacggacctcaggtggtccccgtcgagggccacgagaggtctgtgaccgtcaccccgctggacgccggtcggaagtacagattccttttatatggacttctgggcaagaagcggcacggtccactcacagcagatggtactaccgaggcacgttctgcaatggatgacactggtacgaaaagacctccaaaacccaggctcggtgaggagttgcaggttaccactgtcacccagaactctgttggtctctcttggacagttccagaaggccagtttgactcgtttgtagtacagtacaaggatcgggatggccagcctcaagtggtccccgttgaagggagcctgagggaggtgtccgtgcccggactcgaccctgctcaccggtacaagctgctgctgtatggactccatcacgggaagcgcgtgggccctatctccgccgttgctataacagctggtcgggaggagacagaaactgagacaactgcgcctactcccccagcccctgaaccgcatctcggcgagttgacggtcgaggaggccacctcacacactctacatctgtcctggatggtcactgaaggggagttcgatagcttcgaaatccagtacactgatagggatgggcaacttcagatggtcaggatcgggggagacagaaacgacatcactttgagtggtctggagagtgaccaccggtacctggtgaccctctacgggttctccgacggaaagcatgtcggccctgtgcacgttgaggcactgactgtccccgaggaggagaagccatccgaaccaccaacagctactcccgaaccaccaatcaaaccacggctcggggagttaacagttacggatgcgaccccagatagtctgtctttgagttggaccgtgccagaggggcaatttgatcacttcctggtgcagtatagaaacggagacggacagcccaaggccgtgcgcgttccaggacacgaagagggcgtgacaatttcaggactggagcctgaccacaaatacaaaatgaatttgtacggcttccatggcggtcagcgcatgggcccagtgtctgtcgttggtgtaactgccgctgaggaggagactccgtcccctaccgaaccttcaatggaggcccctgagccagccgaagaacctctgctcggggagttaacggtcactggatctagccctgactcccttagcctttcttggactgtgcctcaaggaaggtttgactccttcactgtgcagtataaggaccgtgatggccgtccacaggtggtgagagttggaggggaagaaagtgaagtgaccgttggcggacttgagcctggccgtaagtataaaatgcacctgtatggtcttcacgagggccgacgggtggggcctgtgtctgccgtgggggtgacagctccagaggaagagagccccgacgccccactggccaagctgagacttggacagatgaccgtcagagacatcacgtctgactccctaagcttaagttggactgttcctgaaggtcaattcgatcactttctggtacagtttaagaatggagacgggcagcccaaagccgtccgtgtccctggccatgaagatggggtcacaatctcaggcctcgaaccagaccataagtacaagatgaacttatatggctttcatggtggacaacgcgtcggcccagtatccgctgtaggcctgactgcccctggcaaagatgaggagatggctccggcatcaaccgaacccccaacacctgaaccacccattaaacctagactggaagaacttaccgttaccgatgccacccctgattctttatcactgtcttggacagtccccgaagggcaatttgatcatttcctggtgcagtataagaatggcgacggccagcctaaggccactcgggtccctggccacgaggaccgggtgaccatcagtgggctcgagcctgacaacaaatataagatgaacctatatgggttccatggcggacagcgggtgggccctgtctccgcaatcggggtcacagccgcagaggaggagaccccgtcccctaccgagccctctatggaggcaccagaaccacctgaggaaccactgcttggggagttgaccgtgaccggatcctccccggattcgttgtcacttagctggaccgtgccacaaggacgctttgattcattcactgtccagtacaaagatcgcgacggtcgtccacaggtggtgagggttggcggagaagaaagcgaggtgacagtaggcggactggaacccggacgcaagtataaaatgcacctgtacggactacatgaaggacgtcgcgtggggcctgtctctacagtaggagtgacagccccacaagaggacgtcgacgaaacaccatcacccaccgagcccggaactgaggcgcctgaaccccctgaggagcccctcctcggggagctgactgtgactgggtcaagccctgattcgctgtccctgtcttggactgtcccacagggcaggttcgactcattcaccgtgcagtataaagaccgggatggacgtccacaggccgtgcgcgtaggcggtcaggagtcaaaagtgactgttaggggcctggaacccggtagaaagtataaaatgcacctgtacggactgcacgagggccgtcgcctgggtcccgtgtctgccgttggggtcaccgaggacgaggccgaaactacacaggctgtgcctactatgactccagagccccctatcaagccaaggctaggggagctcaccatgactgatgctacaccagactctctctccctttcttggacggtccccgaagggcaatttgaccatttcttagtacagtatagaaatggcgacgggcagcctaaagctgttcgggtacctgggcatgaagatggggtaacaatctccggtctggagccagatcacaagtacaagatgaatctgtacggcttccatgggggtcaaagggtgggccctatttccgtaattggggtgacagccgcagaggaagaaacaccgtctccaactgagctctcaacagaagcccctgaacccccagaagagccacttcttggcgaattgactgttactgggtctagccctgatagcttgagcctgagctggacaatccctcagggtcacttcgactcctttaccgtccagtacaaagacagagatggaaggcctcaggtgatgagggtgcgaggcgaagagtccgaagtaaccgtaggaggactcgagcccggtagaaagtacaagatgcacctctatgggctccatgaggggaggcgggtgggtccagtgagcacagttggcgttactgtgccaactactacccccgaaccacctaataaacccaggctaggtgaactgaccgtgaccgacgccactccggattctttatcgcttagctggatggtgcccgaagggcagttcgaccatttccttgtccagtataggaacggtgacggccagccaaaggtggtgagagtacctggccacgaagatggggtgaccatctccggacttgaacctgatcacaaatacaaaatgaacctctatggttttcatggcggacaaagagtgggacctatatcagtgatcggggtcacagctgctgaggaagaaacaccggcacccacggagcctagcactgaggcgcctgagccaccagaggaaccacttctaggcgagctgactgtgacgggcagcagccctgactctcttagtctgtcttggacgattccacagggtcggtttgattctttcacagtgcagtataaggatagagacgggcgaccccaggtggtgagagtgagaggcgaagaatcggaagtgacagtcggcggactggagccgggttgtaagtataagatgcacttatacggtttacatgagggccagcgggtgggccctgtgtcggccgtgggggtgaccgttccgaccatgacaccagagccaccaattaaacctcgcctcggcgagctaactgtaacggacgccacgcctgattctctctcgttatcttggatggtgcctgaaggacagtttgaccacttcctcgtccagtatagaaacggagacgggcagccaaaggcagtgagagtgcctggacatgaggacggcgtaactatcagtggcctcgaacccgaccacaagtataagatgaatctgtacggtttccacggtggccagagagtaggtcctgtatcagccatcggcgtgaccgaggaggaaacaccctcacctactgagccttctacagaggcacctgaggccccagaggagccacttctcggcgagttaacagtgaccgggtccagccccgacagcctgagtcttagctggacaatcccccagggccgtttcgactccttcacagtgcagtataaagatagagacggtcagccacaagttgtgagggtgcggggagaggagagcgaggtgaccgtgggaggactggaaccaggcaggaaatacaagatgcacctctatggcctgcacgaaggtcagagagtgggtccggtgagcacagtcggtatcacagcaccgcttcccacgcccctacctgtggagcctagattgggtgagctggctgtggccgcagtaacctctgacagcgtgggactgtcgtggaccgttgcccagggtccattcgactcattcttggtgcagtatcgcgatgcccagggccaaccacaagccgtgccggtgagtggagaccttcgtgctgtggccgtgagtggtctggacccagccaggaagtataaatttctacttttcggtctacaaaatgggaaacgacacggaccggtccccgtggaggcgagaaccgctcccgacactaagccgtctccgcgtctgggcgagctgactgtcaccgatgcaactccagacagcgttgggctatcttggacagtccctgagggggaattcgattctttcgtggtgcagtacaaggacaaagatggaaggttacaagtggtgccagtggctgccaatcagcgcgaagtgactgtgcaggggctcgagcccagcagaaagtaccggtttcttttatatggactatccggcaggaaacggctggggcctatctctgccgactccacaaccgccccactcgagaaagagttgccaccccacctcggggagttgactgtcgccgaagaaactagttcatccttgcggttgagttggacggtggcccagggaccattcgattctttcgtagttcaataccgggatacagacgggcagcccagggctgtgccggtggccgcagatcaacgcaccgtgacagttgaagatctggaacccggtaagaagtacaaatttctgttgtacgggcttcttggcggaaagaggttgggacccgtgtcagccctgggaatgaccgcgccagaagaagatacacctgctcccgaattagctcccgaggcacccgaacctcccgaagagcccaggctcggagtgctgaccgtcactgatacgaccccagattccatgcggctttcttggtccgtagcccaagggccttttgactccttcgttgttcagtatgaagatactaatggccagccacaagctctcctggtggacggcgatcaatccaaaatactgatttcagggctggaacctagcaccccctatcgatttctgctttacggcctgcacgaaggcaaacggctaggtcctttatccgctgagggcactacggggctcgcacctgcaggccaaacttcagaggagtcacgtcccaggctgtctcagctgtccgttacagacgtgacaacaagctccctgcggctaaattgggaagccccacctggcgcatttgattccttcctcttacgttttggagttcctagcccctccacgctagagccccaccctcgaccactgctccagcgcgagttaatggtgcctggaactcggcattctgccgtcctccgagacttacgttctgggactctctactccctgacactgtacggattgagagggccacacaaagccgattcaattcagggaaccgcccgaaccttgtcccctgtcttagagtcacctcgagacctgcagttctctgaaataagggaaacctccgcaaaggtcaactggatgcccccaccttccagagccgacagcttcaaggtgtcgtatcagctcgctgatggcggtgaacctcagagcgttcaagtggatgggcaggcaagaacacagaagctccaggggcttataccaggcgcacggtacgaggtgaccgtcgtgtctgtgaggggctttgaggagtctgaaccactgacaggctttctaacaacagtgcccgatggtccaacccagctgagagcacttaacctcactgagggcttcgctgtgctgcattggaaacctcctcaaaacccagttgacacttacgacattcaagtcactgccccaggtgcgccaccacttcaggcagaaactccaggttccgcagtcgactatccgctccacgatttagtgctccacaccaattatactgcaacagtgagaggattacggggtcccaacctgacttcccctgcgagcatcactttcaccacaggtctggaggcgcctagggaccttgaggcgaaggaggtcactccgcgaacagcactgttgacttggacagagccacctgtgagacctgccggttacctcctctcatttcatacgcctggcggtcagacccaggagatcttactaccaggaggcatcacttctcaccaactgcttgggctatttcctagcacctcatataacgccaggttacaggctacatgggggcaaagcctgctgccacccgtcagtacgtccttcacaacaggaggattgcggatcccattcccacgtgattgtggcgaagaaatgcagaatggagccggtgccagcaggacgtcaactatctttttaaatggcaacagagagaggcccctgaatgtcttctgtgacatggaaaccgatggtgggggatggctggtgttccaaaggcgcatggacggccaaaccgacttctggcgagactgggaagactatgcacatggtttcgggaatatttccggcgaattctggcttgggaatgaggcactccacagcttgacacaggctggtgactatagtatgcgtgtagacctccgagccggtgatgaggctgtatttgcacagtacgattccttccacgtggacagcgcagcagagtactatcgcctacacttagagggatatcatggaactgccggtgatagtatgagctatcattccgggtccgtgtttagcgcccgagatcgggatccaaacagcctgcttattagttgcgccgtttcttatcggggagcctggtggtatagaaactgccattacgctaacctgaacgggctctatggctctaccgtagatcatcagggtgtgtcttggtatcactggaagggattcgagttcagcgttcccttcacggagatgaagctgagaccgagaaactttcgttcacccgcaggaggcggtta

SEQ ID NO: 201541 - DNA, 6842 bp, Artificial Sequence
  derived and/or modified sequence
atgatgcccgctcagtatgctctcacctcaagtctagtgttactcgtgctgcttagtacggcaagagccggtcctttctcatcaagatccaacgtgacactgcccgctccccgtccgcctccacagcccggaggtcatactgttggggcaggagtgggctccccctcgagccaactctacgagcacacagtagagggaggcgagaagcaggtagtctttacccatcgcatcaatctcccacctagtactggatgcggttgtccacccggaaccgagccaccagtattggcttcagaggtccaggctctccgagtgcgattggaaatcctggaagagctggtgaaggggctgaaagaacagtgtaccgggggttgttgccctgcatccgcccaggccggtacgggacaaaccgacgtcagaacactgtgcagcctgcatggggtgtttgacctctctagatgtacttgtagctgcgaaccagggtgggggggacctacatgctcggatcctactgacgcggaaattccaccgtcgagtccacccagtgcgtcgggaagctgtcctgacgattgcaatgatcagggcagatgcgtgcgcggtagatgcgtatgcttccccggatacaccggcccttcctgtgggtggccatcttgccccggagactgtcaggggcgtgggaggtgtgtgcagggcgtatgtgtgtgccgcgctggatttagtgggccagactgctcacagaggtcttgtccaagaggctgctcacagcgcggaaggtgtgaagggggtaggtgtgtttgtgacccaggttacacaggagacgattgcggaatgcgatcctgtcccagaggctgctctcagcgcggaaggtgtgaaaatggtcggtgcgtgtgcaacccaggatacaccggtgaggactgcggagtgcgcagctgcccccgaggctgctctcagcgtggcagatgtaaggacgggaggtgtgtgtgtgacccaggctacactggggaagactgcggaacaaggtcatgtccctgggactgtggggaggggggtcggtgtgtggacgggcgatgtgtttgttggcctggatacaccggagaggactgtagcactcgtacctgcccaagagactgccgtggtaggggccgttgcgaagacggcgagtgcatatgtgacacaggctactccggtgatgattgtggtgtgaggagctgcccgggagattgcaatcaacgagggcgatgtgaggacggtcggtgcgtctgttggcctggctatacaggcactgactgtggctcccgcgcttgccccagagattgtcggggacgcggtcggtgtgagaacggggtatgcgtttgcaacgccggttacagtggggaggactgcggggtgaggagctgtccgggagattgcaggggccgaggcaggtgcgagagcggtcgctgtatgtgctggcccggatacactgggcgtgattgtggaacgagagcctgccctggggattgtcggggacgtggacgatgcgtggatggcaggtgcgtgtgtaaccccggttttacaggcgaagattgcggttcccggagatgtcctggtgactgtaggggccatggattgtgcgaagatggggtgtgcgtgtgcgacgcaggctattccggggaagattgctctactcggtcgtgcccgggaggttgccggggacgcggacagtgtctcgacgggcgttgtgtgtgtgaggacggctatagtggagaagattgcggcgtgcgccagtgcccgaatgattgctcacagcacggagtgtgtcaggacggggtctgcatatgctgggagggctatgtgtctgaagattgttctataagaacttgtccaagtaactgccatggccgaggcaggtgcgaagaaggcaggtgtctgtgcgaccccggttacactgggccaacgtgtgcaacaaggatgtgcccagctgactgtcgcggtaggggtcggtgcgtccagggagtgtgtctctgccacgtcggttatggaggcgaggactgtggccaggaggaacccccagcaagcgcttgccctgggggatgtggacctcgtgaactgtgtagggccggacagtgtgtgtgcgttgaaggtttccgaggcccagattgtgctatacagacttgtcccggtgactgcagaggacgcggtgagtgccacgatggctcatgcgtctgcaaggatggctacgccggagaagactgcggtgaggaagtccccacaattgaagggatgcggatgcatcttctcgaagagaccacagtccggacggagtggacacccgcaccaggaccagtagatgcttacgagattcagtttattccaacaacagaaggcgcttcacctcctttcactgcaagagtgccctctagtgcatcagcctatgaccaaaggggtttggcgcctgggcaggaataccaggtcaccgtacgcgctttaaggggaacatcctggggcttaccagcttccaagacgatcactacgatgatcgacggtccacaggatctgcgcgtagtcgctgttacacctactaccttagagctcgggtggctgaggcctcaagccgaggttgacaggtttgtagtgtcctacgtctcagctggaaaccagcgcgtgcgcttagaagtgcctcctgaggccgatggcactctactgaccgacttgatgcccggtgtggagtatgtggtaactgtcaccgccgaacggggtagggccgtttcttaccccgctagcgtaagggccaacaccggtagtagccctctgggtttgctaggaaccacagacgaaccccctccaagtggaccatccacaacccaaggagcgcaagcaccactcctgcagcagcgtccccaggagctcggcgagcttcgggtgctagggagagacgagactgggcgactcagagttgtgtggaccgcccagccggatacctttgcttatttccagctgcgcatgcgagtgccagaaggacccggagcacacgaggaggtgctgccaggcgatgtgagacaggccctggtgccacctccccctccaggtactccatacgagttgtccctccatggagttccgccaggaggcaagcccagcgaccctattatttatcagggaattatggacaaagatgaagaaaagccgggaaagtcatcagggccaccgagactcggggagctaactgtgacagacagaacttccgattctctgcttctcaggtggactgtcccagagggcgaattcgactccttcgtgattcaatacaaagaccgcgatggccagccacaggtcgtccctgtggaaggaccacagagatcagctgtaatcacttccttggatcctggtcggaagtataagttcgtcttatacgggttcgttggcaagaagcggcatggtccgctggtcgccgaggccaagatcttacctcaatctgatccgagtcccggaacgcctcctcatctaggtaatttgtgggtgaccgatcccacccctgattctctccatctgagttggaccgttccggagggccagtttgatactttcatggtgcagtatagagacagagacggtaggcctcaggtcgtgccagtcgagggacccgagcggagttttgtagtcagtagcctcgatcccgaccacaaatataggtttactctatttgggatagcaaacaaaaagcgctatggcccactaacagccgacgggactacggcgcctgaacggaaggaagagccccctagacccgagtttttggaacagcctcttctgggcgagcttacggtaactggagtgaccccggattccctcagactttcatggaccgtcgctcaggggccattcgactccttcatggtccagtacaaagacgctcaggggcagccacaggctgtgccagttgccggagatgagaatgaagttaccgtaccgggtctggaccccgatcgcaagtacaaaatgaacctgtatggtttgcggggtcgacagcgcgtgggccctgaatcagtagtggccaaaactgctccacaggaggacgtggacgagacaccttccccgactgaactcggcacagaggcacccgaaagccctgaagaaccgctcttgggagagttaaccgtgaccggatcttcaccagatagtttaagtctcttttggactgtgccccaaggtagtttcgacagctttacagttcagtataaagatcgggatggtcggcctcgggctgtgcgcgtgggcggtaaggaatctgaagtgacagtgggcggtctggaacccggacacaagtacaaaatgcatctgtacggtctgcatgagggacagagggtgggaccagtgtctgcagtgggagtgactgcaccccagcaggaagagacccctccggctactgagagcccactagagcctcgactgggggagctgacagttacagacgtgacgcccaacagcgtgggcctatcttggacggttccagagggacagtttgatagcttcatcgtgcagtataaagacaaagacggacagccccaagtggtccccgtcgccgctgatcagcgagaggtgacagtgtacaatctagagcccgagaggaagtataagatgaatatgtatggcctgcacgatgggcagcggatgggcccactgagcgtggtgatcgtcaccgctcctctgccccctgcccctgctactgaggccagcaagccacccctcgaacccagattgggggagttgacagtgactgatattaccccagatagcgtgggactatcctggacggtgccagagggcgaatttgatagctttgtcgtacagtataaagacagggacggtcagcctcaagtggttcctgtcgccgctgatcagagggaggtgaccattcctgatctggagccaagccgcaagtataaattcctgctatttggtattcaagatggcaagaggcggtcacccgttagtgtcgaagccaagacagtggctcgcggagacgcctcacctggtgcaccccctaggctaggcgaactgtgggtgactgaccctacaccagattcactccgcctgtcgtggacagtgcccgagggtcagtttgacagctttgtggtgcagttcaaggacaaagatgggccacaagtggtgcccgttgaaggccacgaaagatccgtgacagtcacgccgctggacgctggcaggaaataccgtttcctgctgtacgggctgctagggaagaagcggcacggacctttaaccgccgacggaacaaccgaggctcgctcagccatggacgatacaggaacaaagcgtccaccaaaaccaaggctcggcgaggagctccaggtgactacggtcactcagaattctgtaggtctgtcgtggacagttccagaagggcagttcgatagctttgtcgtgcagtataaggatagggatggtcagccccaggtcgtcccagtagagggatctcttcgcgaagtcagcgttccagggcttgatccagctcataggtacaaactcctgctgtatgggctgcaccatgggaagcgggtgggaccaattagtgccgtcgctatcaccgccggacgggaggaaacagagaccgagacgactgcgcctacacctcccgctcctgagccccacctgggtgaactcacagtggaggaggcgacctcccacaccctgcacctgagttggatggttacggagggggagtttgattccttcgaaattcaatataccgatagagatggccaactgcaaatggtaaggatcggcggtgatagaaacgacattacactgagtgggctggaatccgatcacaggtacctggtgaccttgtacgggttttcagatggaaaacatgtgggccctgtgcacgtggaggccctgactgtgccagaagaagaaaagccctctgaaccacctaccgcaacacctgaaccacccatcaagccgagattgggagaactcaccgtcacagacgctacacctgactccctcagcttgtcctggactgtccctgagggacagtttgaccatttcttagtccagtatagaaatggagatggccagcccaaagcagtgcgggttcctggccacgaggaaggtgtaaccatcagcggacttgaaccggatcataagtacaagatgaacctttatgggttccacggtggccagaggatggggcctgttagcgttgtgggggtgacggccgctgaggaggagacaccatccccaacggaacccagcatggaggcccctgagcccgcagaggaacctttgttaggtgagctgaccgtaaccggttcctctccagactctctgagcctgtcctggactgttccccaggggagatttgatagctttactgtccaatataaggacagggacgggagaccacaggtcgtgagggtgggcggtgaggaaagcgaagtaactgtggggggtttagagccgggacgaaagtacaagatgcacctctacggcctccacgaaggacgcagggtgggacccgtcagtgcagtgggcgttaccgcaccggaagaggagtccccagacgcgccactggcgaagttgcgactcggacagatgacagtccgggacatcacctccgatagtctgtccttgtcatggactgtgcccgagggccagtttgatcacttcctggttcaattcaaaaacggggacggacagccaaaagctgtgagggtgcctggtcatgaagacggggtgaccatctcgggcctagagcccgatcacaaatacaaaatgaacttgtacggcttccacggcggacagagagttggacccgtaagcgccgtgggcctgaccta

SEQ ID NO: 201542 - DNA, 654 bp, Artificial Sequence
  derived and/or modified sequence
gcacctggcaaagatgaggagatggcgcctgcaagtacggagcccccaaccccagagccccctataaagcctagactggaggagttaacagtgaccgacgccactcccgatagtttatcactctcatggaccgtgcctgagggtcagtttgaccacttcctggtgcagtataagaatggggatgggcaacctaaggccaccagagtgcctgggcatgaagaccgcgtgaccatcagcggcctcgagccagacaacaaatataagatgaacctgtatggcttccacggaggacagcgagttgggcctgtctccgcgattggggtgaccgccgcagaagaggagaccccctccccaaccgagcccagcatggaagcccctgagccgccagaagagccactgttgggagagcttaccgtcaccggaagctcacctgacagcctgagcctgtcctggacagtgccccaaggaagattcgacagctttaccgtgcagtataaagatcgagatggacgccctcaggtcgtacgcgtgggaggcgaggagtctgaggtgacagtggggggtcttgaacccggaagaaagtacaagatgcatttgtacggcttgcatgagggtagaagggtaggtccggtaagcactgttggggtcacctag

SEQ ID NO: 201543 - DNA, 12729 bp, Artificial Sequence
  derived and/or modified sequence
atgatgcccgctcagtacgcattaacttccagccttgtattgttggtactgttaagtacggccagggcgggtccatttagcagtagaagcaatgttacactaccagctcctagaccccctccccagccaggcggtcatacggtgggcgcaggcgtggggagcccatccagccagctctacgaacacacagtggagggcggagagaagcaggtggtctttactcaccggatcaatttgcctccaagcacaggatgcggctgcccccctggaacggaacccccagtgctggcgtcagaggtgcaagccttacgagtcaggttggaaattttagaagagctcgttaaaggattgaaggaacagtgcaccgggggatgttgtccagcctctgcacaagctgggactgggcagactgatgtccgaacactttgctccctgcacggagtctttgatctgagcagatgcacttgctcttgtgaaccagggtggggtggcccaacctgttctgatcccactgacgctgaaataccaccaagcagccctccctccgctagcggcagctgtcccgatgattgcaatgaccagggaagatgcgtgcgagggagatgcgtttgtttccctggttatacagggccatcttgcggctggccttcgtgtcctggcgactgccagggccgtggaagatgcgttcagggggtctgtgtctgcagagcaggcttttcagggcctgattgctctcagcggagctgtcctagagggtgttcacagcgcggacggtgcgagggcggaagatgtgtctgtgaccctggctataccggcgatgattgcggcatgaggtcatgccctagagggtgttcccagagggggaggtgtgagaatgggagatgtgtctgcaacccaggatataccggcgaggactgtggcgtcagatcctgtccacgtggatgcagtcaaaggggcagatgcaaggacggccgatgtgtttgcgatcccggatacacaggcgaggattgtggcacgaggtcctgtccctgggattgtggggaaggcggaaggtgcgtggacggccgatgtgtgtgctggcctgggtacaccggggaggactgttccacccgcacctgccccagggattgtcggggtcgcggacgatgcgaagatggagagtgcatctgcgacactggctattccggagacgattgcggcgtaagaagctgtccaggtgattgtaaccagaggggcaggtgcgaagacggcaggtgcgtgtgttggcccggttacaccggaaccgactgtggatcaagggcctgccccagggactgtagggggagaggaaggtgtgagaatggcgtgtgcgtctgtaacgcgggttattccggcgaggactgcggtgtgagaagctgccccggagattgtagggggagaggcaggtgtgaatctggaagatgtatgtgctggcctggatatacaggccgagactgcggaacgcgggcatgccccggagactgccggggacgaggtcggtgcgtggacggtagatgcgtctgtaaccctgggttcaccggcgaggactgcggcagtcgccgttgtcccggagactgccggggacacggtctctgcgaggacggcgtgtgcgtctgcgacgcagggtacagcggggaagactgctctacccggtcctgccctggagggtgcagaggacgcggacagtgcctggacgggaggtgtgtttgcgaagacggatactccggggaggattgtggggtgcgtcagtgccccaacgattgttcccagcacggagtctgtcaggacggcgtctgcatctgctgggagggttatgtcagcgaagactgcagcatcaggacttgtccatccaactgtcatgggagaggccgttgcgaagaagggaggtgcctctgtgaccctggatacactggccctacatgtgccacccgaatgtgcccagccgactgccgcggacgtggcaggtgtgtgcagggtgtgtgcctgtgtcacgtaggctacgggggagaagactgtggccaggaagaaccacccgcatcagcatgccctggcggatgcggcccacgggagttatgtcgcgctgggcaatgcgtgtgcgtggaaggtttcaggggaccagactgtgcaatacagacatgcccaggcgactgtcgcggtagaggggagtgtcacgacggcagttgtgtctgcaaggacggttatgctggcgaagactgtggagaggaggtgcccaccatcgaggggatgcgcatgcacctcctggaagaaacaactgtgcgaaccgaatggactcctgctcctggtccggtggatgcctacgagatacagttcattcctaccacagagggtgcatcccctccatttactgcaagagtccctagttctgcgagtgcatatgaccagaggggccttgcacccggacaggagtatcaggtgaccgtacgtgcactgagagggacctcctgggggctgccagcaagcaaaacaataacaactatgatcgatggaccccaggaccttcgagtggtagctgtgacacctactactctggaactgggttggctgagacctcaggcggaagttgaccggttcgtggtgtcttacgtgtccgctgggaaccagcgcgtccgcctggaggtccctccagaggctgatggcacactgttaactgatctgatgcctggcgtggagtacgttgtgaccgtgactgctgagagaggcagagctgtgagctacccagcaagtgtgagagcgaataccggcagttcaccactgggtttactaggcacaaccgacgagccgccaccaagcggcccttctacaacccaaggggcacaagccccacttttgcagcagcggcctcaagagctgggagaattacgcgtcctgggtcgtgatgagaccggccgattgcgtgtggtgtggacagcacagcctgacacgttcgcctattttcagctgcggatgcgggtgccagaaggtcctggggctcacgaggaagtgttaccgggagatgtcagacaggccttggtgccccctcctccgccaggaacaccgtacgagctcagcctgcacggggtgcctccgggtggcaagccatctgaccccatcatttaccaggggataatggacaaggatgaggaaaagcctgggaagtccagcggccctccccgtcttggcgaactcacagtgactgacaggaccagtgattcattgctgttgagatggacggtccccgaaggtgaattcgatagctttgtgatacagtacaaagatcgggacggccaaccccaggtggtacccgtagagggacctcaaagatccgccgtgatcacttccctagacccaggaaggaaatacaaattcgtgctgtatggcttcgtcggcaagaaaagacacggccctttggtcgcggaggctaagatcctacctcaaagcgatcccagtcccggaactcctcccagacttgggaatctgtgggtcaccgatcccacacctgattccctccatctgagctggacagttcccgaaggacaatttgacaccttcatggttcagtaccgcgatcgagatggaaggcctcaggtcgtcccggtggaaggacctgaacggtctttcgtcgtcagttcgttggatccagatcataaatacaggttcactctgttcggtatcgctaacaagaagaggtatggtcctctgacggcagacgggaccaccgcccctgagcgaaaagaggagcctcctcggcctgagtttctagagcagcccttactaggcgaacttacagtcacaggtgttacaccagacagcttaagactcagttggactgtggctcagggcccattcgacagcttcatggtacaatacaaggacgcccagggtcaaccgcaggccgtccccgtcgcaggggatgaaaacgaagtcacggtgcctggactggaccctgacagaaagtacaaaatgaacctctacgggctgcgcggaaggcagagagtcggccctgaatctgtggttgccaaaaccgccccacaggaagatgtggacgagacaccatcacctactgagctgggaaccgaggccccagaaagtcccgaggagccgctactgggggagctcactgtgactggcagctctcccgattctctgagcttgttttggaccgtcccacagggaagctttgattcatttaccgtgcaatataaagaccgcgatggccgtcccagagcagttagagttgggggaaaagagtctgaagtgacagttggtgggctggaacctgggcacaaatacaagatgcatttatatggtctccacgaaggccaacgcgtgggtccagtgtccgctgtgggcgtgactgcccctcagcaggaggagacaccccctgccaccgagagtccactggagcctaggctgggagagctgaccgtcactgatgtgacccctaattccgtgggcttgtcttggacggtgccagagggccagtttgattcctttattgtacaatacaaagacaaagacggccagcctcaggtcgtgccagtggcagcagaccagagggaagttaccgtgtataatttggagcctgagagaaaatataaaatgaacatgtatggactgcacgacgggcaacggatggggccattatccgtggtcatagtgaccgctcctctccctccagccccagctactgaggcctccaaaccgcctctggaacccaggttgggtgaattgacggtgaccgacatcactcccgactcggtgggactcagctggaccgtgcctgaaggtgagttcgacagtttcgtcgttcagtataaggaccgggacgggcagccgcaggtggtgcctgtggccgctgatcagcgggaagtgacgattcccgatctggagccttccaggaaatacaagttcctcctctttggcatccaggacgggaaaagacggagcccagtcagcgtcgaggccaaaactgtcgccagaggggatgccagccctggcgcacctccacgtctgggtgaactttgggtgactgatcccactcccgacagcttgagactttcttggactgttcctgaaggccaatttgactcttttgtggtgcaattcaaggacaaagacggaccacaagtcgtgcccgtggaaggtcacgagcgttccgtaaccgtgaccccattggatgcaggcaggaagtatcgcttccttctgtatggacttctgggtaaaaaacggcatgggccattgaccgcagatgggaccactgaagccagaagcgctatggacgacaccgggacgaaaaggccccctaaaccacggctgggggaggaactgcaagtaacaactgtcactcagaatagtgttggacttagctggacggtccctgagggtcagtttgatagctttgtggttcaatacaaggaccgggacgggcaaccccaagtagtgccggtggagggctcattacgagaagtatcggtacccggactcgaccctgcccatcgttataaattgctcctctacggtctgcatcatggtaaaagggtcgggccaatcagcgccgtggctatcaccgcgggtagagaagagacagagaccgaaacaactgctccgacacctcccgctcccgagcctcatctgggagagctgaccgtggaagaggccacctctcacactctgcacctgagctggatggtgaccgaaggcgagttcgacagttttgagatacagtataccgaccgcgatggtcagctccagatggtgaggatcgggggtgataggaacgacatcaccctcagcggccttgagagtgatcaccgatacctcgtaacactctacggcttttctgacggcaagcacgtgggacccgtacatgtggaagctctcaccgtccctgaagaggaaaagcccagtgaacctcccacagccacacctgagccaccgatcaaacccaggctaggggaattgacagtcacagacgcgactccagactctctgtccttgtcttggactgtgcccgaaggacagttcgatcacttcctagtgcagtatagaaatggcgacggacagcctaaagcagtcagggtgcccggacacgaggagggcgtcacaatcagcggcctagaaccggaccacaaatataaaatgaatctgtacggatttcatgggggacaacggatggggccagtgagtgtcgtcggcgtgacagccgcagaggaggagacccctagcccgacagaaccaagtatggaggcacccgagcctgctgaagagccgctgctaggagaattaacggtgactggttccagccctgattctctaagtctctcttggaccgtgccacaggggaggtttgactcctttacagtgcaatataaggacagggacggcagaccacaggtggtccgggttgggggtgaggaaagcgaggttacagttgggggactagagcccggaaggaaatacaaaatgcacttgtatggcctgcacgagggaagacgcgtcggccctgtctctgctgtgggcgtgaccgcaccggaagaggagtccccagacgcccctctcgcaaagctgagattggggcagatgacagtgcgcgatatcacatccgactcgttgagcttatcatggaccgtccccgaaggccagtttgaccatttcttagtgcagttcaagaatggcgatggacaaccgaaggctgtccgcgtcccaggtcatgaggacggggtgacaatcagcggccttgaacctgaccataaatacaagatgaatctgtatggctttcacggcggacagcgggtgggacccgtttcagcagtgggtctgaccgcacccggtaaggacgaggagatggccccagcctccacagaacccccaaccccggaacctccgatcaagccccgtctcgaggaactgaccgtcaccgacgcgactcccgattctctgagtctgtcttggacggtgcctgagggtcagtttgatcacttcctcgtccagtataagaacggggacgggcagcctaaagccaccagggttccgggacatgaggaccgcgtgactatcagcgggctggagcccgataacaagtacaaaatgaatctgtatgggtttcacggtggtcaaagggtggggcctgtgtcagccatcggagttaccgccgctgaggaagagacaccctccccaacggaaccttcgatggaggctcccgaaccaccagaggagcccctgctcggcgagctgaccgtgacagggtcatcgcccgattctctaagccttagctggactgtgcctcaaggacgttttgattccttcactgtgcagtataaggatcgcgacggcagaccccaggtcgtgcgggtcggcggagaggagagcgaggtgacagttgggggtttggagcccggtcggaaatacaaaatgcacctctacgggctgcacgagggtcgtagggtgggcccagttagcactgtgggtgtcacagcacctcaggaagatgtggacgaaacaccgagtccaaccgaaccgggtacggaagcgcctgaaccaccagaggagcctcttctaggcgaactcactgtcacaggctccagtccggactcactcagcctgagttggacagttccccaaggccgattcgactcatttaccgtccagtataaggacagagatgggagacctcaggccgtgcgagtgggtgggcaggaatcaaaagtgacagtgcgaggactagagccgggacgcaagtacaaaatgcacctgtacgggcttcacgaaggacggagactcgggccagtaagcgcagtaggcgtcactgaggatgaggccgagacgacacaggccgtgccgacaatgacccccgagcccccaatcaagcccagactgggtgaattaacaatgacagacgcaacccctgacagtttaagcctgagctggactgtgcccgagggccagtttgatcatttcttggtgcaatatcggaatggcgacgggcaacctaaagcggtcagagtgcctggccacgaggatggcgttacgatctctggactcgagcctgatcacaaatacaagatgaatctgtatggattccacggaggtcagagggtggggcctatctcagtgatcggtgtaactgcagccgaagaagaaactccgagcccaactgagctgtccactgaggcgcctgagcctcccgaggagcctttgctcggggagttgacggtgacagggtccagccctgattcattgtcattgtcctggactatcccccaagggcattttgatagtttcacagtgcagtacaaagatagagacggtcgccctcaagtgatgagagtccgaggtgaagaatcagaggtgaccgtgggagggttggaacccggacgcaaatataagatgcatctgtatgggctccatgaaggacgacgggtgggtccagtatccacagtgggagtgactgaagatgaggccgagaccacacaagcggttcctactacaaccccagagcccccaaacaaacctcgccttggcgaattgacagtgactgatgctacgcccgactcactctctctgagctggatggtgcctgagggccaattcgaccactttctcgtacagtatagaaatggagacggccagcctaaggtggtgcgtgtgccaggacatgaggatggagttacaatcagtgggctcgaaccggaccacaagtacaaaatgaacctctacgggttccacgggggtcagagagttggtccaatcagcgtcattggggtaaccgccgctgaagaggagacacctgcaccaacagaaccatccactgaggcccctgaaccgcctgaggaacctttgctgggtgaattgaccgttacagggtcttctcccgactctctctccctcagttggaccatcccgcaaggcaggttcgattcattcacagtccagtacaaagaccgcgacggtagacctcaggtggttcgggtgagaggagaagaatcggaggttactgtgggcggactcgaacctgggtgtaagtacaagatgcatctctacggcctgcacgagggtcagcgggtaggacccgtttccgccgtgggggtgacagctcctaaggatgaagccgaaacaacacaggccgtgcctaccatgacacccgaaccgcctataaaaccgcgacttggagagctcacagtgaccgatgcgacgccagactccctgtctttaagctggatggtgcccgagggccagtttgaccatttcttagtccagtatcgaaacggcgatggtcaacccaaagccgtgcgcgtcccaggtcacgaggatggcgtgacaatttccgggctggagcctgaccacaagtacaaaatgaacctgtacgggtttcacggtggccagagggtaggacctgtttcagcaatcggcgttaccgaggaagagaccccctcccccactgagcctagtaccgaggcacccgaagccccagaagagccactgctgggtgagctgaccgtgacagggtcatctcccgattctctttccctgtcttggacggtcccccaaggccgattcgacagttttactgtgcaatacaaggatcgggacgggcagccccaagttgtcagagtgcgcggagaggagtcagaagtcactgtggggggattggaacctggaaggaaatataagatgcatctgtacggactacatgaggggcagagagtaggacccgtgtcaacggtgggtatcacggcccctctcccaaccccactcccggtagagcctcggctgggggagctggccgtcgccgctgtgacttccgacagcgtaggtctcagttggaccgtggcccagggcccttttgatagcttccttgtacagtacagggatgcccagggacagccacaagccgtgccagtgtcaggagatctgcgcgctgtagctgtgtctggcctggatcctgctcgcaaatacaagtttttactgtttggtctacagaacggcaaacgccatggaccagtcccagtcgaggctcgcaccgctcctgataccaaaccgtccccaaggctcggggaactgaccgtcacagacgcaacccccgattccgtgggcctcagttggactgtgccagagggggagtttgatagcttcgttgtccagtataaagataaggatggcagactacaagttgtgccagtggctgccaaccaacgtgaagttactgtccagggtctggaacccagccgcaagtatcgatttctgttatatggtctgtcaggcagaaaacgtctgggacccataagcgccgactccactacggcaccgctggagaaggaactgcctcctcaccttggagagctcacagttgccgaggagacaagttccagcctgaggctgtcctggacagtggctcagggtcccttcgattcatttgtggtccagtacagggacaccgatggacaacctcgggctgtgcctgtggccgcagatcaacgcacagtgacagtagaagacctggagcccggaaagaagtacaagttcctgctctatggcctgctggggggaaagcggctaggtcctgtcagcgctctgggaatgacagccccagaggaagacactccggcaccagagctggctccagaagctcccgaacctccggaggaacctaggctgggcgtgcttaccgtcactgacaccacacctgactccatgagactctcttggtctgtggcgcaagggccattcgacagcttcgtggtacagtatgaggatactaatgggcagccccaggccctgttggtagacggagaccaaagtaaaatcctgatttccggactcgagccttcaacgccttatcgctttctcctctatgggctgcatgagggcaagcgcctggggcctctcagtgccgaagggacaacagggttggcaccggcaggtcagacctcagaggaatcacgtccccgtctgagccagctgtctgtgaccgacgtgaccacctcgtcattgaggctgaattgggaggcaccccctggggcattcgattcctttctcctccgcttcggtgtgccttccccctcaacactggaaccacaccctagacccctgctgcagagggagctcatggtgccaggaaccaggcacagcgctgtgttgcgagatcttaggtctggcacgttgtatagtttgaccctctatggccttagaggtccccacaaagccgattcgattcagggcaccgcaagaactctgtcccccgtcctggagagccctcgcgacctgcagttcagcgaaattagagagacaagcgccaaagtaaattggatgcctccaccctccagagctgactcttttaaagtctcgtaccagcttgccgatggaggggaacctcagagcgtgcaagtggatgggcaagcacgcacgcaaaagttgcagggactgattccaggtgcgcgttatgaggtcacagtggtctcggtgcggggttttgaggaaagcgagcccctgaccggatttttgaccacggtccctgacggaccgacgcagctgcgagccctgaacctgacggaagggttcgctgtactccattggaagccacctcagaatccagtggatacgtatgatattcaggtcacagctcccggtgccccacccctccaggccgagactccaggaagtgcagtcgactatcccctgcatgatttagtccttcatacaaactatactgccacggtcaggggtcttagaggcccaaatttaaccagtccagcctccattacctttaccacagggttagaagctcccagagacctagaggctaaagaagtcacccctagaactgcattgctcacctggactgaaccacccgtgcgaccagcagggtacctgctgtccttccacaccccaggaggtcagacccaagagatactcctgcctggcggaattacctcccaccaactgctggggctcttcccttcaacttcctacaatgcgaggctgcaggccatgtggggacagtctcttctcccgcctgtgtccacttcgttcaccacgggcggattgcggattccgtttcctagggactgtggagaggagatgcagaacggtgctggagcgtcccgaacatcaaccatcttccttaatgggaaccgggaacgtccgctaattgtgttctgcgatatggagaccgacggcggagggtggctcgttttccagaggcgcatggatggccagacggacttttggcgagactgggaggattatgctcatgggttcggaaacatctcaggagagttctggctcggcaacgaggccctccactccttgactcaggcgggagactattctatgcgcgtagatctcagagctggtgacgaggctgttttcgcccagtacgattcattccacgtggactctgcagcggaatattaccgactgcacctggagggataccacgggaccgctggagattctatgagctatcacagcggttcagtcttcagtgcgcgtgatagagacccaaacagtctcctgatttcctgcgctgtctcctatagaggcgcttggtggtatcgcaattgccattatgctaatctgaacggactctacgggtccactgtggatcaccagggcgttagttggtaccactggaaaggattcgaatttagtgtacctttcaccgaaatgaagctgagaccacgcaacttccggtcgcctgccggaggcggttat

SEQ ID NO: 201544 - DNA, 12729 bp, Artificial Sequence
  derived and/or modified sequence
atgatgcctgctcagtatgcccttacgagtagccttgtactcctcgtattactctctacagcaagggccggaccattttcttcgcggagtaatgtaacactgcccgcaccgaggccgccaccccaaccaggcggtcacacagtcggggctggcgtgggctccccctcttcccagctgtacgagcacaccgtggaaggaggcgagaaacaggtggtgttcacgcaccgtattaacttgccgccttccactggctgtggctgtccacccggaacggagcctcccgttctcgccagcgaggttcaagccctgagggtccgtctggagatactggaggagctcgttaagggactaaaggaacagtgcactgggggatgctgccctgcctccgcccaggctggaactggccagaccgatgtacgcacactttgcagtctacacggggtgtttgacttgtcgcgatgtacttgttcctgtgagcccggatgggggggtccaacttgttcagatcctactgatgctgaaatccctccatcatccccgccttcagcctctggttcgtgtcccgacgattgcaatgaccaaggcaggtgcgttaggggcagatgtgtatgttttcccggatataccggtccttcttgcgggtggccaagttgtccgggtgattgtcagggaagagggaggtgtgtccaaggggtgtgcgtctgtcgagcgggattctcaggcccagactgttctcagcgctcgtgtccaagaggctgctcccaaagaggcaggtgcgagggcggaaggtgcgtatgcgatcctgggtacacaggcgacgactgcggcatgagatcttgccctagaggatgttcccaaaggggtcggtgcgaaaacgggcgttgtgtctgtaacccaggctatgctggcgaggactgcggggtgagaagctgtccacgtggctgttcacagcgaggtagatgtaaggacggcagatgcgtgtgtgatcccggttataccggagaggattgcggtacgcgctcctgtccttgggattgcggagaaggcggacggtgtgtggatggaaggtgtgtttgctggcccggttatactggtgaggattgctccaccagaacctgtccaagagattgtcgcggaaggggcaggtgcgaggacggcgagtgtatctgtgatactggatactctggggacgactgcggcgtcagatcctgtccaggagattgcaatcaaagagggcgatgtgaagacgggaggtgcgtgtgttggcccggttatacaggaactgactgtggatcccgggcatgcccgagggattgtagggggagaggcagatgcgaaaatggtgtgtgtgtgtgtaatgctggatattcgggggaggattgtggggttcgcagttgtcccggtgattgccgaggacggggtcgatgcgagtcaggtcgctgcatgtgttggcccggatatactggacgggattgtggtacaagagcatgtccaggagattgcagaggccgtggtcggtgtgttgatggtcgttgtgtttgtaacccaggcttcaccggcgaagactgtggcagcagacgctgtccaggggactgtagaggccacggactgtgtgaggacggcgtctgcgtctgcgatgcgggttattctggcgaggactgcagcacgcggtcgtgccccggaggatgtcggggacgcggacagtgtctggacggcaggtgcgtctgcgaggacgggtatagcggcgaggattgtggcgtccgtcagtgtcccaatgattgctcacagcatggagtttgccaggatggcgtctgcatttgttgggagggctatgtctcagaagactgttctataagaacctgtccttcaaactgtcacggcagggggcgatgcgaggaagggagatgcttgtgcgaccccggatacaccggtcctacgtgcgccactaggatgtgccctgccgattgcagaggcaggggcagatgcgtgcaaggtgtttgtctctgccatgtggggtatggcggtgaagattgtgggcaggaggagccacccgcaagcgcctgtcctggagggtgcggccctagggaattgtgccgagctggacagtgcgtttgcgttgagggatttcggggacccgattgcgcgatacaaacatgtccaggcgattgtagaggcagaggagagtgtcacgatggcagttgtgtgtgcaaagatgggtatgccggagaagactgtggtgaggaggtcccaaccatcgaaggtatgaggatgcacctgttagaagaaactactgtgagaactgaatggaccccagcccctggtcctgtggacgcctacgaaattcaatttattccaacaactgagggggctagcccaccctttaccgcacgcgtcccctcaagtgcgagcgcctacgaccagcggggtctggcaccaggccaggagtaccaggtcactgtgcgcgcactgcgaggcacctcctggggcctgccagcctctaagactatcacaaccatgatagacggtcctcaggacctacgggtggtggctgtgactcctacaacactggaattgggatggctgcggccacaagcggaggtggatcgattcgtcgtgagctatgtctctgccggaaaccagcgagtgcgcctggaggtaccaccagaagcagatggcaccctgctgaccgatttgatgccaggagtggagtacgtggtcactgtcacggccgaacgcggaagggccgtgagctacccagccagcgtgagagcaaacacaggaagctctcctcttggactgcttggcacaactgatgagccccctcccagcggcccaagcacaacccagggtgcccaggctcctttattgcagcagaggccccaggagctgggggaactgcgcgttctgggcagagacgagacaggacgattgagggtggtctggacggctcaaccagatacttttgcatactttcagctcagaatgcgcgttcccgaaggccctggcgcacacgaggaggtcctcccaggggacgtgcgtcaagccctggttcctcctcccccacccggtacaccatacgagctcagcttgcacggcgttccaccagggggaaaaccgagtgatcctatcatctaccaaggaattatggacaaggacgaagaaaagccgggtaaatcttctggtccacctcgtctaggggaactcacggtgacagacagaacatcagactcactgctcttgcggtggactgtgccagagggagagttcgatagtttcgttatccagtataaggatcgtgatgggcagccccaggtagtcccagttgagggtcctcagagaagtgcagtgatcacttcccttgatcctggcagaaaatataagtttgttctctacggattcgttggcaagaagagacacggtcccttggtggccgaagctaaaatcctgcctcagtctgacccatcccccggaacaccccctcacctgggaaatctgtgggtgacggatcccaccccagacagcttacacctgtcctggactgtcccggagggccagttcgatactttcatggtgcagtacagagacagggacggccgacctcaggttgttcccgtagaaggacccgagaggtctttcgtggtgtcttccctggaccctgatcacaagtatcgcttcaccttgtttggaatagcaaataaaaagagatatggacccctcactgcagatggcaccacagcccctgagcggaaggaggaaccccctagaccagaatttctggaacagcccctgttgggggagctgaccgtgaccggagtgaccccggactctctccgactgagctggacagtagctcagggcccatttgattcgtttatggtccagtataaggacgcccaggggcagcctcaagccgttcctgtcgcaggcgacgaaaacgaggtcacagtacctggcctggatcctgaccgaaagtacaagatgaatctttacggcttacgtggccgacagagagttggtccggagagcgtggttgccaaaacggctccacaagaagacgtggacgagactcccagccccactgaactgggcacagaagctccagaatctcctgaggagcccctccttggggaactcacagttaccgggtcctctcccgacagcttaagtctgttttggaccgttcctcagggctcttttgacagcttcacagtgcagtataaggaccgagatggacgtccacgtgcggttcgggtcggaggcaaagagagtgaggtgacggtcggcggtttggagcccggacacaagtacaaaatgcacctctacgggttacacgagggccaaagagtggggcctgtaagtgccgtgggggttactgcgccacagcaggaagagacccctcctgccaccgagtcaccactggagcccagactgggggagctgactgtgacagacgtgactccgaacagcgtcgggcttagttggactgtgccggagggccagtttgattcttttattgtgcagtataaagacaaagatgggcagccccaggtagtgccagtagccgctgaccagcgggaagtgaccgtctataacctggaaccagagagaaaatacaaaatgaacatgtacgggctccacgatggtcagagaatggggccattgtcagttgtcattgtgaccgcgccactacctcctgcacccgctacagaagcatccaaaccacccctggagcctagactcggggagctgacagtgaccgacatcactcccgattctgtgggtttgtcctggactgttccagagggggaattcgactctttcgtggtgcagtataaagaccgggacgggcaaccgcaagtggtgccagtggcagccgatcagagagaagtgaccattcccgatctcgagccatccagaaagtacaagtttctcttattcgggatccaggatggaaagcggcgaagtcctgtgtctgtcgaagcgaagaccgtcgcacgcggtgacgctagcccaggagcacccccacgattgggggaactttgggtgacggatcctacacccgactcactgcgactcagttggactgtgccggaaggccagttcgacagtttcgtggtacagttcaaggacaaggatggaccccaggtggtgcccgtcgaaggacacgaaaggagtgtcaccgtgactccactggatgcgggtagaaagtaccggttcttgctttatggattacttggtaaaaaacgccacggccctctgacagcagacggcaccactgaggccagatcagccatggacgacacggggacaaaacgaccacccaaaccacgcctgggggaggaacttcaggtgacaacagttacccaaaacagcgtgggtttgagctggactgttcctgaagggcagtttgacagttttgtggtacagtacaaggaccgtgatggccagccccaagtcgtgccagtggagggtagcctcagagaggttagcgtccctgggctggacccagcccaccggtacaaactgttactgtatggtctgcaccacggcaaaagggttggcccaatttctgcagtcgccataaccgcaggacgagaagagacagagactgagacaaccgcacctacacctccagcccctgaaccacaccttggagagctgaccgtggaggaggccacatcacatactctgcacctgtcttggatggtgaccgagggggaatttgatagcttcgaaattcaatacaccgacagggacgggcagttacagatggtacggataggtggcgacagaaatgatataacgctctcaggccttgaaagtgaccaccggtacctcgtaactctatacggtttctctgatggcaaacatgtgggcccagtacatgtcgaagcactcaccgtgcccgaggaggaaaagccatccgaacccccaaccgccactccagagccaccaattaagccaagacttggtgagctaacggtaacagacgccactcccgactcgctgtccctcagctggacagtcccagaaggccagtttgatcattttcttgtgcagtaccggaatggcgacggccagcccaaggccgtcagggtacccggacacgaggaaggggtgacaatctcgggccttgagcccgaccacaaatataaaatgaatctgtacggcttccacgggggacaacggatgggacccgtgtcagtcgtaggcgtgaccgccgcagaggaagaaacgcccagcccaaccgagcctagcatggaagctcctgaacctgcggaagaaccactccttggagaactgaccgtgactgggtcatcaccagactcactctccctcagttggaccgtgccacaaggtagatttgatagctttaccgtgcagtacaaggatagagatgggagacctcaggtcgtgcgagtgggcggagaggagtcagaggtcacggtcgggggactggaaccagggcgaaagtataaaatgcacctgtacggtttgcatgaaggaagacgcgttgggcctgttagcgccgtgggagtgacagccccagaagaagagtctccagacgccccactcgctaaactccgactgggccagatgactgtccgtgatataacctccgattccctcagtctcagttggacagtgcccgaaggacagtttgaccacttcctggtgcagttcaagaatggggacggccagcctaaggccgtaagagtgccagggcacgaagatggcgtgactatcagtggactagaacctgatcataagtacaaaatgaatttatacggtttccatgggggacagcgggtaggacctgtgagtgccgtggggttaaccgcgccaggtaaagacgaggagatggctcccgcaagtaccgagcctcctactccagagcctcctatcaagcccaggctggaggagctgactgtgaccgacgcaacaccagactctctgtctctgtcctggactgtgcccgaaggtcagttcgaccattttctggttcaatacaaaaacggggatggacagcctaaagctacgagggtgccaggccacgaggatcgagtgacaattagcgggttggaaccagataacaagtacaagatgaatctgtatggattccacgggggtcaaagggttggcccagtctccgccattggggtgactgcagctgaggaggagaccccatccccaacggagccgagcatggaggctcccgaaccccctgaagaacccctattgggagagctgacagttaccggatcaagccctgattctttatccctctcgtggactgtgcctcaaggcaggttcgatagctttacagtccagtataaggaccgcgacggccgaccacaggtggtgagagttggcggagaagaaagtgaagtcaccgtgggtggcctggagcctgggcgtaaatataaaatgcacctgtacggcctgcacgagggcagacgggtcggccctgtgtccactgtgggggtcaccgcaccacaggaagacgtagatgaaacaccatcccccaccgagcccggaaccgaagccccagaacccccagaggagccattgttgggcgagcttactgtgaccggcagctctcccgactcactgtctctctcatggacggttccgcaggggcgatttgactctttcacagtacagtataaggaccgtgatggacgcccacaggccgttcgagtggggggtcaggaatcaaaggttaccgtccgagggctggaaccgggaagaaaatataagatgcacctgtatgggctgcacgaaggcagacggctcgggccagtctccgctgtcggcgttactgaggatgaggcagagacaacccaggcagtacctactatgacgcccgaacctcccatcaagcctcgcctaggagagctcactatgacggacgcgactcccgactctctatcattgtcctggacggtgcccgaaggccaattcgaccatttcctggttcagtaccgcaacggggatggccagcccaaagcagtgcgggtgcctggccatgaggatggcgtgaccatcagcggccttgaaccggaccataaatataagatgaacctctatggatttcatgggggtcaacgtgttggcccaataagtgtgatcggggttacagcagccgaagaagagacaccttcgccgaccgagctcagcactgaggcccctgagccgccagaagagccgctcctgggggagctgactgtgaccggctcaagtcccgatagcctatccttgtcatggaccattccacagggtcatttcgacagttttacagttcagtataaggaccgggacggcagaccgcaagtgatgagggtgcgcggtgaggaaagcgaagtgacggttgggggactggagccagggaggaagtacaaaatgcacctgtatggattgcatgagggcagaagggtcggtcccgtgtcaaccgtgggtgtaacagaggacgaggcagaaaccacccaggctgtaccaacaaccaccccagaaccgccaaataagcctcgacttggggagctgactgtcacagacgccacacccgactcccttagccttagctggatggtgcctgaagggcagttcgatcatttcctggtgcagtataggaacggcgatggacagcccaaagtagtgcgcgtcccagggcacgaggacggtgtgacaatcagtgggctcgaacccgaccacaagtacaagatgaatctttatggatttcacggcggacagcgcgtgggaccaattagtgtaattggggtgacagcagcggaggaggagacccccgctcctactgagcccagcacagaggcccctgaaccacctgaagagcccctactgggcgagctgaccgtgaccgggagctcaccagattcattatctctcagctggactatacctcaggggcgattcgactccttcaccgtgcagtacaaagatcgggatggacgacctcaggtagttcgcgtcagaggcgaagagtccgaggtgacagtgggcggactcgagcccggttgcaagtacaaaatgcacctgtacggcctccatgagggccagcgggtcggacctgtgtccgcagtgggcgtcaccgccccaaaagacgaggctgagaccactcaagccgtacccactatgacgcccgaaccacccataaagcctagactgggcgagctgactgtcactgacgcaaccccggacagcctctctctgagctggatggtacccgaggggcaatttgatcattttctagtgcaataccgtaatggcgacgggcagcctaaggctgtcagggtccctggtcacgaggacggcgtgaccatatctggcttagagcctgatcacaaatacaagatgaacctgtatggatttcacggcggacagagagtgggtcccgtttcagcaatcggggtaacggaagaagagaccccttcacccactgaaccatccaccgaagcacctgaagctccagaagaaccccttcttggggagctgaccgtgacaggaagtagcccggatagtctttcactgagttggaccgtacctcaggggagatttgacagcttcacagtgcaatataaggatagagacgggcagccccaagtggtccgagtgcgcggagaagaaagtgaagtcacagttggaggactagaacctggacggaagtataaaatgcacctgtacggcctgcacgaagggcagcgggtgggtcccgtatcaacggtcgggatcacggcacccttgcccaccccactgccagtggaacctcggcttggagagctggcagtagccgcagtcactagtgattccgtggggcttagttggaccgtagcacaaggaccttttgattcgttcctcgttcaatatcgggacgcccaagggcagccacaagccgtgccagtttctggtgacctgagggccgtcgcggtgtcggggctagaccctgctaggaagtacaagttcctgctattcggactgcagaatggcaagcgccacggacctgtgcctgttgaagcccgaacagccccagatacaaaacccagcccgagactgggcgaattgacagtaaccgacgctacgcccgactcggtgggcctgtcttggactgtaccagagggggagttcgacagttttgtggtccaatacaaggataaagatggacgcctccaagtggtgccagttgccgctaatcagcgtgaagtcaccgttcagggcctcgagccttctagaaagtaccgcttcctgctgtatggattgagtggcaggaaaaggctcgggccaatcagtgctgactctacaactgccccactcgagaaagaactgcctccgcacttgggcgagttaactgtggctgaagaaacttcgtccagtctcagattgtcatggaccgtggcccaggggccattcgattctttcgtggtgcagtaccgagacacagatggccagcctcgggcagtgcctgtggctgctgaccagcgcactgtgaccgttgaagacctcgagcccggaaagaagtataagttcctgttatatggactgttaggtgggaagaggctcgggcctgtcagtgcccttggtatgactgcaccagaagaagacaccccagcccctgagttagcccctgaggcgccagagcctcctgaggagccaaggctgggggtactcactgtgaccgatacaacaccggattctatgaggcttagctggagcgtggctcaaggtccatttgattcctttgttgtgcagtatgaggatacgaacggacagcctcaagctctgttagttgatggagaccagagcaagattctcatctcaggtctggaaccaagcacaccctacagatttttgctttacgggttacatgaagggaaacggctgggccctctttcagccgaagggactacaggtctcgctccagctgggcaaacctccgaagagagcaggccgaggttgagccaactgtctgtcactgacgtaaccactagttctctcaggctgaattgggaggcacctccaggcgcattcgatagttttctgctccggttcggtgtgcctagtccatcaaccctggagccccatcctcggccactcctgcagagagaactgatggtaccaggaaccaggcacagcgcagtacttagagatcttaggtcgggcaccctatactctctcaccctttatgggctgcgtggcccacacaaagctgatagcatccaggggacagccagaaccttatccccagttctggagtctccaagggacttacaattctccgaaataagggaaacgagtgcaaaagtcaattggatgccccctccgagcagagcggatagcttcaaagtgtcttaccagttggcggatggaggtgagccccagagcgtgcaggtcgacggtcaagcgcgtacccagaagctgcaggggttgatccccggtgccaggtacgaggtgaccgtggtgagcgtgcgaggttttgaagagtctgagccactgactggattccttactacggtaccggatggcccaacccagttgcgcgctctcaatctgacagagggatttgctgtgctccattggaagccacctcaaaaccctgtggacacatatgacgtgcaggttaccgccccaggggctccgccacttcaagccgaaaccccaggaagtgcggtggattacccattgcacgatctggtgctgcatactaactacacggccactgttagggggctgcgcggtcccaatctaacctcacccgcatcaatcaccttcaccactggacttgaggctcctagagaccttgaagccaaggaggtgaccccccgaactgcgctgttgacctggacagaacctccagtgcggcctgctggttaccttctcagtttccatactcccggagggcaaaatcaggagattcttcttcccggaggaattaccagccatcagctccttgggcttttccccagcacgtcttacaacgcacggcttcaggccatgtgggggcagagtctgttgccacctgtgtccacctcctttactactgggggtctcagaatcccttttccacgggattgcggagaagaaatgcagaatggcgcaggggcttcgagaactagtaccatcttcttaaacggtaacagagaacggcctctgaatgttttctgcgacatggaaacagacggtggcggttggcttgtgttccagaggaggatggacggccaaacagatttttggagggactgggaagactacgctcatggatttggcaacatatccggcgaattttggctgggaaacgaggcattgcactctcttactcaggcaggcgactattcaatgcgggtggacttgcgggcaggagatgaggccgtctttgcccagtatgatagttttcatgtagatagcgcggctgagtactaccggctccacttagaaggctaccatggcactgcgggtgactcaatgtcctaccactcagggtcggtttttagcgcacgagacagagaccccaattctctgctgatctcctgcgccgtttcctaccgaggagcctggtggtaccgcaattgtcattacgccaatctgaacggcctttacggcagtactgtggatcaccagggggtttcctggtaccattggaagggatttgaattcagcgtgcccttcacagaaatgaagctgagaccgaggaacttccgatcgcccgctggaggtggttat

SEQ ID NO: 201545 - DNA, 843 bp, Artificial Sequence
  derived and/or modified sequence
atggtcactgaaggtgaatttgactcattcgagatccagtataccgatcgcgatggtcaattacagatggtgagaatcggcggagatcgcaacgacatcactttgtctggccttgagtccgaccaccggtacctggtaaccctgtacggctttagcgacggcaaacacgtcggacccgtgcatgttgaagcactgactgttccggaagaggaaaagccttccgaaccaccaacggcgaccccagagccccctattaagccccgactcggggagctcactgtaaccgatgctacccctgattcactttcactgagttggacagtgcccgaaggacagtttgatcatttcctggttcagtatagaaatggcgacggtcaaccaaaggcagtgagagtcccgggtcacgaggagggagttacaataagtgggttggaacccgatcacaagtataagatgaacctctatggttttcacgggggtcaaagaatgggccctgttagtgtggtgggggtcacagcagcagaggaagaaacaccctcccccaccgagccctcaatggaagccccagaacctgcggaggaacccctgcttggtgagctgacagttacaggttcatcaccggattccctgtctctgagttggaccgtcccccagggacgttttgactcctttaccgttcagtataaggatagagatggaagaccgcaggtagttcgggttggtggtgaggagtccgaggtcacagtgggaggactcgagcctggcaggaaatataagatgcacctctatggattgcacgaaggcaggagggttgggcctgttagcgcagtgggcgtcacgtag

SEQ ID NO: 201546 - DNA, 12729 bp, Artificial Sequence
  derived and/or modified sequence
atgatgcccgctcagtacgcgctaacgtccagtctggtgcttctggttctgttaagtacggctcgagccggtcccttttctagcagaagcaacgtaacgcttccagcccctagacctcccccacaaccaggcggtcacactgtaggggcaggcgtgggctctcctagctctcagttgtacgaacacacagttgaagggggtgagaaacaagtcgtttttacccaccgcatcaatttgccacccagtactggatgtgggtgtccaccgggaacagaaccacctgtgctggcttcggaggtgcaggccttgcgcgtgcgcctcgaaatactagaagaactggtgaaaggtctcaaggaacagtgcacagggggatgttgcccagctagcgcccaggccggaacaggacagactgatgttcgtacactctgctccctacatggcgtttttgacctaagcaggtgtacctgctcttgtgagccaggatggggtggccctacttgtagcgatcccacagacgctgagattcccccttctagcccgccaagtgcttctgggtcatgccccgacgattgtaacgaccagggaaggtgtgtacggggtcggtgcgtgtgttttcctggttacacgggcccaagctgcggttggcctagctgcccgggagactgccagggcaggggcagatgtgtgcagggggtatgcgtttgtagggccggtttttcaggtcccgattgctctcaaagaagctgtccacgcggttgctctcagaggggccgatgtgaaggtggaaggtgcgtgtgcgatcccggatacacaggcgatgattgtggcatgcgatcctgccctagggggtgcagccagcgcggacggtgcgagaacggccgttgcgtgtgcaacccgggttataccggtgaggactgcggagtaagatcgtgtccacgcggatgctcccaaaggggcagatgtaaggacggacgttgtgtgtgtgaccctgggtacacaggtgaggactgtgggacaagaagttgcccgtgggactgcggggagggtggtcgatgcgttgatgggagatgtgtttgctggcctggatatacgggagaagattgctccacacgcacgtgtcctagggattgccggggacgagggagatgcgaggatggagagtgtatctgtgataccggttatagcggagacgattgcggggtgcgcagctgtccaggagattgtaaccagcgaggcaggtgtgaggacggccgatgtgtctgctggcctgggtataccggcacagactgcggcagccgagcctgtccccgagactgccgcggaagagggaggtgcgagaacggagtttgtgtttgcaacgctggctactctggcgaggattgtggggtccggagttgtcccggtgactgtcggggacggggaagatgcgagagtggacggtgtatgtgttggccagggtatacaggccgtgattgtggtacaagggcttgtccaggggattgccgcggacgtggccgatgcgtagacgggagatgcgtttgtaacccgggatttactggagaagattgtggcagcaggcgttgtcccggagattgccgcggtcatggcttgtgtgaggatggcgtatgcgtctgtgatgctggctactccggcgaagactgctccactcggagctgccctggaggatgccgcggtcgagggcagtgcctggacggccgatgcgtctgcgaggatggctactcaggcgaagattgtggtgtacgccagtgccctaatgactgttctcaacacggggtttgccaagacggagtttgcatctgctgggaaggatacgtgtctgaggactgttctatacgcacttgtccgtctaattgtcacgggcgaggcaggtgcgaggaggggagatgtctttgtgaccccggatacaccggtcctacttgtgccactcgaatgtgtcccgcagactgccgcggtcgcggtaggtgcgtgcagggggtgtgcttgtgccacgtgggctacggcggagaagactgtggccaggaggagccgccagcatcagcctgcccaggcggttgtggcccaagggaactctgtagagccggtcagtgcgtttgcgtcgaaggattcagaggccctgactgcgccattcagacttgcccaggtgattgtagaggcagaggagagtgtcacgacgggtcctgtgtgtgcaaggatggctatgccggtgaagattgcggagaagaggtccctaccattgaagggatgcgtatgcacctgttggaggaaaccacggtgagaacggagtggaccccagcccctggccctgttgatgcatacgagattcagttcattcctaccacagaaggagcctcccccccattcactgctagggttccgtcatcggcctccgcctacgaccagcggggtctggcaccagggcaagagtaccaggtgactgtgagagccctgcgcggaacgtcttgggggttgccggcaagtaaaaccatcacaacaatgatcgatggcccacaggacctgcgcgtcgtagcggtcacccccacgacactggagctgggatggttgagacctcaggctgaggtcgatcgcttcgtcgtgtcctacgtgagcgcaggtaaccagcgtgtgaggctggaggttcctcccgaggccgacgggacactgctcactgatttgatgcccggagtggagtacgtggtgacagtcaccgccgagagaggccgtgcagtctcctatcccgcatcagtaagagctaacaccgggtcctctcctttagggttgctggggaccactgatgagcccccaccaagcggtcccagtacaactcagggagctcaggcaccccttctgcagcaacggcctcaggagcttggcgagttgcgagtgctcggcagagacgaaaccggacgcttaagggtcgtctggacagcccagcctgatacttttgcgtacttccagcttagaatgcgggtccccgaagggccaggtgcccatgaggaggtactgcccggagatgtgcgccaggctctggtccccccaccgcctccaggaacgccctacgagctttcgctgcatggcgtgcctcccggagggaaaccgagcgaccccattatctaccagggaattatggacaaagatgaggagaagccaggaaagtcctccggaccgcctcgacttggagagctgacagtgaccgatagaaccagtgatagcctgcttctgagatggaccgtgccagaaggggaattcgactccttcgtgatccagtacaaagacagagatggccaaccacaagtggttcccgtcgaagggcctcagcgctcagccgttatcacatcactggaccctggtcgcaagtacaagtttgtcctgtacggattcgtgggcaagaaacggcacggcccattggtggcagaagcaaagatcctccctcaatcagacccctctcccggaacgccgccaagactcggtaatctgtgggtgacagatcccactccagacagtctgcacctctcttggactgtcccagaggggcaattcgatacgtttatggtgcagtatcgggaccgcgatggaaggccccaggttgttccggtggaagggccagaaaggtcctttgtagtgtcatctctggacccagatcacaagtaccggttcacccttttcggaatcgccaacaagaaaaggtacggacccctaactgccgacggaactacagcgcctgagagaaaggaagagccacctcaccctgaatttctagaacagccgcttctgggcgaactgacagttacaggcgtgactcccgacagcctgagactgtcatggacagtggcccaaggaccattcgatagttttatggtccagtacaaggacgcgcagggtcaaccacaggccgtgcccgtggctggcgatgaaaatgaggtgacagtgcccggtctggatcctgaccgaaaatacaagatgaacctgtatgggctacggggtcggcagagagttggcccagagtcagtggttgctaaaactgcccctcaggaggatgttgatgagacaccctccccaaccgaactgggaactgaagcccctgagtctccagaggagccgctgttgggcgagcttactgttacaggctccagccctgattccctttctctcttctggacggtcccgcagggtagtttcgattctttcacagtgcaatacaaagacagagacgggaggccgagggcagtgagagtgggtggcaaagaaagcgaagttacagtgggtggcctggagcctggccacaagtacaagatgcacctgtatggactgcacgaaggccagcgcgtgggtccggtgtccgctgtgggagttaccgcaccacagcaggaggagactcctcccgcaacagagtctccacttgagccacgcctgggagagttgacggtgaccgatgttactcccaacagcgtgggcctgagctggaccgtgcctgagggacagtttgacagttttatagttcaatacaaagacaaagatggacagccccaggtcgttcccgtcgccgcagaccaaagggaagtcactgtttataatcttgagccagaaagaaagtataagatgaacatgtacggcctccacgacgggcagagaatgggcccactttccgtcgtgattgtcaccgcaccactgcccccagccccagccacagaggcatctaaaccgccactcgaaccccgactgggggagctgacagtcacggatatcacaccagactcagtgggcctctcctggaccgtgcccgagggcgagttcgactccttcgtggttcagtacaaagatagggacggccaacctcaggtcgttccagtcgctgcagaccaaagagaagtcacaatccccgatctggagccttcccgcaaatataagttcctgctgtttggaatccaggatggaaaacgcaggtcccctgtgagcgtggaggccaaaaccgtggctcggggagacgcctctcccggtgcgccacccaggctaggagaactgtgggttacggaccctactcctgactccctgcgactctcttggaccgtccctgaaggacagttcgacagctttgtcgtgcagttcaaggacaaggacggacctcaggtggtgcccgtcgaagggcatgagcgctcagttacagttacaccacttgacgcgggaagaaagtataggtttttgctgtacggcctcttaggaaagaaacgccacggaccactgactgcggatggcactacggaagcacggtccgctatggatgacaccgggactaagcggccaccaaagccacgactaggcgaagaattacaagtaactaccgtaactcagaatagtgtcggactgtcctggactgtacccgagggccagttcgactcttttgttgtacagtataaggatcgtgacggacagccccaggtagttccagtggagggcagtctgcgagaggtcagcgtgcccggacttgaccctgcgcacagatacaagctcctgctctacgggctgcatcacggaaaacgggtcggaccaatttccgcagtggccattacggctggacgcgaagagaccgaaactgaaactactgcaccgacacctccagcaccagagccacatttgggtgaactgactgtcgaggaagccacgtctcacactttgcatctctcatggatggtgactgaaggggagttcgattctttcgagattcaatacacagatagggatgggcagctccagatggtccgcatcggcggagatcgcaacgatattacactatcgggtctcgaatcggaccaccgttacctcgtcacgttgtatgggttcagcgatggaaagcacgtcggacccgtccacgtcgaagccctgactgtgcccgaagaagaaaagccttctgagccccctacagccactcctgagcctccaataaagccccgactaggagaattgacagtgaccgacgcaacacctgattccctgagtctaagctggacggttcctgaaggacagttcgaccattttttggtgcaatatcggaacggcgacgggcagccgaaggcagtgcgcgtgccaggacacgaggagggcgtcaccatctccggtcttgaacctgaccacaaatataagatgaacttatacggttttcatggcggtcagcgcatgggtcccgtctcagtggtgggcgtgactgcagccgaggaagagaccccatctcctacagaaccatctatggaggctcctgaacccgcagaagagcccctgcttggagaactgaccgtgaccggatcatcaccagattccctaagcctttcgtggactgtgcctcagggacggttcgatagctttacagtgcagtataaggatagagacggcaggccacaggtggtgagagtcgggggtgaggaaagtgaagtaacagtgggcggactggagccgggacggaaatataagatgcatctctacgggctgcacgaggggaggcgggtggggcctgttagcgccgtcggagtgacagctcccgaggaggaaagtcccgatgcacccctagccaagcttcgcctcggccagatgacagtgcgcgatatcacttcggattctctgagcctgtcttggacagtacctgaaggacagtttgatcattttttagtgcaattcaagaacggggatggtcagccaaaagccgtcagagtccccggtcacgaggacggtgtgactatctctgggttggagcctgaccacaagtataagatgaacctttacggattccatggcggtcagcgggtgggccctgtaagcgcagttggcttgacagcacctggaaaagatgaggaaatggctcctgcatccaccgaacctcctacaccagaaccacccatcaaacccagactcgaggaactgacggtaacagacgcgacccccgattctctgtctctgagttggactgtgcccgaaggacagtttgaccacttcttggtacagtataagaacggagatgggcagcctaaggctaccagagtgcctggccacgaagaccgggtgacgattagtggcctagagcccgataataagtataagatgaacctgtacggcttccacggaggccaacgcgtgggtcccgtttccgccatcggcgtaaccgccgctgaggaagagaccccaagccctacagagccatctatggaagctccggagcccccagaggagccactactcggtgagttaacagtgaccgggtcttccccggattctctgtctctctcttggacagtgccacagggacggttcgattcctttaccgtgcagtacaaagaccgggatggcagaccccaggtggtgagggtaggcggagaggagtctgaagtaacagtgggcggactggaacccggtcgcaagtacaagatgcatctgtatggcctgcatgaggggagacgtgtgggccctgtgagcactgttggcgtaaccgctccgcaagaagacgttgatgaaacaccctctcctacagaacctggaactgaggcccctgagcccccagaggagcccctgttgggagaactaaccgtgaccggaagctcgcctgattccctctctctatcttggacagtccctcaggggagattcgacagtttcaccgttcagtacaaggacagggacggtcgccctcaggccgttcgtgtcggcggacaggagagcaaagtcaccgtacgcggtcttgaaccagggaggaagtataaaatgcatttgtatggcttacacgaggggaggcgcttgggcccagtctctgctgtgggagtaacagaggatgaggcagagactacacaggctgtccccaccatgacaccggagcccccaatcaagcccaggctaggcgagctcaccatgacagacgcaacaccagactcccttagcctgtcctggacagtgcccgaagggcagtttgatcactttctggtacagtatcgcaacggtgatggacagccaaaggcagttcgggtccccggacatgaggatggcgtcaccatatctggcctcgagccagatcacaagtacaaaatgaatctttacggcttccacgggggtcagcgggtgggaccaatcagcgtgattggggtgaccgctgctgaggaggaaactccaagcccgacagaattgtccactgaagcgcctgagccgcctgaggagcccctcttaggggagctgacagtaaccggttcatctcctgactctctgtcactcagttggaccattccccagggacacttcgactccttcactgtccagtataaagacagggatggacggcctcaggttatgcgagtgaggggagaggaaagcgaagtcaccgtggggggtctcgaacccggacgaaaatacaagatgcacctctacggattacatgaaggccgacgcgtgggtcccgtcagtaccgttggtgtgacagaagatgaagccgaaactacccaggcagttcctaccaccacaccagaaccgccaaataaacccagactgggggagctgaccgtgaccgacgccacaccggatagtctgagcttgtcatggatggtgccagagggacagttcgaccacttcctggtacaataccgcaacggagacggacagccaaaggttgtgagagtgccaggtcatgaggacggtgtaaccatcagtggcctggaacccgaccacaagtataagatgaacctatatggatttcatggcggacagcgcgtagggcctatcagcgtgataggggtgaccgctgcagaggaggagactcccgcaccgaccgaaccctcgacagaggcgcctgagcctccagaggaacctttgcttggggaactgacagtcacaggttctagccccgactcactgagcctgagctggactatccctcagggaaggttcgactcatttactgtgcagtataaagaccgcgacggtagaccccaggttgttcgcgtccggggagaagagtcggaagtgacagtaggaggcctagagcctggctgcaaatacaagatgcacttgtacggtctgcatgaaggccaacgggttggcccagttagtgccgtgggagtgaccgcgccaaaagatgaagccgaaaccacccaggcagtccccaccatgacgcccgagccgccaataaaaccccgacttggtgagctgacggttacagatgcgactcccgattctctctcccttagttggatggttcccgaggggcagttcgaccactttctcgttcagtatagaaacggggatggtcagcctaaggctgtgcgggtaccaggccatgaggatggggtgactatcagcggcttagagccggatcacaaatacaagatgaacctgtacggtttccacggaggacagcgcgtcggaccggtatccgcgattggcgttacagaggaggagaccccctctcccactgagcctagcaccgaggcccctgaagcacccgaggaacctctcctcggcgaactcacagtaacgggatcttcccctgactccttgtccctgagctggaccataccccagggcagatttgattcttttactgtgcagtataaagaccgagacggacagccacaagtggtcagagtgcgtggggaggaatccgaggtgactgtagggggactggagccgggaagaaagtataagatgcacctgtacggcctgcatgaagggcagcgtgtaggtccagtcagcaccgtaggtatcaccgccccactgcccaccccactgccagtggaacctcgacttggagagctcgccgtggcagcagttacctccgattccgtcggcctgtcgtggactgtggcgcaaggtccattcgactccttcctggtgcagtaccgcgacgcccagggccagccccaggcagtgcccgtgtctggggatttgcgagccgtggcggtttccggtttggaccccgctcggaaatacaaattcttgctttttgggttacagaatggcaagcgacatgggcctgtgcctgttgaggcgcgtacagctcccgacaccaaaccgtcaccgagactcggggaattaacagtgaccgatgccactccagacagcgtgggcttaagctggacggtaccagaaggtgagtttgactcattcgtagtgcagtacaaagacaaggacggtcggttgcaggtcgtgcccgtggccgcaaatcaaagagaagtcactgtgcagggcctcgaaccaagccggaaatatagatttcttctttatggactgagtggcagaaaaaggctaggcccaattagcgctgattcaaccaccgcgcctctggagaaggaattgccaccccatctgggcgagctcactgtagcagaggagacatcaagttccctccgcttaagttggaccgtcgcacaggggccttttgattccttcgttgtccagtacagagacacagacggccaacccagagccgtgcctgtggccgctgatcagaggacggtaacagtcgaggatctagagccgggtaagaagtacaagtttctgttatacggtcttcttggcggaaagaggttgggtccggtatctgcactggggatgaccgcccctgaggaagatacccccgcaccagagctcgcccctgaagccccagagccaccggaggaacctagactcggggttctcacagtaaccgacacaacacctgattcaatgcgcctatcttggtccgttgcccaaggtccttttgattctttcgtcgtacagtatgaggatactaacggccagccccaggctttgctggtggacggtgatcaatctaaaatcctgataagtggtctggaaccttccacaccttaccgcttcctgttgtacggtctgcacgagggcaagcgcctcggccctctgtccgcggagggcactacaggcctggccccagccggacagactagcgaggaatctaggccacgactgtcacagctgagtgtcactgacgtgacgacgtccagtctgagactgaattgggaagcacctcccggtgcttttgactcttttctcctacgtttcggagtgcccagtcccagtaccctggagccacacccacgacccctgcttcagcgagagctgatggttcctggcacccgccatagtgctgttttacgagatctccgctcaggaaccttatatagtctcacgctgtacggtttacgtggaccacacaaagctgactcaatacaaggaacggcaagaacgctctctcctgttctggagtcccccagagacctgcagttcagtgaaattcgagaaacgagtgcgaaggtgaattggatgcccccaccgtcacgcgcagactcctttaaggtgagctatcagttggccgacgggggtgagccccaatcagtgcaggttgacggtcaagcgaggacacagaagctccagggtttaataccgggtgcgcgttatgaggtaacggtggtgtctgtgcgtggctttgaggaaagtgaacccctgacaggatttctgactaccgtgccagatggcccaacccaactacgtgccctgaatctcaccgaggggtttgccgtacttcattggaagcctccccagaatccagtcgacacgtacgacattcaagtcactgccccaggagctccgcctctccaagctgagacccccggttccgccgtagactatcccttgcacgatttggtgttgcataccaattacacggccaccgtacgcggactgcggggaccaaacctgactagtcctgcatcgattacatttacaacaggcttggaggcaccacgtgatctggaagctaaggaagtaacgcctcgtacagccttgctaacttggacagagcccccagtccgcccagcgggatacctcctctccttccacactccaggaggccagacgcaggagatcctgctcccagggggaatcactagtcatcagctcctcggcctttttccgagtacttcctacaacgctaggctccaggctacgtggggccagtcactgcttccacctgtgtctacatcctttaccaccggtgggctcaggatcccttttcccagagactgcggggaagagatgcagaatggcgctggcgcttcccggacatccaccatcttcctgaacggaaaccgggaacgaccccttaacgtgttctgtgacatggaaactgatggcggaggatggcttgtcttccagcggagaatggacggtcagactgatttctggcgggattgggaggactatgcacacggtttcggcaatatcagcggcgaattttggctgggcaatgaggctcttcactcactgacccaggctggcgactattccatgagagtggatttgcgcgctggggacgaagcagtctttgctcagtacgacagttttcacgtggattcagccgcagaatactaccgactccacctagagggataccacggcactgcgggagacagcatgtcatatcattctggtagcgtcttctctgccagggatcgcgatccaaacagcctccttatttcctgtgccgtcagttatcgaggtgcatggtggtaccgaaactgtcactatgccaacctcaacgggttatacgggtctacagtggaccaccaaggcgtgtcgtggtatcactggaagggcttcgaattttccgtgccgttcaccgagatgaaactgaggccccgaaatttccgttctcccgcagggggtgggtat

SEQ ID NO: 201547 - DNA, 654 bp, Artificial Sequence
  derived and/or modified sequence
gcaccgggaaaggacgaagagatggctcctgccagtaccgagccaccaacacccgaaccacctataaagcccaggctggaagagctgacagtgacagatgctacccccgacagtctgagcctgtcatggacagttcccgagggtcagttcgaccactttctggtccagtataagaacggggacggtcaacccaaggccacccgggtgccagggcacgaggaccgcgtgactatttctggcctggaacccgacaacaagtataagatgaacctgtacggctttcacggcggacagcgtgtcggccctgtctcagcgatcggcgtgacagccgctgaagaagaaacaccttcacctaccgagcccagcatggaggccccagaacccccagaggagcctctcctcggggagctgacagtcaccggctcaagcccagactcactctccttatcctggacggtcccacagggacggttcgattccttcactgttcagtacaaggaccgagacggcagacctcaagtagtgcgcgtcgggggagaagagtccgaggtcactgtcggcggattggagcccggtcgtaagtacaaaatgcacttgtacggcctccacgaagggcgtcgcgtcggacccgtatctacagtgggagttacatag

SEQ ID NO: 201548 - DNA, 942 bp, Artificial Sequence
  derived and/or modified sequence
accgaaccaggcacagaagcccctggcccaccggaagaacccctgctcggggaactcacagtgacagggtcctcacctgattcactgtcgctgagctggactgtacctcaaggaagattcgactctttcactgtgcagtacaaggaccgagacggaaggcctcaagctgttagagttggcggtcaggaatcaaaggtgactgtgagaggtctcgaacccggaagaaagtacaaaatgcatctatacgggttgcatgagggtcgaaggttagggcctgtctcagccgtcggcgttactgaggatgaggctgagacaacacaggctgtgcctacaatgacaccagaaccgccaatcaagcccagacttggagagctcaccatgactgacgcaacaccggacagcctgtctctaagttggacagtcccggaggggcagtttgatcacttccttgtccagtatcgcaatggcgatggacagccgaaggccgtaagggtgcctgggcacgaggatggagtgaccataagtggtctggagccagaccacaaatataaaatgaatctttatggttttcacgggggacaacgggttgggccaatatcagtaatcggtgtcaccgccgctgaggaggagaccccttcgcccacggagttatccaccgaggccccagaacctcccgaagaacccctgttgggcgaactgaccgtgacaggcagttcccccgactctctcagtctcagctggaccattcctcaggggcactttgacagttttacagtgcagtacaaggatcgggatggtcggcctcaggtcatgagggtgaggggagaggaatccgaagtgaccgtgggtgggttggaacctggtcgcaagtacaagatgcatctgtatggtctccatgaaggcaggagagtgggccctgtgtctaccgtaggggtcacttag

SEQ ID NO: 201549 - DNA, 942 bp, Artificial Sequence
  derived and/or modified sequence
atgaccccagaacccccaataaagcctcgtttgggcgaactgactatgacggacgctacaccggattcactctcactgtcttggactgtacctgaggggcagtttgaccactttttagttcaataccggaatggcgatggacagcctaaggcggtacgggtaccaggtcatgaggatggcgttactatctccgggctggagcctgaccacaagtacaagatgaatttgtacgggttccacggaggtcaaagagtgggtcccatatcggtgaccggggtcacagccgctgaagaggagacgccttccccgactgagctgtctacggaagctcctgaaccgccagaggaacctctgctgggtgagctgacagttaccgggagcagccctgacagcttgagcttgagttggacaattccccagggtcactttgactcctttaccgtgcaatataaggatcgagacggtagaccccaagttatgagagtaagaggtgaggaatccgaagtgacagtaggcggactcgagccaggtcgcaaatataaaatgcatttgtacggtttacatgagggtaggagagtgggacctgtttccaccgtgggcgtgaccgcccctgaggatgaagaggaggagaccccggctcctaccgagccttccaccgaagccccagaacccccagaggaacctttactgggcgagctcacggtgacaggcagctctcctgactctttaagtctttcatggaccataccccagggaaggtttgacagctttaccgtccagtacaaggatagagatggacgcccacaggtcgtacgggtaaggggcgaagaatccgaggttaccgtggggggattggaacctgggtgtaagtacaagatgcatctctatgggcttcacgagggccaacgagtgggacccgtctctgccgtgggtgtcacttag

SEQ ID NO: 201550 - DNA, 1281 bp, Artificial Sequence
  derived and/or modified sequence
gcaggtgaggactgcggggaggaggtccccacaattgagggcatgaggatgcatctgctggaggagactacagtccggactgagtggactcctgccccaggtcctgtagacgcgtatgagatccagttcatacccaccaccgagggggcttctccacccttcaccgccagagttccgagctcagcttcagcatacgaccagcggggtttagccccagggcaagagtaccaggttacagtgcgcgcattgcgcggaaccagctggggtctgcccgcttctaagactatcactactatgatcgacggaccgcaagacttgagagttgtggctgtcacccccactacattggaattaggatggctgcgcccacaggccgaagtggatagattcgtggtgtcatacgtgtccgctggaaatcagagggtccggttagaggtccctcccgaggccgatgggacgttgctaacagatctcatgcccggagtagagtacgtggtgactgtgactgccgagagaggacgggctgtgtcatacccagcttcagtacgcgctaatactggtagctctccactgggccttctggggacgacggacgagcccccaccttcgggcccatctactacccaaggggcacaggctccgcttcttcagcagaggccccaggagctcggagaactgcgcgtgctgggcagggacgagaccggcagactgagagtggtctggacagctcagcccgacacatttgcctactttcaactgcggatgcgcgtgcctgagggcccaggtgcccatgaggaggttctgcccggtgatgtcagacaagcattggtcccccctccaccaccaggaaccccatatgagctctcactccacggagtgcctcccggaggcaagcctagtgatccaatcatttaccagggaattatggacaaagatgaagagaaaccaggaaagtctagcggcccaccacgcctgggagaactgacagtgaccgaccgcacgtcagactccctgctccttcgctggacagtgccagagggggaattcgattcatttgtaatacagtacaaagaccgcgacgggcagccccaggtggtccctgtggaagggccacagcgatcagcagtcataacatctctggatccagggcgtaaatataagtttgttctgtacggtttcgtgggtaagaagaggcatggaccactggtcgctgaagccaaaattttgcctcagagtgacccatcccccggaacccctccacatctcggaaatctatggtag

SEQ ID NO: 201551 - DNA, 2598 bp, Artificial Sequence
  derived and/or modified sequence
ctgtatgggctgcggggtagacagagggtggggccagagtctgttgtggcgaagaccgctccccaagaagatgttgatgagactccttcccctaccgagctcgggactgaggcgcctgagtcccccgaggaacccctcctgggagagctcaccgtgactggatcttcccctgatagcctttccctgttttggacagtgccccagggatcattcgactcattcactgtgcaatataaagaccgcgacgggcgtcccagggcagttcgggtgggcggaaaggagagtgaggttacagtgggcggtttggaaccagggcataagtacaaaatgcacctatacggccttcacgaggggcagcgagtgggacctgtcagcgctgtcggtgtgaccgcaccccagcaagaggaaaccccgcctgccacagagagcccgctcgagccacgtttgggcgaattaacagtgacagatgtaacaccaaatagtgtgggcctttcttggacagtgccggaggggcagtttgacagttttatagtgcaatataaggataaagacggacagcctcaagtcgtacctgtggctgctgaccagcgtgaggttactgtctacaacctggagccagaacggaaatataagatgaacatgtatggcctacacgatggtcagcgtatgggtccactttcagttgttattgttacagcgccactgccccctgcccctgccacagaggctagcaagccccctctggagccaaggttgggggaactgaccgtgaccgatatcacgccagattccgtggggttgagttggacagtgcctgagggcgaatttgactccttcgtcgtccaatacaaggacagggatggtcaacctcaggtggtgcccgtcgcggcagaccaacgcgaagtgacaatccccgacctcgaaccgagtcgtaagtataaattccttctgttcggtatccaggatgggaagaggcgctcccccgtaagcgtggaagctaagactgtggccagaggagacgcctctcctggtgctcctcccaggttgggagagctgtgggtgacagatccaaccccggacagcttacggctgtcttggactgtgcccgaaggtcagttcgattccttcgtcgttcagttcaaagataaggatggtccacaagtggtgccagtggaaggacacgagcgaagcgtaaccgttaccccactggatgctggcaggaaataccgattcttactgtacggtctccttgggaagaaaagacacggacccctgaccgcggatggtacgacagaggctagatccgcgatggatgacaccggaacaaaaagaccaccgaagcctaggcttggtgaggaactgcaggtgaccacagtaacgcagaattccgtcgggctcagctggactgttcccgagggacaatttgatagcttcgtcgtccagtataaggatcgggacggtcaaccccaggtagtgcccgttgagggctctctccgggaagtctccgtccctggtctggatccggcacatcggtacaagctattgctctacgggctacaccatggcaagagggtcgggcctatcagcgcggtggctatcacagccggacgggaagagaccgaaaccgagaccacagcccctaccccacccgctcctgagccccatcttggggaactcactgtagaagaggccacctcacacacacttcacctgtcctggatggtgactgagggggagtttgattcatttgaaatccaatacacagatcgagatgggcaactacagatggttagaataggcggagacagaaacgatatcaccctgagcggactggaaagcgatcatcggtacctggttacattatatggtttctccgacggcaagcacgtggggcctgtgcatgtcgaggccctcacagtgcctgaggaagaaaagccctccgaaccgcctactgcaacccccgagcccccaatcaaacccagactgggcgaactgacagttaccgatgccacgcctgacagcctgtcactctcatggacagttcctgaaggtcagtttgaccatttcctcgtgcagtaccgaaatggtgacggccaacccaaggctgtcagggtgcccggtcatgaagagggcgtaactatcagtggcttggaacctgaccacaagtataaaatgaacctgtacgggttccacgggggtcagcgcatggggccagtatcagtggttggggtcacagcagctgaagaggaaactccatcccctacagaaccctccatggaagcacctgaacctgccgaagaacctctgctgggggaactcacagtgacaggaagctccccggatagcctgagcctatcctggaccgtgccacagggaagatttgacagtttcactgtacagtacaaggatagagatggaaggccacaagtggtcagagttgggggagaggagtctgaggtaacggttggagggctcgaacctgggagaaaatataaaatgcacttgtacggactgcacgaaggcaggcgcgtcggccctgtaagtgccgttggcgtgacagctccagaggaggaatcccccgatgcccctttggcatag

SEQ ID NO: 201552 - DNA, 13065 bp, Artificial Sequence
  derived and/or modified sequence
tcctccccttctcctcccctgctcgctgcagactccctcctcactgtcgctgccgagatccacagtcggttgtggctcagcccctgttgcaggggacaagtgagggagacttccctgtcctgccctgagacgccgccctcccggggttggggacagagcaggtgcagaggcactgcagctgctcggttgcccagcctcctgaatgatgccagcccagtatgctctaacctccagcctggttctcctggtgctgctgagcacagccagagcaggccccttctcttcacggtccaatgtgacactgccagccccccggccccctccccagccagggggccacacagtgggggctggagtgggaagcccctcttctcagctttacgagcacacagtggaaggaggggagaagcaggtggtattcacccaccgcattaacctgcccccttccactggctgtggctgtcccccaggcaccgagcccccagtccttgcttcagaggtacaggccctgagggtccgtctagagatcctggaggagttggtgaaggggctcaaggaacagtgcactgggggatgttgtcctgcctctgcccaagctggcacaggtcagacagatgtgcggaccctctgcagtctccatggtgtgtttgatctgagccgctgcacctgttcctgtgagccaggctggggtgggcccacctgctcagaccccacagatgctgagatccctccctcttccccaccctcagcctcggggtcctgcccagatgactgcaatgatcagggtcgctgtgtccgtggtcgttgcgtgtgctttcccggctacactggccccagctgtggctggccatcctgtcccggggactgccaaggccgtgggcgctgcgtgcagggcgtgtgtgtgtgccgggcaggcttctcaggccccgactgcagccagcgctcctgccctcgaggttgcagccagaggggacgctgtgagggtgggcgctgcgtgtgtgacccaggctacactggtgacgactgtggcatgaggagctgccctcgcggttgcagtcagagggggcgctgtgagaatgggcgctgcgtgtgtaaccccggctacgctggcgaggactgtggggtgaggagctgccctcggggctgcagccagcggggacgctgcaaggacgggcgctgcgtgtgtgaccccggctacactggcgaggactgtggtacgcggagctgcccctgggactgtggcgagggcgggcgctgcgtggacggccgctgcgtgtgctggcccgggtacacaggcgaggactgcagcacgcggacatgtccgagggactgccggggccgcgggcgctgcgaggacggcgaatgcatttgcgacacgggctacagcggggacgactgcggcgtgcgcagctgccctggcgactgcaaccaaaggggccgctgcgaggacggccgctgcgtgtgctggccggggtacactggaaccgattgcggctcgcgcgcctgcccacgcgactgtagaggtcgcgggcgctgcgagaacggcgtgtgtgtttgcaatgcgggctacagcggcgaggactgcggtgtgcgcagctgtcctggggactgtcgtggccggggccgctgtgagagtggccgctgcatgtgttggccggggtacacaggccgggactgcggcacgcgcgcctgtcctggcgactgtcgcgggcgcgggcgctgcgtggatggccgctgcgtgtgcaacccgggcttcaccggtgaggactgtgggagccgtcgctgtcccggggactgccgtgggcacggcctttgcgaggatggcgtgtgcgtgtgtgacgcaggctactcaggggaagactgcagcacgcgcagctgccccgggggctgccgaggccgcggccagtgcctagatgggcggtgtgtgtgcgaggacggctactctggcgaggattgcggtgtgaggcagtgcccgaatgactgcagccagcacggcgtgtgccaggacggtgtgtgcatctgttgggaaggctacgtgagtgaggactgcagcatccgcacctgcccctccaactgccacgggaggggccgctgtgaggaagggcgctgcctgtgcgacccaggctacaccggccctacctgtgccacccgcatgtgcccggctgactgccggggacgtgggcggtgtgtgcaaggagtgtgcctgtgccacgtgggctatggcggtgaggactgcgggcaggaagagcctccagccagcgcctgccctggaggctgcgggccccgggaactgtgccgggcaggccagtgtgtgtgtgtagagggcttccgaggccctgactgtgccatccagacatgcccaggggactgccgtggccgaggagagtgtcacgatggcagctgtgtctgcaaagatgggtatgctggcgaagactgcggagaagaggtgccaaccattgagggcatgaggatgcatctcttggaggagacaacagttcggacagagtggaccccggctcctggccccgtggatgcctatgaaattcagttcatccccacgacagagggggcgagccccccattcacagcacgggttccaagctctgcctcagcctatgaccagagaggactggcccctggacaggagtaccaggtcactgtccgagcccttcgagggaccagctggggccttcctgcctccaagaccatcaccaccatgatcgatgggccccaggacctccgagtggtggctgtgacaccgacaacactggagcttggctggctgcgtccccaggctgaggtggaccgatttgtggtgtcctacgtcagtgccggcaaccagagggtgaggctggaagtgccccctgaagcagacgggacgctgctgactgacctgatgccaggcgtagaatatgtggtgactgtcacagcggagcggggccgggcagtcagctacccagcttctgtcagggccaacacagggtcctcacccttgggcctcttggggactaccgatgagcctcctccctcaggcccctcgacgacgcaaggggcccaggctcctctcctgcagcagcgcccccaggagctgggagagttgagggtgctgggcagagatgagacagggcgcctccgtgtggtctggaccgcccagcctgacacctttgcctacttccaactgcgcatgcgggtgcccgaggggccgggggcacatgaggaagtgctgccaggggacgtccgccaggctctggtgcctccaccccctcctggaaccccgtatgagctgtcacttcatggggtccctcctgggggcaagccctctgaccccatcatctaccaaggcattatggacaaggatgaggagaagcctgggaagtcctcaggcccaccacgcctgggtgagctgacggtgacagacaggacctccgactccttgctcctgcgctggacggtccccgagggcgagtttgactccttcgtgatccagtacaaagacagggacgggcagccccaggtggtgcccgtggaaggaccccagcgctcggccgtcatcacctccctggatcctggccgcaagtacaaatttgtcctgtatgggtttgttggcaagaagaggcatggtccgctggtggctgaagccaagatcttgcctcagagtgacccaagtccagggactccaccccacctgggaaacctgtgggtgacagaccctaccccagattcactgcacctctcctggactgtccctgagggccagtttgacaccttcatggtccagtacagggacagggatggacggccccaggtggtacctgtggaagggcccgagcgttcatttgttgtctcctcactggaccctgaccacaagtacagattcactctgtttggaattgcgaacaagaagcggtatggccccctcacggccgatggcaccactgctccagagaggaaagaggagcccccccgccctgagttcctggagcagcccctcctgggggaactgacagtgaccggcgtgaccccagactccttgcgtctctcatggacagtggcccagggccccttcgactcattcatggtccagtacaaggatgcacaggggcagccccaggcagtgcctgttgcgggggatgagaatgaggttactgtccccggcctggatcccgaccggaagtataagatgaacctctacgggcttcgtggcaggcagcgtgtggggcccgagtctgtggtggccaagactgctcctcaggaggatgtggacgagacccccagccccacagaactgggcacggaggccccggagtcccccgaggagccgctcctgggggagctgacagtgacaggatcctcccctgattcgctgagcctcttctggaccgtcccccagggcagcttcgactctttcaccgtgcagtacaaggacagggatgggcggccccgggcggtgcgtgttgggggcaaggagagtgaggtcaccgtgggaggcctagagcccgggcacaagtacaagatgcacctgtacggcctccacgaggggcagcgcgtgggcccggtgtccgccgtgggcgtgacagccccacaacaagaagagacccctccagccactgagtccccgctggagccacgcctaggagagctgacagtgacagatgtgacccccaactctgtgggcctctcctggacagtccccgagggccagtttgactccttcatagtccagtacaaggacaaggacgggcagccccaggtggtgccggtggcggcagaccagcgagaggtcacagtctacaacctggagcctgagagaaaatataagatgaacatgtatggactacatgatgggcaacgcatgggccccctgtctgtggtcatcgtgacggctcccctcccaccagccccagccacagaggcctccaagcctcccctggagccacgcctaggggagctgacagtgacggatataacccctgactctgtgggcctctcatggacagtccctgagggtgaattcgactcctttgtggttcagtacaaggacagggacgggcagccccaggtggtgcccgtggctgcagatcagcgggaggtcactatccctgacctggaaccctcccgcaagtacaagttcctgctctttgggatccaggatgggaaacgacgcagcccagtctctgtggaggcaaagacggttgcccgaggtgacgccagcccaggggccccaccccgccttggggagctgtgggtgacagaccccaccccagactcactgcgcctctcctggacggttcctgagggccagttcgactcttttgtggtccagttcaaggacaaagacgggccccaggtggtgcccgtggagggccatgagcgctctgtcactgtcacccctctggatgccggccgcaagtacagattcctcctctatggcctcctgggcaagaagcgccatggccctctcactgccgacggcaccacggaagcccggagtgctatggatgatactggaacaaagcgtcccccaaaaccccgtctgggggaggagctgcaggtgaccaccgtgacccagaactccgtgggcctctcctggacagtccctgagggccagtttgactcctttgtggtccagtacaaagacagggacgggcagccccaggtggtgcccgtggagggcagcctcagggaggtcagcgtgccgggcctggaccctgcccacaggtacaagctgctgctctacgggctgcaccacggcaagcgtgtgggccccatctcggccgtcgccattactgccggcagggaagaaacggaaactgagaccacggccccgacccctccagcgcctgagccccacctcggggagttgacagtggaggaggccacgtcacacaccctgcatctctcctggatggtgactgagggagaatttgactccttcgaaatccagtacacagatagagacgggcaactccaaatggtccgcataggaggtgaccggaatgacatcaccctctctggcctggaatccgaccacagatacctggtgaccctgtatggtttcagtgatgggaagcatgtaggtcctgtccatgtcgaggccctgacagtcccggaggaggagaagccttcagaacctcccaccgcaacccccgagccccccatcaagcctcgcctgggggagctgaccgtgacagatgccacccctgactccctcagcctgtcctggacagttcccgagggacagtttgaccacttcctggtccagtacaggaatggagatgggcagcccaaggcagtgagggtgccagggcacgaggaaggggtcaccatctcgggcctggagccagaccataaatacaagatgaacctgtacggcttccacggtggccagcgcatgggccctgtgtctgtcgtcggggtgacagctgcagaggaagagacccccagccccacagaacccagcatggaggccccggagcccgctgaggagccactcctgggggagctaacagtgacaggatcctcccctgactcgctgagcctctcctggaccgtcccccagggccgcttcgactccttcaccgtgcagtacaaggacagggacgggcggccccaggtggtgcgtgttgggggcgaggagagtgaagtcaccgtggggggcctggagcctgggcgcaagtacaagatgcacctgtacggcctccacgaggggcggcgcgtgggcccagtgtctgctgtgggcgtcacggcccccgaagaggagtcccctgatgctcctcttgcaaagctgcgcctagggcagatgacagtgagagacatcacctccgactccctcagcctctcctggacagtccccgagggccagtttgaccatttcttggtccagtttaagaatggggacgggcagcccaaggcggtgcgggtgccgggacacgaggatggggtcaccatctcgggcctggagccagaccacaagtacaagatgaacctgtacggcttccacggtggccagcgcgtgggccccgtgtctgctgttggtttaactgccccaggaaaggatgaagaaatggccccagcctcgacagaacctcccacccctgaaccccccatcaagcctcgcctggaggagctgaccgtgacagatgcgacccctgactccctcagcctgtcctggacggttcccgagggacagtttgaccacttcctggtccagtacaagaatggggatgggcagcccaaggcaacacgggtgccaggacatgaggacagggtcaccatctccggcctggagccagacaacaagtacaagatgaacctgtacggcttccacggtggccagcgtgtgggccccgtgtctgccatcggggtgacagctgcagaggaagagacccccagccccacagaacccagcatggaggccccggagccccctgaggagccgctcctgggggagctaacagtgacaggatcctcccctgactcgctgagcctctcctggaccgtcccccagggccgcttcgactccttcaccgtgcagtacaaggacagggacgggcggccccaggtggtgcgtgttgggggcgaggagagcgaggtcaccgtggggggcctggagcctgggcgcaaatacaagatgcacctgtacggcctccacgaggggcggcgtgtgggcccggtgtccaccgtgggcgtgactgccccacaagaggatgtggacgagacccccagccctacagaaccaggcacagaggccccagagccccccgaggagcctctcctgggggagctgacagtgacaggatcctcccctgactcgctgagcctttcctggaccgtcccccagggccgctttgactccttcaccgtgcagtacaaggacagggacgggcggccccaggcggtgcgtgttgggggccaggagagcaaggtcactgtgaggggcctggagcctgggcgcaagtacaagatgcacctgtacggcctccacgaggggcggcgcctaggcccggtgtctgccgtgggcgtcacagaggatgaagccgagaccacccaagcagtgcctaccatgacccctgagccccccatcaagcctcgcctgggggagctgaccatgacagatgccacccctgactccctcagcctgtcctggacggttcccgagggccagtttgaccacttcctggtccagtacaggaatggggatgggcagcccaaggcggtgcgggtgccggggcacgaggacggggtcaccatctcaggcctggagccagaccataaatacaagatgaacctgtacggcttccacggtggccagcgcgtgggccccatctctgtcattggggtgacggctgcagaggaagagacccccagccccacggaactcagcactgaggccccggagccccctgaggagccgctcctgggggagctgacagtgacaggatcctcccctgactcgctgagcctctcctggaccatcccccagggccacttcgactccttcaccgtgcagtacaaggacagggacgggcggccccaggtgatgcgtgtcaggggcgaggagagcgaggtcaccgtggggggcctggagcccgggcgcaaatacaagatgcacctgtacggcctccacgaggggcggcgtgtgggcccggtgtccaccgtgggtgtgacagtgcccaccacaacccctgagccccccaacaagcctcgcctcggggagctgaccgtgacagatgccacccctgactccctcagcctgtcctggatggtccccgagggccagtttgaccacttcctggtccagtacaggaatggggatgggcagcccaaggtggtgcgggtgccggggcacgaggacggggtcaccatctcaggcctggagccagaccacaagtacaagatgaacctgtacggcttccacggtggccagcgcgtgggccccatctctgtcattggggtgacagctgcagaggaagaaactcccgcccccacagaacccagcacggaggccccggagccccctgaggagccgctcctgggggagctgacagtgacaggatcctcccctgactcgctgagcctctcctggaccatcccccagggccgcttcgactccttcactgtgcagtacaaggacagggacgggcggccccaggtggtgcgtgtcaggggcgaggagagcgaggtcaccgtggggggcctggagcccgggtgcaaatacaagatgcacctgtacggcctccacgaggggcagcgcgtgggcccagtgtccgctgtgggtgtgacagtgcctaccatgacccctgagccccccatcaagcctcgcctgggggagctgaccgtgacagatgccacccccgactccctcagcctgtcctggatggttcccgagggccagtttgaccacttcctggtccagtacaggaatggggatgggcagcccaaggcggtgcgggtgccggggcacgaggacggggtcaccatctcaggcctggagccagaccataaatacaagatgaacctgtacggcttccacggtggccagcgcgtaggccctgtgtctgccattggggtgacggaggaagagacccccagccccacagaacccagcactgaggccccggaggcccctgaggagccgctcctgggggagttgacagtgacaggatcctcccctgactcgctgagcctctcctggaccgtcccccagggccgcttcgactccttcaccgtgcagtacaaggacagggacgggcagccccaggtggtgcgtgtcaggggcgaggagagcgaggtcaccgtggggggcctggagcccgggcgcaaatacaagatgcatctgtacggcctccacgaggggcagcgcgtgggcccagtgtccaccgtgggcatcacggcgcccctgcccacaccactgccggtggagccccgcctgggggagctggcggtggcggccgtgacctcggactcagtgggcctctcatggacggtggcccagggcccctttgactccttcctggtacagtacagggacgcgcaggggcagccccaggcagtgcctgtgagcggagacctccgagcggtcgccgtctcggggctggacccggcccgcaagtacaagttcctgctctttggactccagaatgggaaacgccacggcccagtccctgtggaggccaggaccgccccagacaccaaaccgtctccccgcctgggggagctgactgtgacagatgcgacccctgactccgtgggcctctcgtggacggtccctgagggcgaattcgactccttcgtggtccagtacaaggataaggatggtcggctccaggtggtgccggtggcagccaaccagcgggaggtcacagtccagggcctggagcccagtaggaaatacaggttcctgctctatggtctgtcaggcaggaaacgactgggccccatctctgctgacagcaccacagctcccctggagaaggagctacctccccacctgggggaactgaccgtggctgaggagacctccagctctctgcgcctgtcctggacggtagcccagggcccctttgactccttcgtggtccagtacagggacacggacgggcagcccagggcagtgcctgtggccgcagaccagcgcacagtcaccgtagaggacctggagcctggcaagaaatacaagtttctgctctacgggctccttgggggaaagcgcctgggcccggtctctgccctgggaatgacagccccagaagaggacacaccagccccagagttagccccagaggcccctgagcctcctgaagagccccgcctaggagtgctgaccgtgaccgacacaaccccagactccatgcgcctctcgtggagcgtggcccagggcccctttgattccttcgtggtccagtatgaggacacgaacgggcagccccaggccttgctcgtggacggcgaccagagcaagatcctcatctcaggcctggagcccagcaccccctacaggttcctcctctatggcctccatgaagggaagcgcctggggcccctctcagctgagggcaccacagggctggctcctgctggtcagacctcagaggagtcaaggccccgcctgtcccagctgtctgtgactgacgtgaccaccagttcactgaggctcaactgggaggccccaccgggggccttcgactccttcctgctccgctttggggttccatcaccaagcactctggagccgcatccgcgtccactgctgcagcgcgagctgatggtgccggggacgcggcactcggccgtgctccgggacctgcgttccgggactctgtacagcctgacactgtatgggctgcgaggaccccacaaggccgacagcatccagggaaccgcccgcaccctcagcccagttctggagagcccccgtgacctccaattcagtgaaatcagggagacctcagccaaggtcaactggatgcccccaccatcccgggcggacagcttcaaagtctcctaccagctggcggacggaggggagcctcagagtgtgcaggtggatggccaggcccggacccagaaactccaggggctgatcccaggcgctcgctatgaggtgaccgtggtctcggtccgaggctttgaggagagtgagcctctcacaggcttcctcaccacggttcctgacggtcccacacagttgcgtgcactgaacttgaccgagggattcgccgtgctgcactggaagcccccccagaatcctgtggacacctatgacgtccaggtcacagcccctggggccccgcctctgcaggcggagaccccaggcagcgcggtggactaccccctgcatgaccttgtcctccacaccaactacaccgccacagtgcgtggcctgcggggccccaacctcacttccccagccagcatcaccttcaccacagggctagaggcccctcgggacttggaggccaaggaagtgaccccccgcaccgccctgctcacttggactgagcccccagtccggcccgcaggctacctgctcagcttccacacccctggtggacagaaccaggagatcctgctcccaggagggatcacatctcaccagctccttggcctctttccctccacctcctacaatgcacggctccaggccatgtggggccagagcctcctgccgcccgtgtccacctctttcaccacgggtgggctgcggatccccttccccagggactgcggggaggagatgcagaacggagccggtgcctccaggaccagcaccatcttcctcaacggcaaccgcgagcggcccctgaacgtgttttgcgacatggagactgatgggggcggctggctggtgttccagcgccgcatggatggacagacagacttctggagggactgggaggactatgcccatggttttgggaacatctctggagagttctggctgggcaatgaggccctgcacagcctgacacaggcaggtgactactccatgcgcgtggacctgcgggctggggacgaggctgtgttcgcccagtacgactccttccacgtagactcggctgcggagtactaccgcctccacttggagggctaccacggcaccgcaggggactccatgagctaccacagcggcagtgtcttctctgcccgtgatcgggaccccaacagcttgctcatctcctgcgctgtctcctaccgaggggcctggtggtacaggaactgccactacgccaacctcaacgggctctacgggagcacagtggaccatcagggagtgagctggtaccactggaagggcttcgagttctcggtgcccttcacggaaatgaagctgagaccaagaaactttcgctccccagcggggggaggctgagctgctgcccacctctctcgcaccccagtatgactgccgagcactgaggggtcgccccgagagaagagccagggtccttcaccacccagccgctggaggaagccttctctgccagcgatctcgcagcactgtgtttacaggggggaggggaggggttcgtacaggagcaataaaggagaaactgaggtacccgg

SEQ ID NO: 201553 - DNA, 6643 bp, Artificial Sequence
  derived and/or modified sequence
ctgcagaggaagagacccccagccccacagaacccagcatggaggccccggagcccgctgaggagccgctcctgggggagctaacagtgacaggatcctcccctgactcgctgagcctctcctggaccgtcccccagggccgcttcgactccttcaccgtgcagtacaaggacagggacgggcggccccaggtggtgcgtgttgggggcgaggagagtgaagtcaccgtggggggcctggagcctgggcgcaagtacaagatgcacctgtacggcctccacgaggggcggcgcgtgggcccagtgtctgctgtgggcgtcacggcccccgaagaggagtcccctgatgctcctcttgcaaagctgcgcctagggcagatgacagtgagagacatcacctccgactccctcagcctctcctggacagtccccgagggccagtttgaccatttcttggtccagtttaagaatggggatgggcagcccaaggcggtgcgggtgccgggacacgaggatggggtcaccatctcgggcctggagccagaccacaagtacaagatgaacctgtacggcttccacggtggccagcgcgtgggccccgtgtctgctgttggtttaactgccccaggaaaggatgaagaaatggccccagcctcgacagaacctcccacccctgaaccccccatcaagcctcgcctggaggagctgaccgtgacagatgcgacccctgactccctcagcctgtcctggacggttcccgagggacagtttgaccacttcctggtccagtacaagaatggggatgggcagcccaaggcaacacgggtgccaggacatgaggacagggtcaccatctccggcctggagccagacaacaagtacaagatgaacctgtacggcttccacggtggccagcgtgtgggccccgtgtctgccatcggggtgacagctgcagaggaagagacccccagccccacagaacccagcatggaggccccggagccccctgaggagccgctcctgggggagctgacagtgacaggatcctcccctgactcgctgagcctctcctggaccgtcccccagggccgcttcgactccttcaccgtgcagtacaaggacagggacgggcggccccaggtggtgcgtgttgggggcgaggagagcgaggtcaccgtggggggcctggagcctgggcgcaaatacaagatgcacctgtacggcctccacgaggggcggcgcgtgggcccggtgtccaccgtgggcgtgactgccccacaagaggatgtggacgagacccccagccctacagaaccaggcacagaggccccagagccccccgaggagcctctcctgggggagctgacagtgacaggatcctcccctgactcgctgagcctttcctggaccgtcccccagggccgctttgactccttcaccgtgcagtacaaggacagggacgggcggccccaggcggtgcgtgttgggggccaggagagcaaggtcactgtgaggggcctggagcctgggcgcaagtacaagatgcacctgtacggcctccacgaggggcggcgcctgggcccggtgtctgccgtgggcgtcacagaggatgaagccgagaccacccaagcagtgcctaccatgacccctgagccccccatcaagcctcgcctgggggagctgaccatgacagatgccacccctgactccctcagcctgtcctggacggttcccgagggccagtttgaccacttcctggtccagtacaggaatggggatgggcagcccaaggcggtgcgggtgccggggcacgaggacggggtcaccatctcaggcctggagccagaccataaatacaagatgaacctgtacggcttccacggtggccagcgcgtgggccccatctctgtcactggggtgacggctgcagaggaagagacccccagccccacggaactcagcactgaggccccggagccccctgaggagccgctcctgggggagctgacagtgacaggatcctcccctgactcgctgagcctctcctggaccatcccccagggccacttcgactccttcaccgtgcagtacaaggacagggacgggcggccccaggtgatgcgtgtcaggggcgaggagagcgaggtcaccgtggggggcctggagcccgggcgcaaatacaagatgcacctgtacggcctccacgaggggcggcgtgtgggcccggtgtccaccgtgggtgtgacagtgcccaccacaacccctgagccccccaacaagcctcgcctcggggagctgaccgtgacagatgccacccctgactccctcagcctgtcctggatggtccccgagggccagtttgaccacttcctggtccagtacaggaatggggatgggcagcccaaggtggtgcgggtgccggggcacgaggacggggtcaccatctcaggcctggagccagaccacaagtacaagatgaacctgtacggcttccacggtggccagcgcgtgggccccatctctgtcattggggtgacagctgcagaggaagaaactcccgcccccacagaacccagcacggaggccccggagccccctgaggagccgctcctgggggagctgacagtgacaggatcctcccctgactcgctgagcctctcctggaccatcccccagggccgcttcgactccttcactgtgcagtacaaggacagggacgggcggccccaggtggtgcgtgtcaggggcgaggagagcgaggtcaccgtggggggcctggagcccgggtgcaaatacaagatgcacctgtacggcctccacgaggggcagcgcgtgggcccagtgtccgctgtgggtgtgacagtgcctaccatgacccctgagccccccatcaagcctcgcctgggggagctgaccgtgacagatgccacccccgactccctcagcctgtcctggatggttcccgagggccagtttgaccacttcctggtccagtacaggaatggggatgggcagcccaaggcggtgcgggtgccggggcacgaggacggggtcaccatctcaggcctggagccagaccataaatacaagatgaacctgtacggcttccacggtggccagcgcgtaggccctgtgtctgccattggggtgacggaggaagagacccccagccccacagaacccagcactgaggccccggaggcccctgaggagccgctcctgggggagttgacagtgacaggatcctcccctgactcgctgagcctctcctggaccgtcccccagggccgcttcgactccttcaccgtgcagtacaaggacagggacgggcagccccaggtggtgcgtgtcaggggcgaggagagcgaggtcaccgtggggggcctggagcccgggcgcaaatacaagatgcatctgtacggcctccacgaggggcagcgcgtgggcccagtgtccaccgtgggcatcacggcgcccctgcccacaccactgccggtggagccccgcctgggggagctggcggtggcggccgtgacctcggactcagtgggcctctcatggacggtggcccagggcccctttgactccttcctggtacagtacagggacgcgcaggggcagccccaggcagtgcctgtgagcggagacctccgagcggtcgccgtctcggggctggacccggcccgcaagtacaagttcctgctctttggactccagaatgggaaacgccacggcccagtccctgtggaggccaggaccgccccagacaccaaaccgtctccccgcctgggggagctgactgtgacagatgcgacccctgactccgtgggcctctcgtggacggtccctgagggcgaattcgactccttcgtggtccagtacaaggataaggatggtcggctccaggtggtgccggtggcagccaaccagcgggaggtcacagtccagggcctggagcccagtaggaaatacaggttcctgctctatggtctgtcaggcaggaaacgactgggccccatctctgctgacagcaccacagctcccctggagaaggagctacctccccacctgggggaactgaccgtggctgaggagacctccagctctctgcgcctgtcctggacggtagcccagggcccctttgactccttcgtggtccagtacagggacacggacgggcagcccagggcagtgcctgtggccgcagaccagcgcacagtcaccgtagaggacctggagcctggcaagaaatacaagtttctgctctacgggctccttgggggaaagcgcctgggcccggtctctgccctgggaatgacagccccagaagaggacacaccagccccagagttagccccagaggcccctgagcctcctgaagagccccgcctaggagtgctgaccgtgaccgacacaaccccagactccatgcgcctctcgtggagcgtggcccagggcccctttgattccttcgtggtccagtatgaggacacgaacgggcagccccaggccttgctcgtggacggcgaccagagcaagatcctcatctcaggcctggagcccagcaccccctacaggttcctcctctatggcctccatgaagggaagcgcctggggcccctctcagctgagggcaccacagggctggctcctgctggtcagacctcagaggagtcaaggccccgcctgtcccagctgtctgtgactgacgtgaccaccagttcactgaggctcaactgggaggccccaccgggggccttcgactccttcctgctccgctttggggttccatcaccaagcacactggagccgcatccgcgtccactgctgcagcgcgagctgatggtgccggggacgcggcactcggccgtgctccgggacctgcgttccgggactctgtacagcctgacactgtatgggctgcgaggaccccacaaggccgacagcatccagggaaccgcccgcaccctcagcccagttctggagagcccccgtgacctccaattcagtgaaatcagggagacctcagccaaggtcaactggatgcccccaccatcccgggcggacagcttcaaagtctcctaccagctggcggacggaggggagcctcagagtgtgcaggtggatggccaggcccggacccagaaactccaggggctgatcccaggcgctcgctatgaggtgaccgtggtctcggtccgaggctttgaggagagtgagcctctcacaggcttcctcaccacggttcctgacggtcccacacagttgcgtgcactgaacttgaccgagggattcgccgtgctgcactggaagcccccccagaatcctgtagacacctatgacatccaggtcacagcccctggggccccgcctctgcaggcggagaccccaggcagcgcggtggactaccccctgcatgaccttgtcctccacaccaactacaccgccacagtgcgtggcctgcggggccccaacctcacttccccagccagcatcaccttcaccacagggctagaggcccctcgggacttggaggccaaggaagtgaccccccgcaccgccctgctcacttggactgagcccccagtccggcccgcaggctacctgctcagcttccacacccctggtggacagacccaggagatcctgctcccaggagggatcacatctcaccagctccttggcctctttccctccacctcctacaatgcacggctccaggccatgtggggccagagcctcctgccgcccgtgtccacctctttcaccacgggtgggctgcggatccccttccccagggactgcggggaggagatgcagaacggagccggtgcctccaggaccagcaccatcttcctcaacggcaaccgcgagcggcccctgatcgtgttttgcgacatggagactgatgggggcggctggctggtgttccagcgccgcatggatggacagacagacttctggagggactgggaggactatgcccatggttttgggaacatctctggagagttctggctgggcaatgaggccctgcacagcctgacacaggcaggtgactactccatgcgcgtggacctgcgggctggggacgaggctgtgttcgcccagtacgactccttccacgtagactcggctgcggagtactaccgcctccacttggagggctaccacggcaccgcaggggactccatgagctaccacagcggcagtgtcttctctgcccgtgatcgggaccccaacagcttgctcatctcctgcgctgtctcctaccgaggggcctggtggtacaggaactgccactacgccaacctcaacgggctctacgggagcacagtggaccatcagggagtgagctggtaccactggaagggcttcgagttctcggtgcccttcacggaaatgaagctgagaccaagaaactttcgctccccagcggggggaggctgagctgctgcccacctctctcgcaccccagtatgactgccgagcactgaggggtcgccccgagagaagagccagggtccttcaccacccagccgctggaggaagccttctctgccagcgatctcgcagcactgtgtttacaggggggaggggaggggttcgtacgggagcaataaaggagaaactgaggtacccgg

SEQ ID NO: 201554 - DNA, 10084 bp, Artificial Sequence
  derived and/or modified sequence
ggtcctcacccttgggcctcttggggactaccgatgagcctcctccctcaggcccctcgacgacgcaaggggcccaggctcctctcctgcagcagcgcccccaggagctgggagagttgagggtgctgggcagagatgagacagggcgcctccgtgtggtctggaccgcccagcctgacacctttgcctacttccaactgcgcatgcgggtgcccgaggggccgggggcacatgaggaagtgctgccaggggacgtccgccaggctctggtgcctccaccccctcctggaaccccgtatgagctgtcacttcatggggtccctcctgggggcaagccctctgaccccatcatctaccaaggcattatggacaaggatgaggagaagcctgggaagtcctcaggcccaccacgcctgggtgagctgacggtgacagacaggacctccgactccttgctcctgcgctggacggtccccgagggcgagtttgactccttcgtgatccagtacaaagacagggacgggcagccccaggtggtgcccgtggaaggaccccagcgctcggccgtcatcacctccctggatcctggccgcaagtacaaatttgtcctgtatgggtttgttggcaagaagaggcatggtccgctggtggctgaagccaagatcttgcctcagagtgacccaagtccagggactccaccccacctgggaaacctgtgggtgacagaccctaccccagattcactgcacctctcctggactgtccctgagggccagtttgacaccttcatggtccagtacagggacagggatggacggccccaggtggtacctgtggaagggcccgagcgttcatttgttgtctcctcactggaccctgaccacaagtacagattcactctgtttggaattgcgaacaagaagcggtatggccccctcacggccgatggcaccactgctccagagaggaaagaggagcccccccgccctgagttcctggagcagcccctcctgggggaactgacagtgaccggcgtgaccccagactccttgcgtctctcatggacagtggcccagggccccttcgactcattcatggtccagtacaaggatgcacaggggcagccccaggcagtgcctgttgcgggggatgagaatgaggttactgtccccggcctggatcccgaccggaagtataagatgaacctctacgggcttcgtggcaggcagcgtgtggggcccgagtctgtggtggccaagactgctcctcaggaggatgtggacgagacccccagccccacagaactgggcacggaggccccggagtcccccgaggagccgctcctgggggagctgacagtgacaggatcctcccctgattcgctgagcctcttctggaccgtcccccagggcagcttcgactctttcaccgtgcagtacaaggacagggatgggcggccccaggcggtgcgtgttgggggcaaggagagtgaggtcaccgtgggaggcctagagcccgggcacaagtacaagatgcacctgtacggcctccacgaggggcagcgcgtgggcccggtgtccgccgtgggcgtgacagccccacaacaagaagagacccctccagccactgagtccccgctggagccacgcctaggagagctgacagtgacagatgtgacccccaactctgtgggcctctcctggacagtccccgagggccagtttgactccttcatagtccagtacaaggacaaggacgggcagccccaggtggtgccggtggcggcagaccagcgagaggtcacagtctacaacctggagcctgagagaaaatataagatgaacatgtatggactacatgatgggcaacgcatgggccccctgtctgtggtcatcgtgacggctcccctcccaccagccccagccacagaggcctccaagcctcccctggagccacgcctaggggagctgacagtgacggatataacccctgactctgtgggcctctcatggacagtccctgagggtgaattcgactcctttgtggttcagtacaaggacagggacgggcagccccaggtggtgcccgtggctgcagatcagcgggaggtcactatccctgacctggaaccctcccgcaagtacaagttcctgctctttgggatccaggatgggaaacgacgcagcccagtctctgtggaggcaaagacggttgcccgaggtgacgccagcccaggggccccaccccgccttggggagctgtgggtgacagaccccaccccagactcactgcgcctctcctggacggttcctgagggccagttcgactcttttgtggtccagttcaaggacaaagacgggccccaggtggtgcccgtggagggccatgagcgctctgtcactgtcacccctctggatgccggccgcaagtacagattcctcctctatggcctcctgggcaagaagcgccatggccctctcactgccgacggcaccacggaagcccggagtgctatggatgatactggaacaaagcgtcccccaaaaccccgtctgggggaggagctgcaggtgaccaccgtgacccagaactccgtgggcctctcctggacagtccctgagggccagtttgactcctttgtggtccagtacaaagacagggacgggcagccccaggtggtgcccgtggagggcagcctcagggaggtcagcgtgccgggcctggaccctgcccacaggtacaagctgctgctctacgggctgcaccacggcaagcgtgtgggccccatctcggccgtcgccattactgccggcagggaagaaacggaaactgagaccacggccccgacccctccagcgcctgagccccacctcggggagttgacagtggaggaggccacgtcacacaccctgcatctctcctggatggtgactgagggagaatttgactccttcgaaatccagtacacagatagagacgggcaactccaaatggtccgcataggaggtgaccggaatgacatcaccctctctggcctggaatccgaccacagatacctggtgaccctgtatggtttcagtgatgggaagcatgtaggtcctgtccatgtcgaggccctgacagtcccggaggaggagaagccttcagaacctcccaccgcaacccccgagccccccatcaagcctcgcctgggggagctgaccgtgacagatgccacccctgactccctcagcctgtcctggacagttcccgagggacagtttgaccacttcctggtccagtacaggaatggagatgggcagcccaaggcagtgagggtgccagggcacgaggaaggggtcaccatctcgggcctggagccagaccataaatacaagatgaacctgtacggcttccacggtggccagcgcatgggccctgtgtctgtcgtcggggtgacagctgcagaggaagagacccccagccccacagaacccagcatggaggccccggagcccgctgaggagccgctcctgggggagctaacagtgacaggatcctcccctgactcgctgagcctctcctggaccgtcccccagggccgcttcgactccttcaccgtgcagtacaaggacagggacgggcggccccaggtggtgcgtgttgggggcgaggagagtgaagtcaccgtggggggcctggagcctgggcgcaagtacaagatgcacctgtacggcctccacgaggggcggcgcgtgggcccagtgtctgctgtgggcgtcacggcccccgaagaggagtcccctgatgctcctcttgcaaagctgcgcctagggcagatgacagtgagagacatcacctccgactccctcagcctctcctggacagtccccgagggccagtttgaccatttcttggtccagtttaagaatggggacgggcagcccaaggcggtgcgggtgccgggacacgaggatggggtcaccatctcgggcctggagccagaccacaagtacaagatgaacctgtacggcttccacggtggccagcgcgtgggccccgtgtctgctgttggtttaactgccccaggaaaggatgaagaaatggccccagcctcgacagaacctcccacccctgaaccccccatcaagcctcgcctggaggagctgaccgtgacagatgcgacccctgactccctcagcctgtcctggacggttcccgagggacagtttgaccacttcctggtccagtacaagaatggggatgggcagcccaaggcaacacgggtgccaggacatgaggacagggtcaccatctccggcctggagccagacaacaagtacaagatgaacctgtacggcttccacggtggccagcgtgtgggccccgtgtctgccatcggggtgacagctgcagaggaagagacccccagccccacagaacccagcatggaggccccggagccccctgaggagccgctcctgggggagctaacagtgacaggatcctcccctgactcgctgagcctctcctggaccgtcccccagggccgcttcgactccttcaccgtgcagtacaaggacagggacgggcggccccaggtggtgcgtgttgggggcgaggagagcgaggtcaccgtggggggcctggagcctgggcgcaaatacaagatgcacctgtatggcctccacgaggggcggcgcgtgggcccggtgtccaccgtgggcgtgactgccccacaagaggatgtggacgagacccccagccctacagaaccaggcacagaggccccagggccccccgaggagcctctcctgggggagctgacagtgacaggatcctcccctgactcgctgagcctttcctggaccgtcccccagggccgctttgactccttcaccgtgcagtacaaggacagggacgggcggccccaggcggtgcgtgttgggggccaggagagcaaggtcactgtgaggggcctggagcctgggcgcaagtacaagatgcacctgtacggcctccacgaggggcggcgcctgggcccggtgtctgccgtgggcgtcacagaggatgaagccgagaccacccaagcagtgcctaccatgacccctgagccccccatcaagcctcgcctgggggagctgaccatgacagatgccacccctgactccctcagcctgtcctggacggttcccgagggccagtttgaccacttcctggtccagtacaggaatggggatgggcagcccaaggcggtgcgggtgccggggcacgaggacggggtcaccatctcaggcctggagccagaccataaatacaagatgaacctgtacggcttccacggtggccagcgcgtgggccccatctctgtcattggggtgacggctgcagaggaagagacccccagccccacggaactcagcactgaggccccggagccccctgaggagccgctcctgggggagctgacagtgacaggatcctcccctgactcgctgagcctctcctggaccatcccccagggccacttcgactccttcaccgtgcagtacaaggacagggacgggcggccccaggtgatgcgtgtcaggggcgaggagagcgaggtcaccgtggggggcctggagcccgggcgcaaatacaagatgcacctgtacggcctccacgaggggcggcgtgtgggcccggtgtccaccgtgggtgtgacagtgcccaccacaacccctgagccccccaacaagcctcgcctcggggagctgaccgtgacagatgccacccctgactccctcagcctgtcctggatggtccccgagggccagtttgaccacttcctggtccagtacaggaatggggatgggcagcccaaggtggtgcgggtgccggggcacgaggacggggtcaccatctcaggcctggagccagaccacaagtacaagatgaacctgtacggcttccacggtggccagcgcgtgggccccatctctgtcattggggtgacagctgcagaggaagaaactcccgcccccacagaacccagcacggaggccccggagccccctgaggagccgctcctgggggagctgacagtgacaggatcctcccctgactcgctgagcctctcctggaccatcccccagggccgcttcgactccttcactgtgcagtacaaggacagggacgggcggccccaggtggtgcgtgtcaggggcgaggagagcgaggtcaccgtggggggcctggagcccgggtgcaaatacaagatgcacctgtacggcctccacgaggggcagcgcgtgggcccagtgtccgctgtgggtgtgacagtgcctaccatgacccctgagccccccatcaagcctcgcctgggggagctgaccgtgacagatgccacccccgactccctcagcctgtcctggatggttcccgagggccagtttgaccacttcctggtccagtacaggaatggggatgggcagcccaaggcggtgcgggtgccggggcacgaggacggggtcaccatctcaggcctggagccagaccataaatacaagatgaacctgtacggcttccacggtggccagcgcgtaggccctgtgtctgccattggggtgacggaggaagagacccccagccccacagaacccagcactgaggccccggaggcccctgaggagccgctcctgggggagttgacagtgacaggatcctcccctgactcgctgagcctctcctggaccgtcccccagggccgcttcgactccttcaccgtgcagtacaaggacagggacgggcagccccaggtggtgcgtgtcagggtcgaggagagcgaggtcaccgtggggggcctggagcccgggcgcaaatacaagatgcatctgtacggcctccacgaggggcagcgcgtgggcccagtgtccaccgtgggcatcacggcgcccctgcccacaccactgccggtggagccccgcctgggggagctggcggtggcggccgtgacctcggactcagtgggcctctcatggacggtggcccagggcccctttgactccttcctggtacagtacagggacgcgcaggggcagccccaggcagtgcctgtgagcggagacctccgagcggtcgccgtctcggggctggacccggcccgcaagtacaagttcctgctctttggactccagaatgggaaacgccacggcccagtccctgtggaggccaggaccgccccagacaccaaaccgtctccccgcctgggggagctgactgtgacagatgcgacccctgactccgtgggcctctcgtggacggtccctgagggcgaattcgactccttcgtggtccagtacaaggataaggatggtcggctccaggtggtgccggtggcagccaaccagcgggaggtcacagtccagggcctggagcccagtaggaaatacaggttcctgctctatggtctgtcaggcaggaaacgactgggccccatctctgctgacagcaccacagctcccctggagaaggagctacctccccacctgggggaactgaccgtggctgaggagacctccagctctctgcgcctgtcctggacggtagcccagggcccctttgactccttcgtggtccagtacagggacacggacgggcagcccagggcagtgcctgtggccgcagaccagcgcacagtcaccgtagaggacctggagcctggcaagaaatacaagtttctgctctacgggctccttgggggaaagcgcctgggcccggtctctgccctgggaatgacagccccagaagaggacacaccagccccagagttagccccagaggcccctgagcctcctgaagagccccgcctaggagtgctgaccgtgaccgacacaaccccagactccatgcgcctctcgtggagcgtggcccagggcccctttgattccttcgtggtccagtatgaggacacgaacgggcagccccaggccttgctcgtggacggcgaccagagcaagatcctcatctcaggcctggagcccagcaccccctacaggttcctcctctatggcctccatgaagggaagcgcctggggcccctctcagctgagggcaccacagggctggctcctgctggtcagacctcagaggagtcaaggccccgcctgtcccagctgtctgtgactgacgtgaccaccagttcactgaggctcaactgggaggccccaccgggggccttcgactccttcctgctccgctttggggttccatcaccaagcactctggagccgcatccgcgtccactgctgcagcgcgagctgatggtgccggggacgcggcactcggccgtgctccgggacctgcgttccgggactctgtacagcctgacactgtatgggctgcgaggaccccacaaggccgacagcatccagggaaccgcccgcaccctcagcccagttctggagagcccccgtgacctccaattcagtgaaatcagggagacctcagccaaggtcaactggatgcccccaccatcccgggcggacagcttcaaagtctcctaccagctggcggacggaggggagcctcagagtgtgcaggtggatggccaggcccggacccagaaactccaggggctgatcccaggcgctcgctatgaggtgaccgtggtctcggtccgaggctttgaggagagtgagcctctcacaggcttcctcaccacggttcctgacggtcccacacagttgcgtgcactgaacttgaccgagggattcgccgtgctgcactggaagcccccccagaatcctgtggacacctatgacgtccaggtcacagcccctggggccccgcctctgcaggcggagaccccaggcagcgcggtggactaccccctgcatgaccttgtcctccacaccaactacaccgccacagtgcgtggcctgcggggccccaacctcacttccccagccagcatcaccttcaccacagggctagaggcccctcgggacttggaggccaaggaagtgaccccccgcaccgccctgctcacttggactgagcccccagtccggcccgcaggctacctgctcagcttccacacccctggtggacagaaccaggagatcctgctcccaggagggatcacatctcaccagctccttggcctctttccctccacctcctacaatgcacggctccaggccatgtggggccagagcctcctgccgcccgtgtccacctctttcaccacgggtgggctgcggatccccttccccagggactgcggggaggagatgcagaacggagccggtgcctccaggaccagcaccatcttcctcaacggcaaccgcgagcggcccctgaacgtgttttgcgacatggagactgatgggggcggctggctggtgttccagcgccgcatggatggacagacagacttctggagggactgggaggactatgcccatggttttgggaacatctctggagagttctggctgggcaatgaggccctgcacagcctgacacaggcaggtgactactccatgcgcgtggacctgcgggctggggacgaggctgtgttcgcccagtacgactccttccacgtagactcggctgcggagtactaccgcctccacttggagggctaccacggcaccgcaggggactccatgagctaccacagcggcagtgtcttctctgcccgtgatcgggaccccaacagcttgctcatctcctgcgctgtctcctaccgaggggcctggtggtacaggaactgccactacgccaacctcaacgggctctacgggagcacagtggaccatcagggagtgagctggtaccactggaagggcttcgagttctcggtgcccttcacggaaatgaagctgagaccaagaaactttcgctccccagcggggggaggctgagctgctgcccacctctctcgcaccccagtatgactgccgagcactgaggggtcgccccgagagaagagccagggtccttcaccacccagccgctggaggaagccttctctgccagcgatctcgcagcactgtgtttacaggggggaggggaggggttcgtacaggagcaataaaggagaaactgaggtacccgg

SEQ ID NO: 201555 - DNA, 13065 bp, Artificial Sequence
  derived and/or modified sequence
tcctccccttctcctcccctgctcgctgcagactccctcctcactgtcgctgccgagatccacagtcggttgtggctcagcccctgttgcaggggacaagtgagggagacttccctgtcctgccctgagacgccgccctcccggggttggggacagagcaggtgcagaggcactgcagctgctcggttgcccagcctcctgaatgatgccagcccagtatgctctaacctccagcctggttctcctggtgctgctgagcacagccagagcaggccccttctcttcacggtccaatgtgacactgccagccccccggccccctccccagccagggggccacacagtgggggctggagtgggaagcccctcttctcagctttacgagcacacagtggaaggaggggagaagcaggtggtattcacccaccgcattaacctgcccccttccactggctgtggctgtcccccaggcaccgagcccccagtccttgcttcagaggtacaggccctgagggtccgtctagagatcctggaggagttggtgaaggggctcaaggaacagtgcactgggggatgttgtcctgcctctgcccaagctggcacaggtcagacagatgtgcggaccctctgcagtctccatggtgtgtttgatctgagccgctgcacctgttcctgtgagccaggctggggtgggcccacctgctcagaccccacagatgctgagatccctccctcttccccaccctcagcctcggggtcctgcccagatgactgcaatgatcagggtcgctgtgtccgtggtcgttgcgtgtgctttcccggctacactggccccagctgtggctggccatcctgtcccggggactgccaaggccgtgggcgctgcgtgcagggcgtgtgtgtgtgccgggcaggcttctcaggccccgactgcagccagcgctcctgccctcgaggttgcagccagaggggacgctgtgagggtgggcgctgcgtgtgtgacccaggctacactggtgacgactgtggcatgaggagctgccctcgcggttgcagtcagagggggcgctgtgagaatgggcgctgcgtgtgtaaccccggctacactggcgaggactgtggggtgaggagctgccctcggggctgcagccagcggggacgctgcaaggacgggcgctgcgtgtgtgaccccggctacactggcgaggactgtggtacgcggagctgcccctgggactgtggcgagggcgggcgctgcgtggacggccgctgcgtgtgctggcccgggtacacaggcgaggactgcagcacgcggacatgtccgagggactgccggggccgcgggcgctgcgaggacggcgaatgcatttgcgacacgggctacagcggggacgactgcggcgtgcgcagctgccctggcgactgcaaccaaaggggccgctgcgaggacggccgctgcgtgtgctggccggggtacactggaaccgattgcggctcgcgcgcctgcccacgcgactgtagaggtcgcgggcgctgcgagaacggcgtgtgtgtttgcaatgcgggctacagcggcgaggactgcggtgtgcgcagctgtcctggggactgtcgtggccggggccgctgtgagagtggccgctgcatgtgttggccggggtacacaggccgggactgcggcacgcgcgcctgtcctggcgactgtcgcgggcgcgggcgctgcgtggatggccgctgcgtgtgcaacccgggcttcaccggtgaggactgtgggagccgtcgctgtcccggggactgccgtgggcacggcctttgcgaggatggcgtgtgcgtgtgtgacgcaggctactcaggggaagactgcagcacgcgcagctgccccgggggctgccgaggccgcggccagtgcctagatgggcggtgtgtgtgcgaggacggctactctggcgaggattgcggtgtgaggcagtgcccgaatgactgcagccagcacggcgtgtgccaggacggtgtgtgcatctgttgggaaggctacgtgagtgaggactgcagcatccgcacctgcccctccaactgccacgggaggggccgctgtgaggaagggcgctgcctgtgcgacccaggctacaccggccctacctgtgccacccgcatgtgcccggctgactgccggggacgtgggcggtgtgtgcaaggagtgtgcctgtgccacgtgggctatggcggtgaggactgcgggcaggaagagcctccagccagcgcctgccctggaggctgcgggccccgggaactgtgccgggcaggccagtgtgtgtgtgtagagggcttccgaggccctgactgtgccatccagacatgcccaggggactgccgtggccgaggagagtgtcacgatggcagctgtgtctgcaaagatgggtatgctggcgaagactgcggagaagaggtgccaaccattgagggcatgaggatgcatctcttggaggagacaacagttcggacagagtggaccccggctcctggccccgtggatgcctatgaaattcagttcatccccacgacagagggggcgagccccccattcacagcacgggttccaagctctgcctcagcctatgaccagagaggactggcccctggacaggagtaccaggtcactgtccgagcccttcgagggaccagctggggccttcctgcctccaagaccatcaccaccatgatcgatgggccccaggacctccgagtggtggctgtgacaccgacaacactggagcttggctggctgcgtccccaggctgaggtggaccgatttgtggtgtcctacgtcagtgccggcaaccagagggtgaggctggaagtgccccctgaagcagacgggacgctgctgactgacctgatgccaggcgtagaatatgtggtgactgtcacagcggagcggggccgggcagtcagctacccagcttctgtcagggccaacacagggtcctcacccttgggcctcttggggactaccgatgagcctcctccctcaggcccctcgacgacgcaaggggcccaggctcctctcctgcagcagcgcccccaggagctgggagagttgagggtgctgggcagagatgagacagggcgcctccgtgtggtctggaccgcccagcctgacacctttgcctacttccaactgcgcatgcgggtgcccgaggggccgggggcacatgaggaagtgctgccaggggacgtccgccaggctctggtgcctccaccccctcctggaaccccgtatgagctgtcacttcatggggtccctcctgggggcaagccctctgaccccatcatctaccaaggcattatggacaaggatgaggagaagcctgggaagtcctcaggcccaccacgcctgggtgagctgacggtgacagacaggacctccgactccttgctcctgcgctggacggtccccgagggcgagtttgactccttcgtgatccagtacaaagacagggacgggcagccccaggtggtgcccgtggaaggaccccagcgctcggccgtcatcacctccctggatcctggccgcaagtacaaatttgtcctgtatgggtttgttggcaagaagaggcatggtccgctggtggctgaagccaagatcttgcctcagagtgacccaagtccagggactccaccccgcctgggaaacctgtgggtgacagaccctaccccagattcactgcacctctcctggactgtccctgagggccagtttgacaccttcatggtccagtacagggacagggatggacggccccaggtggtacctgtggaagggcccgagcgttcatttgttgtctcctcactggaccctgaccacaagtacagattcactctgtttggaattgcgaacaagaagcggtatggccccctcacggccgatggcaccactgctccagagaggaaagaggagcccccccgccctgagttcctggagcagcccctcctgggggaactgacagtgaccggcgtgaccccagactccttgcgtctctcatggacagtggcccagggccccttcgactcattcatggtccagtacaaggatgcacaggggcagccccaggcagtgcctgttgcgggggatgagaatgaggttactgtccccggcctggatcccgaccggaagtataagatgaacctctacgggcttcgtggcaggcagcgtgtggggcccgagtctgtggtggccaagactgctcctcaggaggatgtggacgagacccccagccccacagaactgggcacggaggccccggagtcccccgaggagccgctcctgggggagctgacagtgacaggatcctcccctgattcgctgagcctcttctggaccgtcccccagggcagcttcgactctttcaccgtgcagtacaaggacagggatgggcggccccgggcggtgcgtgttgggggcaaggagagtgaggtcaccgtgggaggcctagagcccgggcacaagtacaagatgcacctgtacggcctccacgaggggcagcgcgtgggcccggtgtccgccgtgggcgtgacagccccacaacaagaagagacccctccagccactgagtccccgctggagccacgcctaggagagctgacagtgacagatgtgacccccaactctgtgggcctctcctggacagtccccgagggccagtttgactccttcatagtccagtacaaggacaaggacgggcagccccaggtggtgccggtggcggcagaccagcgagaggtcacagtctacaacctggagcctgagagaaaatataagatgaacatgtatggactacatgatgggcaacgcatgggccccctgtctgtggtcatcgtgacggctcccctcccaccagccccagccacagaggcctccaagcctcccctggagccacgcctaggggagctgacagtgacggatataacccctgactctgtgggcctctcatggacagtccctgagggtgaattcgactcctttgtggttcagtacaaggacagggacgggcagccccaggtggtgcccgtggctgcagatcagcgggaggtcactatccctgacctggaaccctcccgcaagtacaagttcctgctctttgggatccaggatgggaaacgacgcagcccagtctctgtggaggcaaagacggttgcccgaggtgacgccagcccaggggccccaccccgccttggggagctgtgggtgacagaccccaccccagactcactgcgcctctcctggacggttcctgagggccagttcgactcttttgtggtccagttcaaggacaaagacgggccccaggtggtgcccgtggagggccatgagcgctctgtcactgtcacccctctggatgccggccgcaagtacagattcctcctctatggcctcctgggcaagaagcgccatggccctctcactgccgacggcaccacggaagcccggagtgctatggatgatactggaacaaagcgtcccccaaaaccccgtctgggggaggagctgcaggtgaccaccgtgacccagaactccgtgggcctctcctggacagtccctgagggccagtttgactcctttgtggtccagtacaaagacagggacgggcagccccaggtggtgcccgtggagggcagcctcagggaggtcagcgtgccgggcctggaccctgcccacaggtacaagctgctgctctacgggctgcaccacggcaagcgtgtgggccccatctcggccgtcgccattactgccggcagggaagaaacggaaactgagaccacggccccgacccctccagcgcctgagccccacctcggggagttgacagtggaggaggccacgtcacacaccctgcatctctcctggatggtgactgagggagaatttgactccttcgaaatccagtacacagatagagacgggcaactccaaatggtccgcataggaggtgaccggaatgacatcaccctctctggcctggaatccgaccacagatacctggtgaccctgtatggtttcagtgatgggaagcatgtaggtcctgtccatgtcgaggccctgacagtcccggaggaggagaagccttcagaacctcccaccgcaacccccgagccccccatcaagcctcgcctgggggagctgaccgtgacagatgccacccctgactccctcagcctgtcctggacagttcccgagggacagtttgaccacttcctggtccagtacaggaatggagatgggcagcccaaggcagtgagggtgccagggcacgaggaaggggtcaccatctcgggcctggagccagaccataaatacaagatgaacctgtacggcttccacggtggccagcgcatgggccctgtgtctgtcgtcggggtgacagctgcagaggaagagacccccagccccacagaacccagcatggaggccccggagcccgctgaggagccgctcctgggggagctaacagtgacaggatcctcccctgactcgctgagcctctcctggaccgtcccccagggccgcttcgactccttcaccgtgcagtacaaggacagggacgggcggccccaggtggtgcgtgttgggggcgaggagagtgaagtcaccgtggggggcctggagcctgggcgcaagtacaagatgcacctgtacggcctccacgaggggcggcgcgtgggcccagtgtctgctgtgggcgtcacggcccccgaagaggagtcccctgatgctcctcttgcaaagctgcgcctagggcagatgacagtgagagacatcacctccgactccctcagcctctcctggacagtccccgagggccagtttgaccatttcttggtccagtttaagaatggggatgggcagcccaaggcggtgcgggtgccgggacacgaggatggggtcaccatctcgggcctggagccagaccacaagtacaagatgaacctgtacggcttccacggtggccagcgcgtgggccccgtgtctgctgttggtttaactgccccaggaaaggatgaagaaatggccccagcctcgacagaacctcccacccctgaaccccccatcaagcctcgcctggaggagctgaccgtgacagatgcgacccctgactccctcagcctgtcctggacggttcccgagggacagtttgaccacttcctggtccagtacaagaatggggatgggcagcccaaggcaacacgggtgccaggacatgaggacagggtcaccatctccggcctggagccagacaacaagtacaagatgaacctgtacggcttccacggtggccagcgtgtgggccccgtgtctgccatcggggtgacagctgcagaggaagagacccccagccccacagaacccagcatggaggccccggagccccctgaggagccgctcctgggggagctgacagtgacaggatcctcccctgactcgctgagcctctcctggaccgtcccccagggccgcttcgactccttcaccgtgcagtacaaggacagggacgggcggccccaggtggtgcgtgttgggggcgaggagagcgaggtcaccgtggggggcctggagcctgggcgcaaatacaagatgcacctgtacggcctccacgaggggcggcgcgtgggcccggtgtccaccgtgggcgtgactgccccacaagaggatgtggacgagacccccagccctacagaaccaggcacagaggccccagagccccccgaggagcctctcctgggggagctgacagtgacaggatcctcccctgactcgctgagcctttcctggaccgtcccccagggccgctttgactccttcaccgtgcagtacaaggacagggacgggcggccccaggcggtgcgtgttgggggccaggagagcaaggtcactgtgaggggcctggagcctgggcgcaagtacaagatgcacctgtacggcctccacgaggggcggcgcctgggcccggtgtctgccgtgggcgtcacagaggatgaagccgagaccacccaagcagtgcctaccatgacccctgagccccccatcaagcctcgcctgggggagctgaccatgacagatgccacccctgactccctcagcctgtcctggacggttcccgagggccagtttgaccacttcctggtccagtacaggaatggggatgggcagcccaaggcggtgcgggtgccggggcacgaggacggggtcaccatctcaggcctggagccagaccataaatacaagatgaacctgtacggcttccacggtggccagcgcgtgggccccatctctgtcattggggtgacggctgcagaggaagagacccccagccccacggaactcagcactgaggccccggagccccctgaggagccgctcctgggggagctgacagtgacaggatcctcccctgactcgctgagcctctcctggaccatcccccagggccacttcgactccttcaccgtgcagtacaaggacagggacgggcggccccaggtgatgcgtgtcaggggcgaggagagcgaggtcaccgtggggggcctggagcccgggcgcaaatacaagatgcacctgtacggcctccacgaggggcggcgtgtgggcccggtgtccaccgtgggtgtgacagtgcccaccacaacccctgagccccccaacaagcctcgcctcggggagctgaccgtgacagatgccacccctgactccctcagcctgtcctggatggtccccgagggccagtttgaccacttcctggtccagtacaggaatggggatgggcagcccaaggtggtgcgggtgccggggcacgaggacggggtcaccatctcaggcctggagccagaccacaagtacaagatgaacctgtacggcttccacggtggccagcgcgtgggccccatctctgtcattggggtgacagctgcagaggaagaaactcccgcccccacagaacccagcacggaggccccggagccccctgaggagccgctcctgggggagctgacagtgacaggatcctcccctgactcgctgagcctctcctggaccatcccccagggccgcttcgactccttcactgtgcagtacaaggacagggacgggcggccccaggtggtgcgtgtcaggggcgaggagagcgaggtcaccgtggggggcctggagcccgggtgcaaatacaagatgcacctgtacggcctccacgaggggcagcgcgtgggcccagtgtccgctgtgggtgtgacagtgcctaccatgacccctgagccccccatcaagcctcgcctgggggagctgaccgtgacagatgccacccccgactccctcagcctgtcctggatggttcccgagggccagtttgaccacttcctggtccagtacaggaatggggatgggcagcccaaggcggtgcgggtgccggggcacgaggacggggtcaccatctcaggcctggagccagaccataaatacaagatgaacctgtacggcttccacggtggccagcgcgtaggccctgtgtctgccattggggtgacggaggaagagacccccagccccacagaacccagcactgaggccccggaggcccctgaggagccgctcctgggggagttgacagtgacaggatcctcccctgactcgctgagcctctcctggaccgtcccccagggccgcttcgactccttcaccgtgcagtacaaggacagggacgggcagccccaggtggtgcgtgtcaggggcgaggagagcgaggtcaccgtggggggcctggagcccgggcgcaaatacaagatgcatctgtacggcctccacgaggggcagcgcgtgggcccagtgtccaccgtgggcatcacggcgcccctgcccacaccactgccggtggagccccgcctgggggagctggcggtggcggccgtgacctcggactcagtgggcctctcatggacggtggcccagggcccctttgactccttcctggtacagtacagggacgcgcaggggcagccccaggcagtgcctgtgagcggagacctccgagcggtcgccgtctcggggctggacccggcccgcaagtacaagttcctgctctttggactccagaatgggaaacgccacggcccagtccctgtggaggccaggaccgccccagacaccaaaccgtctccccgcctgggggagctgactgtgacagatgcgacccctgactccgtgggcctctcgtggacggtccctgagggcgaattcgactccttcgtggtccagtacaaggataaggatggtcggctccaggtggtgccggtggcagccaaccagcgggaggtcacagtccagggcctggagcccagtaggaaatacaggttcctgctctatggtctgtcaggcaggaaacgactgggccccatctctgctgacagcaccacagctcccctggagaaggagctacctccccacctgggggaactgaccgtggctgaggagacctccagctctctgcgcctgtcctggacggtagcccagggcccctttgactccttcgtggtccagtacagggacacggacgggcagcccagggcagtgcctgtggccgcagaccagcgcacagtcaccgtagaggacctggagcctggcaagaaatacaagtttctgctctacgggctccttgggggaaagcgcctgggcccggtctctgccctgggaatgacagccccagaagaggacacaccagccccagagttagccccagaggcccctgagcctcctgaagagccccgcctaggagtgctgaccgtgaccgacacaaccccagactccatgcgcctctcgtggagcgtggcccagggcccctttgattccttcgtggtccagtatgaggacacgaacgggcagccccaggccttgctcgtggacggcgaccagagcaagatcctcatctcaggcctggagcccagcaccccctacaggttcctcctctatggcctccatgaagggaagcgcctggggcccctctcagctgagggcaccacagggctggctcctgctggtcagacctcagaggagtcaaggccccgcctgtcccagctgtctgtgactgacgtgaccaccagttcactgaggctcaactgggaggccccaccgggggccttcgactccttcctgctccgctttggggttccatcaccaagcacactggagccgcatccgcgtccactgctgcagcgcgagctgatggtgccggggacgcggcactcggccgtgctccgggacctgcgttccgggactctgtacagcctgacactgtatgggctgcgaggaccccacaaggccgacagcatccagggaaccgcccgcaccctcagcccagttctggagagcccccgtgacctccaattcagtgaaatcagggagacctcagccaaggtcaactggatgcccccaccatcccgggcggacagcttcaaagtctcctaccagctggcggacggaggggagcctcagagtgtgcaggtggatggccaggcccggacccagaaactccaggggctgatcccaggcgctcgctatgaggtgaccgtggtctcggtccgaggctttgaggagagtgagcctctcacaggcttcctcaccacggttcctgacggtcccacacagttgcgtgcactgaacttgaccgagggattcgccgtgctgcactggaagcccccccagaatcctgtagacacctatgacatccaggtcacagcccctggggccccgcctctgcaggcggagaccccaggcagcgcggtggactaccccctgcatgaccttgtcctccacaccaactacaccgccacagtgcgtggcctgcggggccccaacctcacttccccagccagcatcaccttcaccacagggctagaggcccctcgggacttggaggccaaggaagtgaccccccgcaccgccctgctcacttggactgagcccccagtccggcccgcaggctacctgctcagcttccacacccctggtggacagacccaggagatcctgctcccaggagggatcacatctcaccagctccttggcctctttccctccacctcctacaatgcacggctccaggccatgtggggccagagcctcctgccgcccgtgtccacctctttcaccacgggtgggctgcggatccccttccccagggactgcggggaggagatgcagaacggagccggtgcctccaggaccagcaccatcttcctcaacggcaaccgcgagcggcccctgatcgtgttttgcgacatggagactgatgggggcggctggctggtgttccagcgccgcatggatggacagacagacttctggagggactgggaggactatgcccatggttttgggaacatctctggagagttctggctgggcaatgaggccctgcacagcctgacacaggcaggtgactactccatgcgcgtggacctgcgggctggggacgaggctgtgttcgcccagtacgactccttccacgtagactcggctgcggagtactaccgcctccacttggagggctaccacggcaccgcaggggactccatgagctaccacagcggcagtgtcttctctgcccgtgatcgggaccccaacagcttgctcatctcctgcgctgtctcctaccgaggggcctggtggtacaggaactgccactacgccaacctcaacgggctctacgggagcacagtggaccatcagggagtgagctggtaccactggaagggcttcgagttctcggtgcccttcacggaaatgaagctgagaccaagaaactttcgctccccagcggggggaggctgagctgctgcccacctctctcgcaccccagtatgactgccgagcactgaggggtcgccccgagagaagagccagggtccttcaccacccagccgctggaggaagccttctctgccagcgatctcgcagcactgtgtttacaggggggaggggaggggttcgtacgggagcaataaaggagaaactgaggtacccgg

SEQ ID NO: 201556 - DNA, 1902 bp, Artificial Sequence
  derived and/or modified sequence
ggtcctcacccttgggcctcttggggactaccgatgagcctcctccctcaggcccctcgacgacgcaaggggcccaggctcctctcctgcagcagcgcccccaggagctgggagagttgagggtgctgggcagagatgagacagggcgcctccgtgtggtctggaccgcccagcctgacacctttgcctacttccaactgcgcatgcgggtgcccgaggggccgggggcacatgaggaagtgctgccaggggacgtccgccaggctctggtgcctccaccccctcctggaaccccgtatgagctgtcacttcatggggtccctcctgggggcaagccctctgaccccatcatctaccaaggcattatggacaaggatgaggagaagcctgggaagtcctcaggcccaccacgcctgggtgagctgacggtgacagacaggacctccgactccttgctcctgcgctggacggtccccgagggcgagtttgactccttcgtgatccagtacaaagacagggacgggcagccccaggtggtgcccgtggaaggaccccagcgctcggccgtcatcacctccctggatcctggccgcaagtacaaatttgtcctgtatgggtttgttggcaagaagaggcatggtccgctggtggctgaagccaagatcttgcctcagagtgacccaagtccagggactccaccccgcctgggaaacctgtgggtgacagaccctaccccagattcactgcacctctcctggactgtccctgagggccagtttgacaccttcatggtccagtacagggacagggatggacggccccaggtggtacctgtggaagggcccgagcgttcatttgttgtctcctcactggaccctgaccacaagtacagattcactctgtttggaattgcgaacaagaagcggtatggccccctcacggccgatggcaccactgctccagagaggaaagaggagcccccccgccctgagttcctggagcagcccctcctgggggaactgacagtgaccggcgtgaccccagactccttgcgtctctcatggacagtggcccagggccccttcgactcattcatggtccagtacaaggatgcacaggggcagccccaggcagtgcctgttgcgggggatgagaatgaggttactgtccccggcctggatcccgaccggaagtataagatgaacctctacgggcttcgtggcaggcagcgtgtggggcccgagtctgtggtggccaagactgctcctcaggaggatgtggacgagacccccagccccacagaactgggcacggaggccccggagtcccccgaggagccgctcctgggggagctgacagtgacaggatcctcccctgattcgctgagcctcttctggaccgtcccccagggcagcttcgactctttcaccgtgcagtacaaggacagggatgggcggccccgggcggtgcgtgttgggggcaaggagagtgaggtcaccgtgggaggcctagagcccgggcacaagtacaagatgcacctgtacggcctccacgaggggcagcgcgtgggcccggtgtccgccgtgggcgtgacagccccacaacaagaagagacccctccagccactgagtccccgctggagccacgcctaggagagctgacagtgacagatgtgacccccaactctgtgggcctctcctggacagtccccgagggccagtttgactccttcatagtccagtacaaggacaaggacgggcagccccaggtggtgccggtggcggcagaccagcgagaggtcacagtctacaacctggagcctgagagaaaatataagatgaacatgtatggactacatgatgggcaacgcatgggccccctgtctgtggtcatcgtgacgg

SEQ ID NO: 201557 - DNA, 13065 bp, Artificial Sequence
  derived and/or modified sequence
tcctccccttctcctcccctgctcgctgcagactccctcctcactgtcgctgccgagatccacagtcggttgtggctcagcccctgttgcaggggacaagtgagggagacttccctgtcctgccctgagacgccgccctcccggggttggggacagagcaggtgcagaggcactgcagctgctcggttgcccagcctcctgaatgatgccagcccagtatgctctaacctccagcctggttctcctggtgctgctgagcacagccagagcaggccccttctcttcacggtccaatgtgacactgccagccccccggccccctccccagccagggggccacacagtgggggctggagtgggaagcccctcttctcagctttacgagcacacagtggaaggaggggagaagcaggtggtattcacccaccgcattaacctgcccccttccactggctgtggctgtcccccaggcaccgagcccccagtccttgcttcagaggtacaggccctgagggtccgtctagagatcctggaggagttggtgaaggggctcaaggaacagtgcactgggggatgttgtcctgcctctgcccaagctggcacaggtcagacagatgtgcggaccctctgcagtctccatggtgtgtttgatctgagccgctgcacctgttcctgtgagccaggctggggtgggcccacctgctcagaccccacagatgctgagatccctccctcttccccaccctcagcctcggggtcctgcccagatgactgcaatgatcagggtcgctgtgtccgtggtcgttgcgtgtgctttcccggctacactggccccagctgtggctggccatcctgtcccggggactgccaaggccgtgggcgctgcgtgcagggcgtgtgtgtgtgccgggcaggcttctcaggccccgactgcagccagcgctcctgccctcgaggttgcagccagaggggacgctgtgagggtgggcgctgcgtgtgtgacccaggctacactggtgacgactgtggcatgaggagctgccctcgcggttgcagtcagagggggcgctgtgagaatgggcgctgcgtgtgtaaccccggctacactggcgaggactgtggggtgaggagctgccctcggggctgcagccagcggggacgctgcaaggacgggcgctgcgtgtgtgaccccggctacactggcgaggactgtggtacgcggagctgcccctgggactgtggcgagggcgggcgctgcgtggacggccgctgcgtgtgctggcccgggtacacaggcgaggactgcagcacgcggacatgtccgagggactgccggggccgcgggcgctgcgaggacggcgaatgcatttgcgacacgggctacagcggggacgactgcggcgtgcgcagctgccctggcgactgcaaccaaaggggccgctgcgaggacggccgctgcgtgtgctggccggggtacactggaaccgattgcggctcgcgcgcctgcccacgcgactgtagaggtcgcgggcgctgcgagaacggcgtgtgtgtttgcaatgcgggctacagcggcgaggactgcggtgtgcgcagctgtcctggggactgtcgtggccggggccgctgtgagagtggccgctgcatgtgttggccggggtacacaggccgggactgcggcacgcgcgcctgtcctggcgactgtcgcgggcgcgggcgctgcgtggatggccgctgcgtgtgcaacccgggcttcaccggtgaggactgtgggagccgtcgctgtcccggggactgccgtgggcacggcctttgcgaggatggcgtgtgcgtgtgtgacgcaggctactcaggggaagactgcagcacgcgcagctgccccgggggctgccgaggccgcggccagtgcctagatgggcggtgtgtgtgcgaggacggctactctggcgaggattgcggtgtgaggcagtgcccgaatgactgcagccagcacggcgtgtgccaggacggtgtgtgcatctgttgggaaggctacgtgagtgaggactgcagcatccgcacctgcccctccaactgccacgggaggggccgctgtgaggaagggcgctgcctgtgcgacccaggctacaccggccctacctgtgccacccgcatgtgcccggctgactgccggggacgtgggcggtgtgtgcaaggagtgtgcctgtgccacgtgggctatggcggtgaggactgcgggcaggaagagcctccagccagcgcctgccctggaggctgcgggccccgggaactgtgccgggcaggccagtgtgtgtgtgtagagggcttccgaggccctgactgtgccatccagacatgcccaggggactgccgtggccgaggagagtgtcacgatggcagctgtgtctgcaaagatgggtatgctggcgaagactgcggagaagaggtgccaaccattgagggcatgaggatgcatctcttggaggagacaacagttcggacagagtggaccccggctcctggccccgtggatgcctatgaaattcagttcatccccacgacagagggggcgagccccccattcacagcacgggttccaagctctgcctcagcctatgaccagagaggactggcccctggacaggagtaccaggtcactgtccgagcccttcgagggaccagctggggccttcctgcctccaagaccatcaccaccatgatcgatgggccccaggacctccgagtggtggctgtgacaccgacaacactggagcttggctggctgcgtccccaggctgaggtggaccgatttgtggtgtcctacgtcagtgccggcaaccagagggtgaggctggaagtgccccctgaagcagacgggacgctgctgactgacctgatgccaggcgtagaatatgtggtgactgtcacagcggagcggggccgggcagtcagctacccagcttctgtcagggccaacacagggtcctcacccttgggcctcttggggactaccgatgagcctcctccctcaggcccctcgacgacgcaaggggcccaggctcctctcctgcagcagcgcccccaggagctgggagagttgagggtgctgggcagagatgagacagggcgcctccgtgtggtctggaccgcccagcctgacacctttgcctacttccaactgcgcatgcgggtgcccgaggggccgggggcacatgaggaagtgctgccaggggacgtccgccaggctctggtgcctccaccccctcctggaaccccgtatgagctgtcacttcatggggtccctcctgggggcaagccctctgaccccatcatctaccaaggcattatggacaaggatgaggagaagcctgggaagtcctcaggcccaccacgcctgggtgagctgacggtgacagacaggacctccgactccttgctcctgcgctggacggtccccgagggcgagtttgactccttcgtgatccagtacaaagacagggacgggcagccccaggtggtgcccgtggaaggaccccagcgctcggccgtcatcacctccctggatcctggccgcaagtacaaatttgtcctgtatgggtttgttggcaagaagaggcatggtccgctggtggctgaagccaagatcttgcctcagagtgacccaagtccagggactccaccccgcctgggaaacctgtgggtgacagaccctaccccagattcactgcacctctcctggactgtccctgagggccagtttgacaccttcatggtccagtacagggacagggatggacggccccaggtggtacctgtggaagggcccgagcgttcatttgttgtctcctcactggaccctgaccacaagtacagattcactctgtttggaattgcgaacaagaagcggtatggccccctcacggccgatggcaccactgctccagagaggaaagaggagcccccccaccctgagttcctggagcagcccctcctgggggaactgacagtgaccggcgtgaccccagactccttgcgtctctcatggacagtggcccagggccccttcgactcattcatggtccagtacaaggatgcacaggggcagccccaggcagtgcctgttgcgggggatgagaatgaggttactgtccccggcctggatcccgaccggaagtataagatgaacctctacgggcttcgtggcaggcagcgtgtggggcccgagtctgtggtggccaagactgctcctcaggaggatgtggacgagacccccagccccacagaactgggcacggaggccccggagtcccccgaggagccgctcctgggggagctgacagtgacaggatcctcccctgattcgctgagcctcttctggaccgtcccccagggcagcttcgactctttcaccgtgcagtacaaggacagggatgggcggccccgggcggtgcgtgttgggggcaaggagagtgaggtcaccgtgggaggcctagagcccgggcacaagtacaagatgcacctgtacggcctccacgaggggcagcgcgtgggcccggtgtccgccgtgggcgtgacagccccacaacaagaagagacccctccagccactgagtccccgctggagccacgcctaggagagctgacagtgacagatgtgacccccaactctgtgggcctctcctggacagtccccgagggccagtttgactccttcatagtccagtacaaggacaaggacgggcagccccaggtggtgccggtggcggcagaccagcgagaggtcacagtctacaacctggagcctgagagaaaatataagatgaacatgtatggactacatgatgggcaacgcatgggccccctgtctgtggtcatcgtgacggctcccctcccaccagccccagccacagaggcctccaagcctcccctggagccacgcctaggggagctgacagtgacggatataacccctgactctgtgggcctctcatggacagtccctgagggtgaattcgactcctttgtggttcagtacaaggacagggacgggcagccccaggtggtgcccgtggctgcagatcagcgggaggtcactatccctgacctggaaccctcccgcaagtacaagttcctgctctttgggatccaggatgggaaacgacgcagcccagtctctgtggaggcaaagacggttgcccgaggtgacgccagcccaggggccccaccccgccttggggagctgtgggtgacagaccccaccccagactcactgcgcctctcctggacggttcctgagggccagttcgactcttttgtggtccagttcaaggacaaagacgggccccaggtggtgcccgtggagggccatgagcgctctgtcactgtcacccctctggatgccggccgcaagtacagattcctcctctatggcctcctgggcaagaagcgccatggccctctcactgccgacggcaccacggaagcccggagtgctatggatgatactggaacaaagcgtcccccaaaaccccgtctgggggaggagctgcaggtgaccaccgtgacccagaactccgtgggcctctcctggacagtccctgagggccagtttgactcctttgtggtccagtacaaagacagggacgggcagccccaggtggtgcccgtggagggcagcctcagggaggtcagcgtgccgggcctggaccctgcccacaggtacaagctgctgctctacgggctgcaccacggcaagcgtgtgggccccatctcggccgtcgccattactgccggcagggaagaaacggaaactgagaccacggccccgacccctccagcgcctgagccccacctcggggagttgacagtggaggaggccacgtcacacaccctgcatctctcctggatggtgactgagggagaatttgactccttcgaaatccagtacacagatagagacgggcaactccaaatggtccgcataggaggtgaccggaatgacatcaccctctctggcctggaatccgaccacagatacctggtgaccctgtatggtttcagtgatgggaagcatgtaggtcctgtccatgtcgaggccctgacagtcccggaggaggagaagccttcagaacctcccaccgcaacccccgagccccccatcaagcctcgcctgggggagctgaccgtgacagatgccacccctgactccctcagcctgtcctggacagttcccgagggacagtttgaccacttcctggtccagtacaggaatggagatgggcagcccaaggcagtgagggtgccagggcacgaggaaggggtcaccatctcgggcctggagccagaccataaatacaagatgaacctgtacggcttccacggtggccagcgcatgggccctgtgtctgtcgtcggggtgacagctgcagaggaagagacccccagccccacagaacccagcatggaggccccggagcccgctgaggagccgctcctgggggagctaacagtgacaggatcctcccctgactcgctgagcctctcctggaccgtcccccagggccgcttcgactccttcaccgtgcagtacaaggacagggacgggcggccccaggtggtgcgtgttgggggcgaggagagtgaagtcaccgtggggggcctggagcctgggcgcaagtacaagatgcacctgtacggcctccacgaggggcggcgcgtgggcccagtgtctgctgtgggcgtcacggcccccgaagaggagtcccctgatgctcctcttgcaaagctgcgcctagggcagatgacagtgagagacatcacctccgactccctcagcctctcctggacagtccccgagggccagtttgaccatttcttggtccagtttaagaatggggatgggcagcccaaggcggtgcgggtgccgggacacgaggatggggtcaccatctcgggcctggagccagaccacaagtacaagatgaacctgtacggcttccacggtggccagcgcgtgggccccgtgtctgctgttggtttaactgccccaggaaaggatgaagaaatggccccagcctcgacagaacctcccacccctgaaccccccatcaagcctcgcctggaggagctgaccgtgacagatgcgacccctgactccctcagcctgtcctggacggttcccgagggacagtttgaccacttcctggtccagtacaagaatggggatgggcagcccaaggcaacacgggtgccaggacatgaggacagggtcaccatctccggcctggagccagacaacaagtacaagatgaacctgtacggcttccacggtggccagcgtgtgggccccgtgtctgccatcggggtgacagctgcagaggaagagacccccagccccacagaacccagcatggaggccccggagccccctgaggagccgctcctgggggagctgacagtgacaggatcctcccctgactcgctgagcctctcctggaccgtcccccagggccgcttcgactccttcaccgtgcagtacaaggacagggacgggcggccccaggtggtgcgtgttgggggcgaggagagcgaggtcaccgtggggggcctggagcctgggcgcaaatacaagatgcacctgtacggcctccacgaggggcggcgcgtgggcccggtgtccaccgtgggcgtgactgccccacaagaggatgtggacgagacccccagccctacagaaccaggcacagaggccccagagccccccgaggagcctctcctgggggagctgacagtgacaggatcctcccctgactcgctgagcctttcctggaccgtcccccagggccgctttgactccttcaccgtgcagtacaaggacagggatgggcggccccaggcggtgcgtgttgggggccaggagagcaaggtcactgtgaggggcctggagcctgggcgcaagtacaagatgcacctgtacggcctccacgaggggcggcgcctgggcccggtgtctgccgtgggcgtcacagaggatgaagccgagaccacccaagcagtgcctaccatgacccctgagccccccatcaagcctcgcctgggggagctgaccatgacagatgccacccctgactccctcagcctgtcctggacggttcccgagggccagtttgaccacttcctggtccagtacaggaatggggatgggcagcccaaggcggtgcgggtgccggggcacgaggacggggtcaccatctcaggcctggagccagaccataaatacaagatgaacctgtacggcttccacggtggccagcgcgtgggccccatctctgtcattggggtgacggctgcagaggaagagacccccagccccacggaactcagcactgaggccccggagccccctgaggagccgctcctgggggagctgacagtgacaggatcctcccctgactcgctgagcctctcctggaccatcccccagggccacttcgactccttcaccgtgcagtacaaggacagggacgggcggccccaggtgatgcgtgtcaggggcgaggagagcgaggtcaccgtggggggcctggagcccgggcgcaaatacaagatgcacctgtacggcctccacgaggggcggcgtgtgggcccggtgtccaccgtgggtgtgacagtgcccaccacaacccctgagccccccaacaagcctcgcctcggggagctgaccgtgacagatgccacccctgactccctcagcctgtcctggatggtccccgagggccagtttgaccacttcctggtccagtacaggaatggggatgggcagcccaaggtggtgcgggtgccggggcacgaggacggggtcaccatctcaggcctggagccagaccacaagtacaagatgaacctgtacggcttccacggtggccagcgcgtgggccccatctctgtcattggggtgacagctgcagaggaagaaactcccgcccccacagaacccagcacggaggccccggagccccctgaggagccgctcctgggggagctgacagtgacaggatcctcccctgactcgctgagcctctcctggaccatcccccagggccgcttcgactccttcactgtgcagtacaaggacagggacgggcggccccaggtggtgcgtgtcaggggcgaggagagcgaggtcaccgtggggggcctggagcccgggtgcaaatacaagatgcacctgtacggcctccacgaggggcagcgcgtgggcccagtgtccgctgtgggtgtgacagtgcctaccatgacccctgagccccccatcaagcctcgcctgggggagctgaccgtgacagatgccacccccgactccctcagcctgtcctggatggttcccgagggccagtttgaccacttcctggtccagtacaggaatggggatgggcagcccaaggcggtgcgggtgccggggcacgaggacggggtcaccatctcaggcctggagccagaccataaatacaagatgaacctgtacggcttccacggtggccagcgcgtaggccctgtgtctgccattggggtgacggaggaagagacccccagccccacagaacccagcactgaggccccggaggcccctgaggagccgctcctgggggagttgacagtgacaggatcctcccctgactcgctgagcctctcctggaccatcccccagggccgcttcgactccttcaccgtgcagtacaaggacagggacgggcagccccaggtggtgcgtgtcaggggcgaggagagcgaggtcaccgtggggggcctggagcccgggcgcaaatacaagatgcatctgtacggcctccacgaggggcagcgcgtgggcccagtgtccaccgtgggcatcacggcgcccctgcccacaccactgccggtggagccccgcctgggggagctggcggtggcggccgtgacctcggactcagtgggcctctcatggacggtggcccagggcccctttgactccttcctggtacagtacagggacgcgcaggggcagccccaggcagtgcctgtgagcggagacctccgagcggtcgccgtctcggggctggacccggcccgcaagtacaagttcctgctctttggactccagaatgggaaacgccacggcccagtccctgtggaggccaggaccgccccagacaccaaaccgtctccccgcctgggggagctgactgtgacagatgcgacccctgactccgtgggcctctcgtggacggtccctgagggcgaattcgactccttcgtggtccagtacaaggataaggatggtcggctccaggtggtgccggtggcagccaaccagcgggaggtcacagtccagggcctggagcccagtaggaaatacaggttcctgctctatggtctgtcaggcaggaaacgactgggccccatctctgctgacagcaccacagctcccctggagaaggagctacctccccacctgggggaactgaccgtggctgaggagacctccagctctctgcgcctgtcctggacggtagcccagggcccctttgactccttcgtggtccagtacagggacacggacgggcagcccagggcagtgcctgtggccgcagaccagcgcacagtcaccgtagaggacctggagcctggcaagaaatacaagtttctgctctacgggctccttgggggaaagcgcctgggcccggtctctgccctgggaatgacagccccagaagaggacacaccagccccagagttagccccagaggcccctgagcctcctgaagagccccgcctaggagtgctgaccgtgaccgacacaaccccagactccatgcgcctctcgtggagcgtggcccagggcccctttgattccttcgtggtccagtatgaggacacgaacgggcagccccaggccttgctcgtggacggcgaccagagcaagatcctcatctcaggcctggagcccagcaccccctacaggttcctcctctatggcctccatgaagggaagcgcctggggcccctctcagctgagggcaccacagggctggctcctgctggtcagacctcagaggagtcaaggccccgcctgtcccagctgtctgtgactgacgtgaccaccagttcactgaggctcaactgggaggccccaccgggggccttcgactccttcctgctccgctttggggttccatcaccaagcactctggagccgcatccgcgtccactgctgcagcgcgagctgatggtgccggggacgcggcactcggccgtgctccgggacctgcgttccgggactctgtacagcctgacactgtatgggctgcgaggaccccacaaggccgacagcatccagggaaccgcccgcaccctcagcccagttctggagagcccccgtgacctccaattcagtgaaatcagggagacctcagccaaggtcaactggatgcccccaccatcccgggcggacagcttcaaagtctcctaccagctggcggacggaggggagcctcagagtgtgcaggtggatggccaggcccggacccagaaactccaggggctgatcccaggcgctcgctatgaggtgaccgtggtctcggtccgaggctttgaggagagtgagcctctcacaggcttcctcaccacggttcctgacggtcccacacagttgcgtgcactgaacttgaccgagggattcgccgtgctgcactggaagcccccccagaatcctgtagacacctatgacatccaggtcacagcccctggggccccgcctctgcaggcggagaccccaggcagcgcggtggactaccccctgcatgaccttgtcctccacaccaactacaccgccacagtgcgtggcctgcggggccccaacctcacttccccagccagcatcaccttcaccacagggctagaggcccctcgggacttggaggccaaggaagtgaccccccgcaccgccctgctcacttggactgagcccccagtccggcccgcaggctacctgctcagcttccacacccctggtggacagacccaggagatcctgctcccaggagggatcacatctcaccagctccttggcctctttccctccacctcctacaatgcacggctccaggccacgtggggccagagcctcctgccgcccgtgtccacctctttcaccacgggtgggctgcggatccccttccccagggactgcggggaggagatgcagaacggagccggtgcctccaggaccagcaccatcttcctcaacggcaaccgcgagcggcccctgaacgtgttttgcgacatggagactgatgggggcggctggctggtgttccagcgccgcatggatggacagacagacttctggagggactgggaggactatgcccatggttttgggaacatctctggagagttctggctgggcaatgaggccctgcacagcctgacacaggcaggtgactactccatgcgcgtggacctgcgggctggggacgaggctgtgttcgcccagtacgactccttccacgtagactcggctgcggagtactaccgcctccacttggagggctaccacggcaccgcaggggactccatgagctaccacagcggcagtgtcttctctgcccgtgatcgggaccccaacagcttgctcatctcctgcgctgtctcctaccgaggggcctggtggtacaggaactgccactacgccaacctcaacgggctctacgggagcacagtggaccatcagggagtgagctggtaccactggaagggcttcgagttctcggtgcccttcacggaaatgaagctgagaccaagaaactttcgctccccagcggggggaggctgagctgctgcccacctctctcgcaccccagtatgactgccgagcactgaggggtcgccccgagagaagagccagggtccttcaccacccagccgctggaggaagccttctctgccagcgatctcgcagcactgtgtttacaggggggaggggaggggttcgtacgggagcaataaaggagaaactgaggtacccgg

SEQ ID NO: 201558 - DNA, 6849 bp, Artificial Sequence
  derived and/or modified sequence
cctcctgaatgatgccagcccagtatgctctaacctccagcctggttctcctggtgctgctgagcacagccagagcaggccccttctcttcacggtccaatgtgacactgccagccccccggccccctccccagccagggggccacacagtgggggctggagtgggaagcccctcttctcagctttacgagcacacagtggaaggaggggagaagcaggtggtattcacccaccgcattaacctgcccccttccactggctgtggctgtcccccaggcaccgagcccccagtccttgcttcagaggtacaggccctgagggtccgtctagagatcctggaggagttggtgaaggggctcaaggaacagtgcactgggggatgttgtcctgcctctgcccaagctggcacaggtcagacagatgtgcggaccctctgcagtctccatggtgtgtttgatctgagccgctgcacctgttcctgtgagccaggctggggtgggcccacctgctcagaccccacagatgctgagatccctccctcttccccaccctcagcctcggggtcctgcccagatgactgcaatgatcagggtcgctgtgtccgtggtcgttgcgtgtgctttcccggctacactggccccagctgtggctggccatcctgtcccggggactgccaaggccgtgggcgctgcgtgcagggcgtgtgtgtgtgccgggcaggcttctcaggccccgactgcagccagcgctcctgccctcgaggttgcagccagaggggacgctgtgagggtgggcgctgcgtgtgtgacccaggctacactggtgacgactgtggcatgaggagctgccctcgcggttgcagtcagagggggcgctgtgagaatgggcgctgcgtgtgtaaccccggctacactggcgaggactgtggggtgaggagctgccctcggggctgcagccagcggggacgctgcaaggacgggcgctgcgtgtgtgaccccggctacactggcgaggactgtggtacgcggagctgcccctgggactgtggcgagggcgggcgctgcgtggacggccgctgcgtgtgctggcccgggtacacaggcgaggactgcagcacgcggacatgtccgagggactgccggggccgcgggcgctgcgaggacggcgaatgcatttgcgacacgggctacagcggggacgactgcggcgtgcgcagctgccctggcgactgcaaccaaaggggccgctgcgaggacggccgctgcgtgtgctggccggggtacactggaaccgattgcggctcgcgcgcctgcccacgcgactgtagaggtcgcgggcgctgcgagaacggcgtgtgtgtttgcaatgcgggctacagcggcgaggactgcggtgtgcgcagctgtcctggggactgtcgtggccggggccgctgtgagagtggccgctgcatgtgttggccggggtacacaggccgggactgcggcacgcgcgcctgtcctggcgactgtcgcgggcgcgggcgctgcgtggatggccgctgcgtgtgcaacccgggcttcaccggtgaggactgtgggagccgtcgctgtcccggggactgccgtgggcacggcctttgcgaggatggcgtgtgcgtgtgtgacgcaggctactcaggggaagactgcagcacgcgcagctgccccgggggctgccgaggccgcggccagtgcctagatgggcggtgtgtgtgcgaggacggctactctggcgaggattgcggtgtgaggcagtgcccgaatgactgcagccagcacggcgtgtgccaggacggtgtgtgcatctgttgggaaggctacgtgagtgaggactgcagcatccgcacctgcccctccaactgccacgggaggggccgctgtgaggaagggcgctgcctgtgcgacccaggctacaccggccctacctgtgccacccgcatgtgcccggctgactgccggggacgtgggcggtgtgtgcaaggagtgtgcctgtgccacgtgggctatggcggtgaggactgcgggcaggaagagcctccagccagcgcctgccctggaggctgcgggccccgggaactgtgccgggcaggccagtgtgtgtgtgtagagggcttccgaggccctgactgtgccatccagacatgcccaggggactgccgtggccgaggagagtgtcacgatggcagctgtgtctgcaaagatgggtatgctggcgaagactgcggagaagaggtgccaaccattgagggcatgaggatgcatctcttggaggagacaacagttcggacagagtggaccccggctcctggccccgtggatgcctatgaaattcagttcatccccacgacagagggggcgagccccccattcacagcacgggttccaagctctgcctcagcctatgaccagagaggactggcccctggacaggagtaccaggtcactgtccgagcccttcgagggaccagctggggccttcctgcctccaagaccatcaccaccatgatcgatgggccccaggacctccgagtggtggctgtgacaccgacaacactggagcttggctggctgcgtccccaggctgaggtggaccgatttgtggtgtcctacgtcagtgccggcaaccagagggtgaggctggaagtgccccctgaagcagacgggacgctgctgactgacctgatgccaggcgtagaatatgtggtgactgtcacagcggagcggggccgggcagtcagctacccagcttctgtcagggccaacacagggtcctcacccttgggcctcttggggactaccgatgagcctcctccctcaggcccctcgacgacgcaaggggcccaggctcctctcctgcagcagcgcccccaggagctgggagagttgagggtgctgggcagagatgagacagggcgcctccgtgtggtctggaccgcccagcctgacacctttgcctacttccaactgcgcatgcgggtgcccgaggggccgggggcacatgaggaagtgctgccaggggacgtccgccaggctctggtgcctccaccccctcctggaaccccgtatgagctgtcacttcatggggtccctcctgggggcaagccctctgaccccatcatctaccaaggcattatggacaaggatgaggagaagcctgggaagtcctcaggcccaccacgcctgggtgagctgacggtgacagacaggacctccgactccttgctcctgcgctggacggtccccgagggcgagtttgactccttcgtgatccagtacaaagacagggacgggcagccccaggtggtgcccgtggaaggaccccagcgctcggccgtcatcacctccctggatcctggccgcaagtacaaatttgtcctgtatgggtttgttggcaagaagaggcatggtccgctggtggctgaagccaagatcttgcctcagagtgacccaagtccagggactccaccccacctgggaaacctgtgggtgacagaccctaccccagattcactgcacctctcctggactgtccctgagggccagtttgacaccttcatggtccagtacagggacagggatggacggccccaggtggtacctgtggaagggcccgagcgttcatttgttgtctcctcactggaccctgaccacaagtacagattcactctgtttggaattgcgaacaagaagcggtatggccccctcacggccgatggcaccactgctccagagaggaaagaggagcccccccgccctgagttcctggagcagcccctcctgggggaactgacagtgaccggcgtgaccccagactccttgcgtctctcatggacagtggcccagggccccttcgactcattcatggtccagtacaaggatgcacaggggcagccccaggcagtgcctgttgcgggggatgagaatgaggttactgtccccggcctggatcccgaccggaagtataagatgaacctctacgggcttcgtggcaggcagcgtgtggggcccgagtctgtggtggccaagactgctcctcaggaggatgtggacgagacccccagccccacagaactgggcacggaggccccggagtcccccgaggagccgctcctgggggagctgacagtgacaggatcctcccctgattcgctgagcctcttctggaccgtcccccagggcagcttcgactctttcaccgtgcagtacaaggacagggatgggcggccccgggcggtgcgtgttgggggcaaggagagtgaggtcaccgtgggaggcctagagcccgggcacaagtacaagatgcacctgtacggcctccacgaggggcagcgcgtgggcccggtgtccgccgtgggcgtgacagccccacaacaagaagagacccctccagccactgagtccccgctggagccacgcctaggagagctgacagtgacagatgtgacccccaactctgtgggcctctcctggacagtccccgagggccagtttgactccttcatagtccagtacaaggacaaggacgggcagccccaggtggtgccggtggcggcagaccagcgagaggtcacagtctacaacctggagcctgagagaaaatataagatgaacatgtatggactacatgatgggcaacgcatgggccccctgtctgtggtcatcgtgacggctcccctcccaccagccccagccacagaggcctccaagcctcccctggagccacgcctaggggagctgacagtgacggatataacccctgactctgtgggcctctcatggacagtccctgagggtgaattcgactcctttgtggttcagtacaaggacagggacgggcagccccaggtggtgcccgtggctgcagatcagcgggaggtcactatccctgacctggaaccctcccgcaagtacaagttcctgctctttgggatccaggatgggaaacgacgcagcccagtctctgtggaggcaaagacggttgcccgaggtgacgccagcccaggggccccaccccgccttggggagctgtgggtgacagaccccaccccagactcactgcgcctctcctggacggttcctgagggccagttcgactcttttgtggtccagttcaaggacaaagacgggccccaggtggtgcccgtggagggccatgagcgctctgtcactgtcacccctctggatgccggccgcaagtacagattcctcctctatggcctcctgggcaagaagcgccatggccctctcactgccgacggcaccacggaagcccggagtgctatggatgatactggaacaaagcgtcccccaaaaccccgtctgggggaggagctgcaggtgaccaccgtgacccagaactccgtgggcctctcctggacagtccctgagggccagtttgactcctttgtggtccagtacaaagacagggacgggcagccccaggtggtgcccgtggagggcagcctcagggaggtcagcgtgccgggcctggaccctgcccacaggtacaagctgctgctctacgggctgcaccacggcaagcgtgtgggccccatctcggccgtcgccattactgccggcagggaagaaacggaaactgagaccacggccccgacccctccagcgcctgagccccacctcggggagttgacagtggaggaggccacgtcacacaccctgcatctctcctggatggtgactgagggagaatttgactccttcgaaatccagtacacagatagagacgggcaactccaaatggtccgcataggaggtgaccggaatgacatcaccctctctggcctggaatccgaccacagatacctggtgaccctgtatggtttcagtgatgggaagcatgtaggtcctgtccatgtcgaggccctgacagtcccggaggaggagaagccttcagaacctcccaccgcaacccccgagccccccatcaagcctcgcctgggggagctgaccgtgacagatgccacccctgactccctcagcctgtcctggacagttcccgagggacagtttgaccacttcctggtccagtacaggaatggagatgggcagcccaaggcagtgagggtgccagggcacgaggaaggggtcaccatctcgggcctggagccagaccataaatacaagatgaacctgtacggcttccacggtggccagcgcatgggccctgtgtctgtcgtcggggtgacagctgcagaggaagagacccccagccccacagaacccagcatggaggccccggagcccgctgaggagccgctcctgggggagctaacagtgacaggatcctcccctgactcgctgagcctctcctggaccgtcccccagggccgcttcgactccttcaccgtgcagtacaaggacagggacgggcggccccaggtggtgcgtgttgggggcgaggagagtgaagtcaccgtggggggcctggagcctgggcgcaagtacaagatgcacctgtacggcctccacgaggggcggcgcgtgggcccagtgtctgctgtgggcgtcacggcccccgaagaggagtcccctgatgctcctcttgcaaagctgcgcctagggcagatgacagtgagagacatcacctccgactccctcagcctctcctggacagtccccgagggccagtttgaccatttcttggtccagtttaagaatggggacgggcagcccaaggcggtgcgggtgccgggacacgaggatggggtcaccatctcgggcctggagccagaccacaagtacaagatgaacctgtacggcttccacggtggccagcgcgtgggccccgtgtctgctgttggtttaactg

SEQ ID NO: 201559 - DNA, 2852 bp, Artificial Sequence
  derived and/or modified sequence
agctgactgtgacagatgcgacccctgactccgtgggcctctcgtggacggtccctgagggcgaattcgactccttcgtggtccagtacaaggataaggatggtcggctccaggtggtgccggtggcagccaaccagcgggaggtcacagtccagggcctggagcccagtaggaaatacaggttcctgctctatggtctgtcaggcaggaaacgactgggccccatctctgctgacagcaccacagctcccctggagaaggagctacctccccacctgggggaactgaccgtggctgaggagacctccagctctctgcgcctgtcctggacggtagcccagggcccctttgactccttcgtggtccagtacagggacacggacgggcagcccagggcagtgcctgtggccgcagaccagcgcacagtcaccgtagaggacctggagcctggcaagaaatacaagtttctgctctacgggctccttgggggaaagcgcctgggcccggtctctgccctgggaatgacagccccagaagaggacacaccagccccagagttagccccagaggcccctgagcctcctgaagagccccgcctaggagtgctgaccgtgaccgacacaaccccagactccatgcgcctctcgtggagcgtggcccagggcccctttgattccttcgtggtccagtatgaggacacgaacgggcagccccaggccttgctcgtggacggcgaccagagcaagatcctcatctcaggcctggagcccagcaccccctacaggttcctcctctatggcctccatgaagggaagcgcctggggcccctctcagctgagggcaccacagggctggctcctgctggtcagacctcagaggagtcaaggccccgcctgtcccagctgtctgtgactgacgtgaccaccagttcactgaggctcaactgggaggccccaccgggggccttcgactccttcctgctccgctttggggttccatcaccaagcacactggagccgcatccgcgtccactgctgcagcgcgagctgatggtgccggggacgcggcactcggccgtgctccgggacctgcgttccgggactctgtacagcctgacactgtatgggctgcgaggaccccacaaggccgacagcatccagggaaccgcccgcaccctcagcccagttctggagagcccccgtgacctccaattcagtgaaatcagggagacctcagccaaggtcaactggatgcccccaccatcccgggcggacagcttcaaagtctcctaccagctggcggacggaggggagcctcagagtgtgcaggtggatggccaggcccggacccagaaactccaggggctgatcccaggcgctcgctatgaggtgaccgtggtctcggtccgaggctttgaggagagtgagcctctcacaggcttcctcaccacggttcctgacggtcccacacagttgcgtgcactgaacttgaccgagggattcgccgtgctgcactggaagcccccccagaatcctgtagacacctatgacatccaggtcacagcccctggggccccgcctctgcaggcggagaccccaggcagcgcggtggactaccccctgcatgaccttgtcctccacaccaactacaccgccacagtgcgtggcctgcggggccccaacctcacttccccagccagcatcaccttcaccacagggctagaggcccctcgggacttggaggccaaggaagtgaccccccgcaccgccctgctcacttggactgagcccccagtccggcccgcaggctacctgctcagcttccacacccctggtggacagacccaggagatcctgctcccaggagggatcacatctcaccagctccttggcctctttccctccacctcctacaatgcacggctccaggccatgtggggccagagcctcctgccgcccgtgtccacctctttcaccacgggtgggctgcggatccccttccccagggactgcggggaggagatgcagaacggagccggtgcctccaggaccagcaccatcttcctcaacggcaaccgcgagcggcccctgatcgtgttttgcgacatggagactgatgggggcggctggctggtgttccagcgccgcatggatggacagacagacttctggagggactgggaggactatgcccatggttttgggaacatctctggagagttctggctgggcaatgaggccctgcacagcctgacacaggcaggtgactactccatgcgcgtggacctgcgggctggggacgaggctgtgttcgcccagtacgactccttccacgtagactcggctgcggagtactaccgcctccacttggagggctaccacggcaccgcaggggactccatgagctaccacagcggcagtgtcttctctgcccgtgatcgggaccccaacagcttgctcatctcctgcgctgtctcctaccgaggggcctggtggtacaggaactgccactacgccaacctcaacgggctctacgggagcacagtggaccatcagggagtgagctggtaccactggaagggcttcgagttctcggtgcccttcacggaaatgaagctgagaccaagaaactttcgctccccagcggggggaggctgagctgctgcccacctctctcgcaccccagtatgactgccgagcactgaggggtcgccccgagagaagagccagggtccttcaccacccagccgctggaggaagccttctctgccagcgatctcgcagcactgtgtttacaggggggaggggaggggttcgtacgggagcaataaaggagaaactgaggtacccggc

SEQ ID NO: 201560 - DNA, 651 bp, Artificial Sequence
  derived and/or modified sequence
gccccaggaaaggatgaagaaatggccccagcctcgacagaacctcccacccctgaaccccccatcaagcctcgcctggaggagctgaccgtgacagatgcgacccctgactccctcagcctgtcctggacggttcccgagggacagtttgaccacttcctggtccagtacaagaatggggatgggcagcccaaggcaacacgggtgccaggacatgaggacagggtcaccatctccggcctggagccagacaacaagtacaagatgaacctgtacggcttccacggtggccagcgtgtgggccccgtgtctgccatcggggtgacagctgcagaggaagagacccccagccccacagaacccagcatggaggccccggagccccctgaggagccgctcctgggggagctaacagtgacaggatcctcccctgactcgctgagcctctcctggaccgtcccccagggccgcttcgactccttcaccgtgcagtacaaggacagggacgggcggccccaggtggtgcgtgttgggggcgaggagagcgaggtcaccgtggggggcctggagcctgggcgcaaatacaagatgcacctgtatggcctccacgaggggcggcgcgtgggcccggtgtccaccgtgggcgtgact

SEQ ID NO: 201561 - DNA, 13125 bp, Artificial Sequence
  derived and/or modified sequence
tcctccccttctcctcccctgctcgctgcagactccctcctcactgtcgctgccgagatccacagtcggttgtggctcagcccctgttgcaggggacaagtgagggagacttccctgtcctgccctgagacgccgccctcccggggttggggacagagcaggtgcagaggcactgcagctgctcggttgcccagcctcctgaatgatgccagcccagtatgctctaacctccagcctggttctcctggtgctgctgagcacagccagagcaggccccttctcttcacggtccaatgtgacactgccagccccccggccccctccccagccagggggccacacagtgggggctggagtgggaagcccctcttctcagctttacgagcacacagtggaaggaggggagaagcaggtggtattcacccaccgcattaacctgcccccttccactggctgtggctgtcccccaggcaccgagcccccagtccttgcttcagaggtacaggccctgagggtccgtctagagatcctggaggagttggtgaaggggctcaaggaacagtgcactgggggatgttgtcctgcctctgcccaagctggcacaggtcagacagatgtgcggaccctctgcagtctccatggtgtgtttgatctgagccgctgcacctgttcctgtgagccaggctggggtgggcccacctgctcagaccccacagatgctgagatccctccctcttccccaccctcagcctcggggtcctgcccagatgactgcaatgatcagggtcgctgtgtccgtggtcgttgcgtgtgctttcccggctacactggccccagctgtggctggccatcctgtcccggggactgccaaggccgtgggcgctgcgtgcagggcgtgtgtgtgtgccgggcaggcttctcaggccccgactgcagccagcgctcctgccctcgaggttgcagccagaggggacgctgtgagggtgggcgctgcgtgtgtgacccaggctacactggtgacgactgtggcatgaggagctgccctcgcggttgcagtcagagggggcgctgtgagaatgggcgctgcgtgtgtaaccccggctacactggcgaggactgtggggtgaggagctgccctcggggctgcagccagcggggacgctgcaaggacgggcgctgcgtgtgtgaccccggctacactggcgaggactgtggtacgcggagctgcccctgggactgtggcgagggcgggcgctgcgtggacggccgctgcgtgtgctggcccgggtacacaggcgaggactgcagcacgcggacatgtccgagggactgccggggccgcgggcgctgcgaggacggcgaatgcatttgcgacacgggctacagcggggacgactgcggcgtgcgcagctgccctggcgactgcaaccaaaggggccgctgcgaggacggccgctgcgtgtgctggccggggtacactggaaccgattgcggctcgcgcgcctgcccacgcgactgtagaggtcgcgggcgctgcgagaacggcgtgtgtgtttgcaatgcgggctacagcggcgaggactgcggtgtgcgcagctgtcctggggactgtcgtggccggggccgctgtgagagtggccgctgcatgtgttggccggggtacacaggccgggactgcggcacgcgcgcctgtcctggcgactgtcgcgggcgcgggcgctgcgtggatggccgctgcgtgtgcaacccgggcttcaccggtgaggactgtgggagccgtcgctgtcccggggactgccgtgggcacggcctttgcgaggatggcgtgtgcgtgtgtgacgcaggctactcaggggaagactgcagcacgcgcagctgccccgggggctgccgaggccgcggccagtgcctagatgggcggtgtgtgtgcgaggacggctactctggcgaggattgcggtgtgaggcagtgcccgaatgactgcagccagcacggcgtgtgccaggacggtgtgtgcatctgttgggaaggctacgtgagtgaggactgcagcatccgcacctgcccctccaactgccacgggaggggccgctgtgaggaagggcgctgcctgtgcgacccaggctacaccggccctacctgtgccacccgcatgtgcccggctgactgccggggacgtgggcggtgtgtgcaaggagtgtgcctgtgccacgtgggctatggcggtgaggactgcgggcaggaagagcctccagccagcgcctgccctggaggctgcgggccccgggaactgtgccgggcaggccagtgtgtgtgtgtagagggcttccgaggccctgactgtgccatccagacatgcccaggggactgccgtggccgaggagagtgtcacgatggcagctgtgtctgcaaagatgggtatgctggcgaagactgcggagaagaggtgccaaccattgagggcatgaggatgcatctcttggaggagacaacagttcggacagagtggaccccggctcctggccccgtggatgcctatgaaattcagttcatccccacgacagagggggcgagccccccattcacagcacgggttccaagctctgcctcagcctatgaccagagaggactggcccctggacaggagtaccaggtcactgtccgagcccttcgagggaccagctggggccttcctgcctccaagaccatcaccaccatgatcgatgggccccaggacctccgagtggtggctgtgacaccgacaacactggagcttggctggctgcgtccccaggctgaggtggaccgatttgtggtgtcctacgtcagtgccggcaaccagagggtgaggctggaagtgccccctgaagcagacgggacgctgctgactgacctgatgccaggcgtagaatatgtggtgactgtcacagcggagcggggccgggcagtcagctacccagcttctgtcagggccaacacagggtcctcacccttgggcctcttggggactaccgatgagcctcctccctcaggcccctcgacgacgcaaggggcccaggctcctctcctgcagcagcgcccccaggagctgggagagttgagggtgctgggcagagatgagacagggcgcctccgtgtggtctggaccgcccagcctgacacctttgcctacttccaactgcgcatgcgggtgcccgaggggccgggggcacatgaggaagtgctgccaggggacgtccgccaggctctggtgcctccaccccctcctggaaccccgtatgagctgtcacttcatggggtccctcctgggggcaagccctctgaccccatcatctaccaaggcattatggacaaggatgaggagaagcctgggaagtcctcaggcccaccacgcctgggtgagctgacggtgacagacaggacctccgactccttgctcctgcgctggacggtccccgagggcgagtttgactccttcgtgatccagtacaaagacagggacgggcagccccaggtggtgcccgtggaaggaccccagcgctcggccgtcatcacctccctggatcctggccgcaagtacaaatttgtcctgtatgggtttgttggcaagaagaggcatggtccgctggtggctgaagccaagatcttgcctcagagtgacccaagtccagggactccaccccgcctgggaaacctgtgggtgacagaccctaccccagattcactgcacctctcctggactgtccctgagggccagtttgacaccttcatggtccagtacagggacagggatggacggccccaggtggtacctgtggaagggcccgagcgttcatttgttgtctcctcactggaccctgaccacaagtacagattcactctgtttggaattgcgaacaagaagcggtatggccccctcacggccgatggcaccactgctccagagaggaaagaggagcccccccgccctgagttcctggagcagcccctcctgggggaactgacagtgaccggcgtgaccccagactccttgcgtctctcatggacagtggcccagggccccttcgactcattcatggtccagtacaaggatgcacaggggcagccccaggcagtgcctgttgcgggggatgagaatgaggttactgtccccggcctggatcccgaccggaagtataagatgaacctctacgggcttcgtggcaggcagcgtgtggggcccgagtctgtggtggccaagactgctcctcaggaggatgtggacgagacccccagccccacagaactgggcacggaggccccggagtcccccgaggagccgctcctgggggagctgacagtgacaggatcctcccctgattcgctgagcctcttctggaccgtcccccagggcagcttcgactctttcaccgtgcagtacaaggacagggatgggcggccccgggcggtgcgtgttgggggcaaggagagtgaggtcaccgtgggaggcctagagcccgggcacaagtacaagatgcacctgtacggcctccacgaggggcagcgcgtgggcccggtgtccgccgtgggcgtgacagccccacaacaagaagagacccctccagccactgagtccccgctggagccacgcctaggagagctgacagtgacagatgtgacccccaactctgtgggcctctcctggacagtccccgagggccagtttgactccttcatagtccagtacaaggacaaggacgggcagccccaggtggtgccggtggcggcagaccagcgagaggtcacagtctacaacctggagcctgagagaaaatataagatgaacatgtatggactacatgatgggcaacgcatgggccccctgtctgtggtcatcgtgacggctcccctcccaccagccccagccacagaggcctccaagcctcccctggagccacgcctaggggagctgacagtgacggatataacccctgactctgtgggcctctcatggacagtccctgagggtgaattcgactcctttgtggttcagtacaaggacagggacgggcagccccaggtggtgcccgtggctgcagatcagcgggaggtcactatccctgacctggaaccctcccgcaagtacaagttcctgctctttgggatccaggatgggaaacgacgcagcccagtctctgtggaggcaaagacggttgcccgaggtgacgccagcccaggggccccaccccgccttggggagctgtgggtgacagaccccaccccagactcactgcgcctctcctggacggttcctgagggccagttcgactcttttgtggtccagttcaaggacaaagacgggccccaggtggtgcccgtggagggccatgagcgctctgtcactgtcacccctctggatgccggccgcaagtacagattcctcctctatggcctcctgggcaagaagcgccatggccctctcactgccgacggcaccacggaagcccggagtgctatggatgatactggaacaaagcgtcccccaaaaccccgtctgggggaggagctgcaggtgaccaccgtgacccagaactccgtgggcctctcctggacagtccctgagggccagtttgactcctttgtggtccagtacaaagacagggacgggcagccccaggtggtgcccgtggagggcagcctcagggaggtcagcgtgccgggcctggaccctgcccacaggtacaagctgctgctctacgggctgcaccacggcaagcgtgtgggccccatctcggccgtcgccattactgccggcagggaagaaacggaaactgagaccacggccccgacccctccagcgcctgagccccacctcggggagttgacagtggaggaggccacgtcacacaccctgcatctctcctggatggtgactgagggagaatttgactccttcgaaatccagtacacagatagagacgggcaactccaaatggtccgcataggaggtgaccggaatgacatcaccctctctggcctggaatccgaccacagatacctggtgaccctgtatggtttcagtgatgggaagcatgtaggtcctgtccatgtcgaggccctgacagtcccggaggaggagaagccttcagaacctcccaccgcaacccccgagccccccatcaagcctcgcctgggggagctgaccgtgacagatgccacccctgactccctcagcctgtcctggacagttcccgagggacagtttgaccacttcctggtccagtacaggaatggagatgggcagcccaaggcagtgagggtgccagggcacgaggaaggggtcaccatctcgggcctggagccagaccataaatacaagatgaacctgtacggcttccacggtggccagcgcatgggccctgtgtctgtcgtcggggtgacagctgcagaggaagagacccccagccccacagaacccagcatggaggccccggagcccgctgaggagccgctcctgggggagctaacagtgacaggatcctcccctgactcgctgagcctctcctggaccgtcccccagggccgcttcgactccttcaccgtgcagtacaaggacagggacgggcggccccaggtggtgcgtgttgggggcgaggagagtgaagtcaccgtggggggcctggagcctgggcgcaagtacaagatgcacctgtacggcctccacgaggggcggcgcgtgggcccagtgtctgctgtgggcgtcacggcccccgaagaggagtcccctgatgctcctcttgcaaagctgcgcctagggcagatgacagtgagagacatcacctccgactccctcagcctctcctggacagtccccgagggccagtttgaccatttcttggtccagtttaagaatggggatgggcagcccaaggcggtgcgggtgccgggacacgaggatggggtcaccatctcgggcctggagccagaccacaagtacaagatgaacctgtacggcttccacggtggccagcgcgtgggccccgtgtctgctgttggtttaactgccccaggaaaggatgaagaaatggccccagcctcgacagaacctcccacccctgaaccccccatcaagcctcgcctggaggagctgaccgtgacagatgcgacccctgactccctcagcctgtcctggacggttcccgagggacagtttgaccacttcctggtccagtacaagaatggggatgggcagcccaaggcaacacgggtgccaggacatgaggacagggtcaccatctccggcctggagccagacaacaagtacaagatgaacctgtacggcttccacggtggccagcgtgtgggccccgtgtctgccatcggggtgacagctgcagaggaagagacccccagccccacagaacccagcatggaggccccggagccccctgaggagccgctcctgggggagctgacagtgacaggatcctcccctgactcgctgagcctctcctggaccgtcccccagggccgcttcgactccttcaccgtgcagtacaaggacagggacgggcggccccaggtggtgcgtgttgggggcgaggagagcgaggtcaccgtggggggcctggagcctgggcgcaaatacaagatgcacctgtacggcctccacgaggggcggcgcgtgggcccggtgtccaccgtgggcgtgactgccccacaagaggatgtggacgagacccccagccctacagaaccaggcacagaggccccagagccccccgaggagcctctcctgggggagctgacagtgacaggatcctcccctgactcgctgagcctttcctggaccgtcccccagggccgctttgactccttcaccgtgcagtacaaggacagggacgggcggccccaggcggtgcgtgttgggggccaggagagcaaggtcactgtgaggggcctggagcctgggcgcaagtacaagatgcacctgtacggcctccacgaggggcggcgcctgggcccggtgtctgccgtgggcgtcacagaggatgaagccgagaccacccaagcagtgcctaccatgacccctgagccccccatcaagcctcgcctgggggagctgaccatgacagatgccacccctgactccctcagcctgtcctggacggttcccgagggccagtttgaccacttcctggtccagtacaggaatggggatgggcagcccaaggcggtgcgggtgccggggcacgaggacggggtcaccatctcaggcctggagccagaccataaatacaagatgaacctgtacggcttccacggtggccagcgcgtgggccccatctctgtcattggggtgacggctgcagaggaagagacccccagccccacggaactcagcactgaggccccggagccccctgaggagccgctcctgggggagctgacagtgacaggatcctcccctgactcgctgagcctctcctggaccatcccccagggccacttcgactccttcaccgtgcagtacaaggacagggacgggcggccccaggtgatgcgtgtcaggggcgaggagagcgaggtcaccgtggggggcctggagcccgggcgcaaatacaagatgcacctgtacggcctccacgaggggcggcgtgtgggcccggtgtccaccgtgggtgtgacagaggatgaagcagagaccacccaagcagtgcccaccacaacccctgagccccccaacaagcctcgcctcggggagctgaccgtgacagatgccacccctgactccctcagcctgtcctggatggtccccgagggccagtttgaccacttcctggtccagtacaggaatggggatgggcagcccaaggtggtgcgggtgccggggcacgaggacggggtcaccatctcaggcctggagccagaccacaagtacaagatgaacctgtacggcttccacggtggccagcgcgtgggccccatctctgtcattggggtgacagctgcagaggaagaaactcccgcccccacagaacccagcacggaggccccggagccccctgaggagccgctcctgggggagctgacagtgacaggatcctcccctgactcgctgagcctctcctggaccatcccccagggccgcttcgactccttcactgtgcagtacaaggacagggacgggcggccccaggtggtgcgtgtcaggggcgaggagagcgaggtcaccgtggggggcctggagcccgggtgcaaatacaagatgcacctgtacggcctccacgaggggcagcgcgtgggcccagtgtccgctgtgggtgtgacagctccaaaggatgaagccgagaccacccaagcagtgcctaccatgacccctgagccccccatcaagcctcgcctgggggagctgaccgtgacagatgccacccccgactccctcagcctgtcctggatggttcccgagggccagtttgaccacttcctggtccagtacaggaatggggatgggcagcccaaggcggtgcgggtgccggggcacgaggacggggtcaccatctcaggcctggagccagaccataaatacaagatgaacctgtacggcttccacggtggccagcgcgtaggccctgtgtctgccattggggtgacggaggaagagacccccagccccacagaacccagcactgaggccccggaggcccctgaggagccgctcctgggggagttgacagtgacaggatcctcccctgactcgctgagcctctcctggaccgtcccccagggccgcttcgactccttcaccgtgcagtacaaggacagggacgggcagccccaggtggtgcgtgtcaggggcgaggagagcgaggtcaccgtggggggcctggagcccgggcgcaaatacaagatgcatctgtacggcctccacgaggggcagcgcgtgggcccagtgtccaccgtgggcatcacggcgcccctgcccacaccactgccggtggagccccgcctgggggagctggcggtggcggccgtgacctcggactcagtgggcctctcatggacggtggcccagggcccctttgactccttcctggtacagtacagggacgcgcaggggcagccccaggcagtgcctgtgagcggagacctccgagcggtcgccgtctcggggctggacccggcccgcaagtacaagttcctgctctttggactccagaatgggaaacgccacggcccagtccctgtggaggccaggaccgccccagacaccaaaccgtctccccgcctgggggagctgactgtgacagatgcgacccctgactccgtgggcctctcgtggacggtccctgagggcgaattcgactccttcgtggtccagtacaaggataaggatggtcggctccaggtggtgccggtggcagccaaccagcgggaggtcacagtccagggcctggagcccagtaggaaatacaggttcctgctctatggtctgtcaggcaggaaacgactgggccccatctctgctgacagcaccacagctcccctggagaaggagctacctccccacctgggggaactgaccgtggctgaggagacctccagctctctgcgcctgtcctggacggtagcccagggcccctttgactccttcgtggtccagtacagggacacggacgggcagcccagggcagtgcctgtggccgcagaccagcgcacagtcaccgtagaggacctggagcctggcaagaaatacaagtttctgctctacgggctccttgggggaaagcgcctgggcccggtctctgccctgggaatgacagccccagaagaggacacaccagccccagagttagccccagaggcccctgagcctcctgaagagccccgcctaggagtgctgaccgtgaccgacacaaccccagactccatgcgcctctcgtggagcgtggcccagggcccctttgattccttcgtggtccagtatgaggacacgaacgggcagccccaggccttgctcgtggacggcgaccagagcaagatcctcatctcaggcctggagcccagcaccccctacaggttcctcctctatggcctccatgaagggaagcgcctggggcccctctcagctgagggcaccacagggctggctcctgctggtcagacctcagaggagtcaaggccccgcctgtcccagctgtctgtgactgacgtgaccaccagttcactgaggctcaactgggaggccccaccgggggccttcgactccttcctgctccgctttggggttccatcaccaagcacactggagccgcatccgcgtccactgctgcagcgcgagctgatggtgccggggacgcggcactcggccgtgctccgggacctgcgttccgggactctgtacagcctgacactgtatgggctgcgaggaccccacaaggccgacagcatccagggaaccgcccgcaccctcagcccagttctggagagcccccgtgacctccaattcagtgaaatcagggagacctcagccaaggtcaactggatgcccccaccatcccgggcggacagcttcaaagtctcctaccagctggcggacggaggggagcctcagagtgtgcaggtggatggccaggcccggacccagaaactccaggggctgatcccaggcgctcgctatgaggtgaccgtggtctcggtccgaggctttgaggagagtgagcctctcacaggcttcctcaccacggttcctgacggtcccacacagttgcgtgcactgaacttgaccgagggattcgccgtgctgcactggaagcccccccagaatcctgtagacacctatgacatccaggtcacagcccctggggccccgcctctgcaggcggagaccccaggcagcgcggtggactaccccctgcatgaccttgtcctccacaccaactacaccgccacagtgcgtggcctgcggggccccaacctcacttccccagccagcatcaccttcaccacagggctagaggcccctcgggacttggaggccaaggaagtgaccccccgcaccgccctgctcacttggactgagcccccagtccggcccgcaggctacctgctcagcttccacacccctggtggacagacccaggagatcctgctcccaggagggatcacatctcaccagctccttggcctctttccctccacctcctacaatgcacggctccaggccatgtggggccagagcctcctgccgcccgtgtccacctctttcaccacgggtgggctgcggatccccttccccagggactgcggggaggagatgcagaacggagccggtgcctccaggaccagcaccatcttcctcaacggcaaccgcgagcggcccctgatcgtgttttgcgacatggagactgatgggggcggctggctggtgttccagcgccgcatggatggacagacagacttctggagggactgggaggactatgcccatggttttgggaacatctctggagagttctggctgggcaatgaggccctgcacagcctgacacaggcaggtgactactccatgcgcgtggacctgcgggctggggacgaggctgtgttcgcccagtacgactccttccacgtagactcggctgcggagtactaccgcctccacttggagggctaccacggcaccgcaggggactccatgagctaccacagcggcagtgtcttctctgcccgtgatcgggaccccaacagcttgctcatctcctgcgctgtctcctaccgaggggcctggtggtacaggaactgccactacgccaacctcaacgggctctacgggagcacagtggaccatcagggagtgagctggtaccactggaagggcttcgagttctcggtgcccttcacggaaatgaagctgagaccaagaaactttcgctccccagcggggggaggctgagctgctgcccacctctctcgcaccccagtatgactgccgagcactgaggggtcgccccgagagaagagccagggtccttcaccacccagccgctggaggaagccttctctgccagcgatctcgcagcactgtgtttacaggggggaggggaggggttcgtacgggagcaataaaggagaaactgaggtacccgg

SEQ ID NO: 201562 - DNA, 13125 bp, Artificial Sequence
  derived and/or modified sequence
tcctccccttctcctcccctgctcgctgcagactccctcctcactgtcgctgccgagatccacagtcggttgtggctcagcccctgttgcaggggacaagtgagggagacttccctgtcctgccctgagacgccgccctcccggggttggggacagagcaggtgcagaggcactgcagctgctcggttgcccagcctcctgaatgatgccagcccagtatgctctaacctccagcctggttctcctggtgctgctgagcacagccagagcaggccccttctcttcacggtccaatgtgacactgccagccccccggccccctccccagccagggggccacacagtgggggctggagtgggaagcccctcttctcagctttacgagcacacagtggaaggaggggagaagcaggtggtattcacccaccgcattaacctgcccccttccactggctgtggctgtcccccaggcaccgagcccccagtccttgcttcagaggtacaggccctgagggtccgtctagagatcctggaggagttggtgaaggggctcaaggaacagtgcactgggggatgttgtcctgcctctgcccaagctggcacaggtcagacagatgtgcggaccctctgcagtctccatggtgtgtttgatctgagccgctgcacctgttcctgtgagccaggctggggtgggcccacctgctcagaccccacagatgctgagatccctccctcttccccaccctcagcctcggggtcctgcccagatgactgcaatgatcagggtcgctgtgtccgtggtcgttgcgtgtgctttcccggctacactggccccagctgtggctggccatcctgtcccggggactgccaaggccgtgggcgctgcgtgcagggcgtgtgtgtgtgccgggcaggcttctcaggccccgactgcagccagcgctcctgccctcgaggttgcagccagaggggacgctgtgagggtgggcgctgcgtgtgtgacccaggctacactggtgacgactgtggcatgaggagctgccctcgcggttgcagtcagagggggcgctgtgagaatgggcgctgcgtgtgtaaccccggctacgctggcgaggactgtggggtgaggagctgccctcggggctgcagccagcggggacgctgcaaggacgggcgctgcgtgtgtgaccccggctacactggcgaggactgtggtacgcggagctgcccctgggactgtggcgagggcgggcgctgcgtggacggccgctgcgtgtgctggcccgggtacacaggcgaggactgcagcacgcggacatgtccgagggactgccggggccgcgggcgctgcgaggacggcgaatgcatttgcgacacgggctacagcggggacgactgcggcgtgcgcagctgccctggcgactgcaaccaaaggggccgctgcgaggacggccgctgcgtgtgctggccggggtacactggaaccgattgcggctcgcgcgcctgcccacgcgactgtagaggtcgcgggcgctgcgagaacggcgtgtgtgtttgcaatgcgggctacagcggcgaggactgcggtgtgcgcagctgtcctggggactgtcgtggccggggccgctgtgagagtggccgctgcatgtgttggccggggtacacaggccgggactgcggcacgcgcgcctgtcctggcgactgtcgcgggcgcgggcgctgcgtggatggccgctgcgtgtgcaacccgggcttcaccggtgaggactgtgggagccgtcgctgtcccggggactgccgtgggcacggcctttgcgaggatggcgtgtgcgtgtgtgacgcaggctactcaggggaagactgcagcacgcgcagctgccccgggggctgccgaggccgcggccagtgcctagatgggcggtgtgtgtgcgaggacggctactctggcgaggattgcggtgtgaggcagtgcccgaatgactgcagccagcacggcgtgtgccaggacggtgtgtgcatctgttgggaaggctacgtgagtgaggactgcagcatccgcacctgcccctccaactgccacgggaggggccgctgtgaggaagggcgctgcctgtgcgacccaggctacaccggccctacctgtgccacccgcatgtgcccggctgactgccggggacgtgggcggtgtgtgcaaggagtgtgcctgtgccacgtgggctatggcggtgaggactgcgggcaggaagagcctccagccagcgcctgccctggaggctgcgggccccgggaactgtgccgggcaggccagtgtgtgtgtgtagagggcttccgaggccctgactgtgccatccagacatgcccaggggactgccgtggccgaggagagtgtcacgatggcagctgtgtctgcaaagatgggtatgctggcgaagactgcggagaagaggtgccaaccattgagggcatgaggatgcatctcttggaggagacaacagttcggacagagtggaccccggctcctggccccgtggatgcctatgaaattcagttcatccccacgacagagggggcgagccccccattcacagcacgggttccaagctctgcctcagcctatgaccagagaggactggcccctggacaggagtaccaggtcactgtccgagcccttcgagggaccagctggggccttcctgcctccaagaccatcaccaccatgatcgatgggccccaggacctccgagtggtggctgtgacaccgacaacactggagcttggctggctgcgtccccaggctgaggtggaccgatttgtggtgtcctacgtcagtgccggcaaccagagggtgaggctggaagtgccccctgaagcagacgggacgctgctgactgacctgatgccaggcgtagaatatgtggtgactgtcacagcggagcggggccgggcagtcagctacccagcttctgtcagggccaacacagggtcctcacccttgggcctcttggggactaccgatgagcctcctccctcaggcccctcgacgacgcaaggggcccaggctcctctcctgcagcagcgcccccaggagctgggagagttgagggtgctgggcagagatgagacagggcgcctccgtgtggtctggaccgcccagcctgacacctttgcctacttccaactgcgcatgcgggtgcccgaggggccgggggcacatgaggaagtgctgccaggggacgtccgccaggctctggtgcctccaccccctcctggaaccccgtatgagctgtcacttcatggggtccctcctgggggcaagccctctgaccccatcatctaccaaggcattatggacaaggatgaggagaagcctgggaagtcctcaggcccaccacgcctgggtgagctgacggtgacagacaggacctccgactccttgctcctgcgctggacggtccccgagggcgagtttgactccttcgtgatccagtacaaagacagggacgggcagccccaggtggtgcccgtggaaggaccccagcgctcggccgtcatcacctccctggatcctggccgcaagtacaaatttgtcctgtatgggtttgttggcaagaagaggcatggtccgctggtggctgaagccaagatcttgcctcagagtgacccaagtccagggactccaccccacctgggaaacctgtgggtgacagaccctaccccagattcactgcacctctcctggactgtccctgagggccagtttgacaccttcatggtccagtacagggacagggatggacggccccaggtggtacctgtggaagggcccgagcgttcatttgttgtctcctcactggaccctgaccacaagtacagattcactctgtttggaattgcgaacaagaagcggtatggccccctcacggccgatggcaccactgctccagagaggaaagaggagcccccccgccctgagttcctggagcagcccctcctgggggaactgacagtgaccggcgtgaccccagactccttgcgtctctcatggacagtggcccagggccccttcgactcattcatggtccagtacaaggatgcacaggggcagccccaggcagtgcctgttgcgggggatgagaatgaggttactgtccccggcctggatcccgaccggaagtataagatgaacctctacgggcttcgtggcaggcagcgtgtggggcccgagtctgtggtggccaagactgctcctcaggaggatgtggacgagacccccagccccacagaactgggcacggaggccccggagtcccccgaggagccgctcctgggggagctgacagtgacaggatcctcccctgattcgctgagcctcttctggaccgtcccccagggcagcttcgactctttcaccgtgcagtacaaggacagggatgggcggccccgggcggtgcgtgttgggggcaaggagagtgaggtcaccgtgggaggcctagagcccgggcacaagtacaagatgcacctgtacggcctccacgaggggcagcgcgtgggcccggtgtccgccgtgggcgtgacagccccacaacaagaagagacccctccagccactgagtccccgctggagccacgcctaggagagctgacagtgacagatgtgacccccaactctgtgggcctctcctggacagtccccgagggccagtttgactccttcatagtccagtacaaggacaaggacgggcagccccaggtggtgccggtggcggcagaccagcgagaggtcacagtctacaacctggagcctgagagaaaatataagatgaacatgtatggactacatgatgggcaacgcatgggccccctgtctgtggtcatcgtgacggctcccctcccaccagccccagccacagaggcctccaagcctcccctggagccacgcctaggggagctgacagtgacggatataacccctgactctgtgggcctctcatggacagtccctgagggtgaattcgactcctttgtggttcagtacaaggacagggacgggcagccccaggtggtgcccgtggctgcagatcagcgggaggtcactatccctgacctggaaccctcccgcaagtacaagttcctgctctttgggatccaggatgggaaacgacgcagcccagtctctgtggaggcaaagacggttgcccgaggtgacgccagcccaggggccccaccccgccttggggagctgtgggtgacagaccccaccccagactcactgcgcctctcctggacggttcctgagggccagttcgactcttttgtggtccagttcaaggacaaagacgggccccaggtggtgcccgtggagggccatgagcgctctgtcactgtcacccctctggatgccggccgcaagtacagattcctcctctatggcctcctgggcaagaagcgccatggccctctcactgccgacggcaccacggaagcccggagtgctatggatgatactggaacaaagcgtcccccaaaaccccgtctgggggaggagctgcaggtgaccaccgtgacccagaactccgtgggcctctcctggacagtccctgagggccagtttgactcctttgtggtccagtacaaagacagggacgggcagccccaggtggtgcccgtggagggcagcctcagggaggtcagcgtgccgggcctggaccctgcccacaggtacaagctgctgctctacgggctgcaccacggcaagcgtgtgggccccatctcggccgtcgccattactgccggcagggaagaaacggaaactgagaccacggccccgacccctccagcgcctgagccccacctcggggagttgacagtggaggaggccacgtcacacaccctgcatctctcctggatggtgactgagggagaatttgactccttcgaaatccagtacacagatagagacgggcaactccaaatggtccgcataggaggtgaccggaatgacatcaccctctctggcctggaatccgaccacagatacctggtgaccctgtatggtttcagtgatgggaagcatgtaggtcctgtccatgtcgaggccctgacagtcccggaggaggagaagccttcagaacctcccaccgcaacccccgagccccccatcaagcctcgcctgggggagctgaccgtgacagatgccacccctgactccctcagcctgtcctggacagttcccgagggacagtttgaccacttcctggtccagtacaggaatggagatgggcagcccaaggcagtgagggtgccagggcacgaggaaggggtcaccatctcgggcctggagccagaccataaatacaagatgaacctgtacggcttccacggtggccagcgcatgggccctgtgtctgtcgtcggggtgacagctgcagaggaagagacccccagccccacagaacccagcatggaggccccggagcccgctgaggagccactcctgggggagctaacagtgacaggatcctcccctgactcgctgagcctctcctggaccgtcccccagggccgcttcgactccttcaccgtgcagtacaaggacagggacgggcggccccaggtggtgcgtgttgggggcgaggagagtgaagtcaccgtggggggcctggagcctgggcgcaagtacaagatgcacctgtacggcctccacgaggggcggcgcgtgggcccagtgtctgctgtgggcgtcacggcccccgaagaggagtcccctgatgctcctcttgcaaagctgcgcctagggcagatgacagtgagagacatcacctccgactccctcagcctctcctggacagtccccgagggccagtttgaccatttcttggtccagtttaagaatggggacgggcagcccaaggcggtgcgggtgccgggacacgaggatggggtcaccatctcgggcctggagccagaccacaagtacaagatgaacctgtacggcttccacggtggccagcgcgtgggccccgtgtctgctgttggtttaactgccccaggaaaggatgaagaaatggccccagcctcgacagaacctcccacccctgaaccccccatcaagcctcgcctggaggagctgaccgtgacagatgcgacccctgactccctcagcctgtcctggacggttcccgagggacagtttgaccacttcctggtccagtacaagaatggggatgggcagcccaaggcaacacgggtgccaggacatgaggacagggtcaccatctccggcctggagccagacaacaagtacaagatgaacctgtacggcttccacggtggccagcgtgtgggccccgtgtctgccatcggggtgacagctgcagaggaagagacccccagccccacagaacccagcatggaggccccggagccccctgaggagccgctcctgggggagctaacagtgacaggatcctcccctgactcgctgagcctctcctggaccgtcccccagggccgcttcgactccttcaccgtgcagtacaaggacagggacgggcggccccaggtggtgcgtgttgggggcgaggagagcgaggtcaccgtggggggcctggagcctgggcgcaaatacaagatgcacctgtacggcctccacgaggggcggcgtgtgggcccggtgtccaccgtgggcgtgactgccccacaagaggatgtggacgagacccccagccctacagaaccaggcacagaggccccagagccccccgaggagcctctcctgggggagctgacagtgacaggatcctcccctgactcgctgagcctttcctggaccgtcccccagggccgctttgactccttcaccgtgcagtacaaggacagggacgggcggccccaggcggtgcgtgttgggggccaggagagcaaggtcactgtgaggggcctggagcctgggcgcaagtacaagatgcacctgtacggcctccacgaggggcggcgcctaggcccggtgtctgccgtgggcgtcacagaggatgaagccgagaccacccaagcagtgcctaccatgacccctgagccccccatcaagcctcgcctgggggagctgaccatgacagatgccacccctgactccctcagcctgtcctggacggttcccgagggccagtttgaccacttcctggtccagtacaggaatggggatgggcagcccaaggcggtgcgggtgccggggcacgaggacggggtcaccatctcaggcctggagccagaccataaatacaagatgaacctgtacggcttccacggtggccagcgcgtgggccccatctctgtcattggggtgacggctgcagaggaagagacccccagccccacggaactcagcactgaggccccggagccccctgaggagccgctcctgggggagctgacagtgacaggatcctcccctgactcgctgagcctctcctggaccatcccccagggccacttcgactccttcaccgtgcagtacaaggacagggacgggcggccccaggtgatgcgtgtcaggggcgaggagagcgaggtcaccgtggggggcctggagcccgggcgcaaatacaagatgcacctgtacggcctccacgaggggcggcgtgtgggcccggtgtccaccgtgggtgtgacagaggatgaagcagagaccacccaagcagtgcccaccacaacccctgagccccccaacaagcctcgcctcggggagctgaccgtgacagatgccacccctgactccctcagcctgtcctggatggtccccgagggccagtttgaccacttcctggtccagtacaggaatggggatgggcagcccaaggtggtgcgggtgccggggcacgaggacggggtcaccatctcaggcctggagccagaccacaagtacaagatgaacctgtacggcttccacggtggccagcgcgtgggccccatctctgtcattggggtgacagctgcagaggaagaaactcccgcccccacagaacccagcacggaggccccggagccccctgaggagccgctcctgggggagctgacagtgacaggatcctcccctgactcgctgagcctctcctggaccatcccccagggccgcttcgactccttcactgtgcagtacaaggacagggacgggcggccccaggtggtgcgtgtcaggggcgaggagagcgaggtcaccgtggggggcctggagcccgggtgcaaatacaagatgcacctgtacggcctccacgaggggcagcgcgtgggcccagtgtccgctgtgggtgtgacagctccaaaggatgaagccgagaccacccaagcagtgcctaccatgacccctgagccccccatcaagcctcgcctgggggagctgaccgtgacagatgccacccccgactccctcagcctgtcctggatggttcccgagggccagtttgaccacttcctggtccagtacaggaatggggatgggcagcccaaggcggtgcgggtgccggggcacgaggacggggtcaccatctcaggcctggagccagaccataaatacaagatgaacctgtacggcttccacggtggccagcgcgtaggccctgtgtctgccattggggtgacggaggaagagacccccagccccacagaacccagcactgaggccccggaggcccctgaggagccgctcctgggggagttgacagtgacaggatcctcccctgactcgctgagcctctcctggaccgtcccccagggccgcttcgactccttcaccgtgcagtacaaggacagggacgggcagccccaggtggtgcgtgtcaggggcgaggagagcgaggtcaccgtggggggcctggagcccgggcgcaaatacaagatgcatctgtacggcctccacgaggggcagcgcgtgggcccagtgtccaccgtgggcatcacggcgcccctgcccacaccactgccggtggagccccgcctgggggagctggcggtggcggccgtgacctcggactcagtgggcctctcatggacggtggcccagggcccctttgactccttcctggtacagtacagggacgcgcaggggcagccccaggcagtgcctgtgagcggagacctccgagcggtcgccgtctcggggctggacccggcccgcaagtacaagttcctgctctttggactccagaatgggaaacgccacggcccagtccctgtggaggccaggaccgccccagacaccaaaccgtctccccgcctgggggagctgactgtgacagatgcgacccctgactccgtgggcctctcgtggacggtccctgagggcgaattcgactccttcgtggtccagtacaaggataaggatggtcggctccaggtggtgccggtggcagccaaccagcgggaggtcacagtccagggcctggagcccagtaggaaatacaggttcctgctctatggtctgtcaggcaggaaacgactgggccccatctctgctgacagcaccacagctcccctggagaaggagctacctccccacctgggggaactgaccgtggctgaggagacctccagctctctgcgcctgtcctggacggtagcccagggcccctttgactccttcgtggtccagtacagggacacggacgggcagcccagggcagtgcctgtggccgcagaccagcgcacagtcaccgtagaggacctggagcctggcaagaaatacaagtttctgctctacgggctccttgggggaaagcgcctgggcccggtctctgccctgggaatgacagccccagaagaggacacaccagccccagagttagccccagaggcccctgagcctcctgaagagccccgcctaggagtgctgaccgtgaccgacacaaccccagactccatgcgcctctcgtggagcgtggcccagggcccctttgattccttcgtggtccagtatgaggacacgaacgggcagccccaggccttgctcgtggacggcgaccagagcaagatcctcatctcaggcctggagcccagcaccccctacaggttcctcctctatggcctccatgaagggaagcgcctggggcccctctcagctgagggcaccacagggctggctcctgctggtcagacctcagaggagtcaaggccccgcctgtcccagctgtctgtgactgacgtgaccaccagttcactgaggctcaactgggaggccccaccgggggccttcgactccttcctgctccgctttggggttccatcaccaagcactctggagccgcatccgcgtccactgctgcagcgcgagctgatggtgccggggacgcggcactcggccgtgctccgggacctgcgttccgggactctgtacagcctgacactgtatgggctgcgaggaccccacaaggccgacagcatccagggaaccgcccgcaccctcagcccagttctggagagcccccgtgacctccaattcagtgaaatcagggagacctcagccaaggtcaactggatgcccccaccatcccgggcggacagcttcaaagtctcctaccagctggcggacggaggggagcctcagagtgtgcaggtggatggccaggcccggacccagaaactccaggggctgatcccaggcgctcgctatgaggtgaccgtggtctcggtccgaggctttgaggagagtgagcctctcacaggcttcctcaccacggttcctgacggtcccacacagttgcgtgcactgaacttgaccgagggattcgccgtgctgcactggaagcccccccagaatcctgtggacacctatgacgtccaggtcacagcccctggggccccgcctctgcaggcggagaccccaggcagcgcggtggactaccccctgcatgaccttgtcctccacaccaactacaccgccacagtgcgtggcctgcggggccccaacctcacttccccagccagcatcaccttcaccacagggctagaggcccctcgggacttggaggccaaggaagtgaccccccgcaccgccctgctcacttggactgagcccccagtccggcccgcaggctacctgctcagcttccacacccctggtggacagaaccaggagatcctgctcccaggagggatcacatctcaccagctccttggcctctttccctccacctcctacaatgcacggctccaggccatgtggggccagagcctcctgccgcccgtgtccacctctttcaccacgggtgggctgcggatccccttccccagggactgcggggaggagatgcagaacggagccggtgcctccaggaccagcaccatcttcctcaacggcaaccgcgagcggcccctgaacgtgttttgcgacatggagactgatgggggcggctggctggtgttccagcgccgcatggatggacagacagacttctggagggactgggaggactatgcccatggttttgggaacatctctggagagttctggctgggcaatgaggccctgcacagcctgacacaggcaggtgactactccatgcgcgtggacctgcgggctggggacgaggctgtgttcgcccagtacgactccttccacgtagactcggctgcggagtactaccgcctccacttggagggctaccacggcaccgcaggggactccatgagctaccacagcggcagtgtcttctctgcccgtgatcgggaccccaacagcttgctcatctcctgcgctgtctcctaccgaggggcctggtggtacaggaactgccactacgccaacctcaacgggctctacgggagcacagtggaccatcagggagtgagctggtaccactggaagggcttcgagttctcggtgcccttcacggaaatgaagctgagaccaagaaactttcgctccccagcggggggaggctgagctgctgcccacctctctcgcaccccagtatgactgccgagcactgaggggtcgccccgagagaagagccagggtccttcaccacccagccgctggaggaagccttctctgccagcgatctcgcagcactgtgtttacaggggggaggggaggggttcgtacaggagcaataaaggagaaactgaggtacccgg

SEQ ID NO: 201563 - DNA, 2597 bp, Artificial Sequence
  derived and/or modified sequence
ctctacgggcttcgtggcaggcagcgtgtggggcccgagtctgtggtggccaagactgctcctcaggaggatgtggacgagacccccagccccacagaactgggcacggaggccccggagtcccccgaggagccgctcctgggggagctgacagtgacaggatcctcccctgattcgctgagcctcttctggaccgtcccccagggcagcttcgactctttcaccgtgcagtacaaggacagggatgggcggccccaggcggtgcgtgttgggggcaaggagagtgaggtcaccgtgggaggcctagagcccgggcacaagtacaagatgcacctgtacggcctccacgaggggcagcgcgtgggcccggtgtccgccgtgggcgtgacagccccacaacaagaagagacccctccagccactgagtccccgctggagccacgcctaggagagctgacagtgacagatgtgacccccaactctgtgggcctctcctggacagtccccgagggccagtttgactccttcatagtccagtacaaggacaaggacgggcagccccaggtggtgccggtggcggcagaccagcgagaggtcacagtctacaacctggagcctgagagaaaatataagatgaacatgtatggactacatgatgggcaacgcatgggccccctgtctgtggtcatcgtgacggctcccctcccaccagccccagccacagaggcctccaagcctcccctggagccacgcctaggggagctgacagtgacggatataacccctgactctgtgggcctctcatggacagtccctgagggtgaattcgactcctttgtggttcagtacaaggacagggacgggcagccccaggtggtgcccgtggctgcagatcagcgggaggtcactatccctgacctggaaccctcccgcaagtacaagttcctgctctttgggatccaggatgggaaacgacgcagcccagtctctgtggaggcaaagacggttgcccgaggtgacgccagcccaggggccccaccccgccttggggagctgtgggtgacagaccccaccccagactcactgcgcctctcctggacggttcctgagggccagttcgactcttttgtggtccagttcaaggacaaagacgggccccaggtggtgcccgtggagggccatgagcgctctgtcactgtcacccctctggatgccggccgcaagtacagattcctcctctatggcctcctgggcaagaagcgccatggccctctcactgccgacggcaccacggaagcccggagtgctatggatgatactggaacaaagcgtcccccaaaaccccgtctgggggaggagctgcaggtgaccaccgtgacccagaactccgtgggcctctcctggacagtccctgagggccagtttgactcctttgtggtccagtacaaagacagggacgggcagccccaggtggtgcccgtggagggcagcctcagggaggtcagcgtgccgggcctggaccctgcccacaggtacaagctgctgctctacgggctgcaccacggcaagcgtgtgggccccatctcggccgtcgccattactgccggcagggaagaaacggaaactgagaccacggccccgacccctccagcgcctgagccccacctcggggagttgacagtggaggaggccacgtcacacaccctgcatctctcctggatggtgactgagggagaatttgactccttcgaaatccagtacacagatagagacgggcaactccaaatggtccgcataggaggtgaccggaatgacatcaccctctctggcctggaatccgaccacagatacctggtgaccctgtatggtttcagtgatgggaagcatgtaggtcctgtccatgtcgaggccctgacagtcccggaggaggagaagccttcagaacctcccaccgcaacccccgagccccccatcaagcctcgcctgggggagctgaccgtgacagatgccacccctgactccctcagcctgtcctggacagttcccgagggacagtttgaccacttcctggtccagtacaggaatggagatgggcagcccaaggcagtgagggtgccagggcacgaggaaggggtcaccatctcgggcctggagccagaccataaatacaagatgaacctgtacggcttccacggtggccagcgcatgggccctgtgtctgtcgtcggggtgacagctgcagaggaagagacccccagccccacagaacccagcatggaggccccggagcccgctgaggagccgctcctgggggagctaacagtgacaggatcctcccctgactcgctgagcctctcctggaccgtcccccagggccgcttcgactccttcaccgtgcagtacaaggacagggacgggcggccccaggtggtgcgtgttgggggcgaggagagtgaagtcaccgtggggggcctggagcctgggcgcaagtacaagatgcacctgtacggcctccacgaggggcggcgcgtgggcccagtgtctgctgtgggcgtcacggcccccgaagaggagtcccctgatgctcctcttgcaaa

SEQ ID NO: 201564 - DNA, 13125 bp, Artificial Sequence
  derived and/or modified sequence
tcctccccttctcctcccctgctcgctgcagactccctcctcactgtcgctgccgagatccacagtcggttgtggctcagcccctgttgcaggggacaagtgagggagacttccctgtcctgccctgagacgccgccctcccggggttggggacagagcaggtgcagaggcactgcagctgctcggttgcccagcctcctgaatgatgccagcccagtatgctctaacctccagcctggttctcctggtgctgctgagcacagccagagcaggccccttctcttcacggtccaatgtgacactgccagccccccggccccctccccagccagggggccacacagtgggggctggagtgggaagcccctcttctcagctttacgagcacacagtggaaggaggggagaagcaggtggtattcacccaccgcattaacctgcccccttccactggctgtggctgtcccccaggcaccgagcccccagtccttgcttcagaggtacaggccctgagggtccgtctagagatcctggaggagttggtgaaggggctcaaggaacagtgcactgggggatgttgtcctgcctctgcccaagctggcacaggtcagacagatgtgcggaccctctgcagtctccatggtgtgtttgatctgagccgctgcacctgttcctgtgagccaggctggggtgggcccacctgctcagaccccacagatgctgagatccctccctcttccccaccctcagcctcggggtcctgcccagatgactgcaatgatcagggtcgctgtgtccgtggtcgttgcgtgtgctttcccggctacactggccccagctgtggctggccatcctgtcccggggactgccaaggccgtgggcgctgcgtgcagggcgtgtgtgtgtgccgggcaggcttctcaggccccgactgcagccagcgctcctgccctcgaggttgcagccagaggggacgctgtgagggtgggcgctgcgtgtgtgacccaggctacactggtgacgactgtggcatgaggagctgccctcgcggttgcagtcagagggggcgctgtgagaatgggcgctgcgtgtgtaaccccggctacactggcgaggactgtggggtgaggagctgccctcggggctgcagccagcggggacgctgcaaggacgggcgctgcgtgtgtgaccccggctacactggcgaggactgtggtacgcggagctgcccctgggactgtggcgagggcgggcgctgcgtggacggccgctgcgtgtgctggcccgggtacacaggcgaggactgcagcacgcggacatgtccgagggactgccggggccgcgggcgctgcgaggacggcgaatgcatttgcgacacgggctacagcggggacgactgcggcgtgcgcagctgccctggcgactgcaaccaaaggggccgctgcgaggacggccgctgcgtgtgctggccggggtacactggaaccgattgcggctcgcgcgcctgcccacgcgactgtagaggtcgcgggcgctgcgagaacggcgtgtgtgtttgcaatgcgggctacagcggcgaggactgcggtgtgcgcagctgtcctggggactgtcgtggccggggccgctgtgagagtggccgctgcatgtgttggccggggtacacaggccgggactgcggcacgcgcgcctgtcctggcgactgtcgcgggcgcgggcgctgcgtggatggccgctgcgtgtgcaacccgggcttcaccggtgaggactgtgggagccgtcgctgtcccggggactgccgtgggcacggcctttgcgaggatggcgtgtgcgtgtgtgacgcaggctactcaggggaagactgcagcacgcgcagctgccccgggggctgccgaggccgcggccagtgcctagatgggcggtgtgtgtgcgaggacggctactctggcgaggattgcggtgtgaggcagtgcccgaatgactgcagccagcacggcgtgtgccaggacggtgtgtgcatctgttgggaaggctacgtgagtgaggactgcagcatccgcacctgcccctccaactgccacgggaggggccgctgtgaggaagggcgctgcctgtgcgacccaggctacaccggccctacctgtgccacccgcatgtgcccggctgactgccggggacgtgggcggtgtgtgcaaggagtgtgcctgtgccacgtgggctatggcggtgaggactgcgggcaggaagagcctccagccagcgcctgccctggaggctgcgggccccgggaactgtgccgggcaggccagtgtgtgtgtgtagagggcttccgaggccctgactgtgccatccagacatgcccaggggactgccgtggccgaggagagtgtcacgatggcagctgtgtctgcaaagatgggtatgctggcgaagactgcggagaagaggtgccaaccattgagggcatgaggatgcatctcttggaggagacaacagttcggacagagtggaccccggctcctggccccgtggatgcctatgaaattcagttcatccccacgacagagggggcgagccccccattcacagcacgggttccaagctctgcctcagcctatgaccagagaggactggcccctggacaggagtaccaggtcactgtccgagcccttcgagggaccagctggggccttcctgcctccaagaccatcaccaccatgatcgatgggccccaggacctccgagtggtggctgtgacaccgacaacactggagcttggctggctgcgtccccaggctgaggtggaccgatttgtggtgtcctacgtcagtgccggcaaccagagggtgaggctggaagtgccccctgaagcagacgggacgctgctgactgacctgatgccaggcgtagaatatgtggtgactgtcacagcggagcggggccgggcagtcagctacccagcttctgtcagggccaacacagggtcctcacccttgggcctcttggggactaccgatgagcctcctccctcaggcccctcgacgacgcaaggggcccaggctcctctcctgcagcagcgcccccaggagctgggagagttgagggtgctgggcagagatgagacagggcgcctccgtgtggtctggaccgcccagcctgacacctttgcctacttccaactgcgcatgcgggtgcccgaggggccgggggcacatgaggaagtgctgccaggggacgtccgccaggctctggtgcctccaccccctcctggaaccccgtatgagctgtcacttcatggggtccctcctgggggcaagccctctgaccccatcatctaccaaggcattatggacaaggatgaggagaagcctgggaagtcctcaggcccaccacgcctgggtgagctgacggtgacagacaggacctccgactccttgctcctgcgctggacggtccccgagggcgagtttgactccttcgtgatccagtacaaagacagggacgggcagccccaggtggtgcccgtggaaggaccccagcgctcggccgtcatcacctccctggatcctggccgcaagtacaaatttgtcctgtatgggtttgttggcaagaagaggcatggtccgctggtggctgaagccaagatcttgcctcagagtgacccaagtccagggactccaccccgcctgggaaacctgtgggtgacagaccctaccccagattcactgcacctctcctggactgtccctgagggccagtttgacaccttcatggtccagtacagggacagggatggacggccccaggtggtacctgtggaagggcccgagcgttcatttgttgtctcctcactggaccctgaccacaagtacagattcactctgtttggaattgcgaacaagaagcggtatggccccctcacggccgatggcaccactgctccagagaggaaagaggagcccccccaccctgagttcctggagcagcccctcctgggggaactgacagtgaccggcgtgaccccagactccttgcgtctctcatggacagtggcccagggccccttcgactcattcatggtccagtacaaggatgcacaggggcagccccaggcagtgcctgttgcgggggatgagaatgaggttactgtccccggcctggatcccgaccggaagtataagatgaacctctacgggcttcgtggcaggcagcgtgtggggcccgagtctgtggtggccaagactgctcctcaggaggatgtggacgagacccccagccccacagaactgggcacggaggccccggagtcccccgaggagccgctcctgggggagctgacagtgacaggatcctcccctgattcgctgagcctcttctggaccgtcccccagggcagcttcgactctttcaccgtgcagtacaaggacagggatgggcggccccgggcggtgcgtgttgggggcaaggagagtgaggtcaccgtgggaggcctagagcccgggcacaagtacaagatgcacctgtacggcctccacgaggggcagcgcgtgggcccggtgtccgccgtgggcgtgacagccccacaacaagaagagacccctccagccactgagtccccgctggagccacgcctaggagagctgacagtgacagatgtgacccccaactctgtgggcctctcctggacagtccccgagggccagtttgactccttcatagtccagtacaaggacaaggacgggcagccccaggtggtgccggtggcggcagaccagcgagaggtcacagtctacaacctggagcctgagagaaaatataagatgaacatgtatggactacatgatgggcaacgcatgggccccctgtctgtggtcatcgtgacggctcccctcccaccagccccagccacagaggcctccaagcctcccctggagccacgcctaggggagctgacagtgacggatataacccctgactctgtgggcctctcatggacagtccctgagggtgaattcgactcctttgtggttcagtacaaggacagggacgggcagccccaggtggtgcccgtggctgcagatcagcgggaggtcactatccctgacctggaaccctcccgcaagtacaagttcctgctctttgggatccaggatgggaaacgacgcagcccagtctctgtggaggcaaagacggttgcccgaggtgacgccagcccaggggccccaccccgccttggggagctgtgggtgacagaccccaccccagactcactgcgcctctcctggacggttcctgagggccagttcgactcttttgtggtccagttcaaggacaaagacgggccccaggtggtgcccgtggagggccatgagcgctctgtcactgtcacccctctggatgccggccgcaagtacagattcctcctctatggcctcctgggcaagaagcgccatggccctctcactgccgacggcaccacggaagcccggagtgctatggatgatactggaacaaagcgtcccccaaaaccccgtctgggggaggagctgcaggtgaccaccgtgacccagaactccgtgggcctctcctggacagtccctgagggccagtttgactcctttgtggtccagtacaaagacagggacgggcagccccaggtggtgcccgtggagggcagcctcagggaggtcagcgtgccgggcctggaccctgcccacaggtacaagctgctgctctacgggctgcaccacggcaagcgtgtgggccccatctcggccgtcgccattactgccggcagggaagaaacggaaactgagaccacggccccgacccctccagcgcctgagccccacctcggggagttgacagtggaggaggccacgtcacacaccctgcatctctcctggatggtgactgagggagaatttgactccttcgaaatccagtacacagatagagacgggcaactccaaatggtccgcataggaggtgaccggaatgacatcaccctctctggcctggaatccgaccacagatacctggtgaccctgtatggtttcagtgatgggaagcatgtaggtcctgtccatgtcgaggccctgacagtcccggaggaggagaagccttcagaacctcccaccgcaacccccgagccccccatcaagcctcgcctgggggagctgaccgtgacagatgccacccctgactccctcagcctgtcctggacagttcccgagggacagtttgaccacttcctggtccagtacaggaatggagatgggcagcccaaggcagtgagggtgccagggcacgaggaaggggtcaccatctcgggcctggagccagaccataaatacaagatgaacctgtacggcttccacggtggccagcgcatgggccctgtgtctgtcgtcggggtgacagctgcagaggaagagacccccagccccacagaacccagcatggaggccccggagcccgctgaggagccgctcctgggggagctaacagtgacaggatcctcccctgactcgctgagcctctcctggaccgtcccccagggccgcttcgactccttcaccgtgcagtacaaggacagggacgggcggccccaggtggtgcgtgttgggggcgaggagagtgaagtcaccgtggggggcctggagcctgggcgcaagtacaagatgcacctgtacggcctccacgaggggcggcgcgtgggcccagtgtctgctgtgggcgtcacggcccccgaagaggagtcccctgatgctcctcttgcaaagctgcgcctagggcagatgacagtgagagacatcacctccgactccctcagcctctcctggacagtccccgagggccagtttgaccatttcttggtccagtttaagaatggggatgggcagcccaaggcggtgcgggtgccgggacacgaggatggggtcaccatctcgggcctggagccagaccacaagtacaagatgaacctgtacggcttccacggtggccagcgcgtgggccccgtgtctgctgttggtttaactgccccaggaaaggatgaagaaatggccccagcctcgacagaacctcccacccctgaaccccccatcaagcctcgcctggaggagctgaccgtgacagatgcgacccctgactccctcagcctgtcctggacggttcccgagggacagtttgaccacttcctggtccagtacaagaatggggatgggcagcccaaggcaacacgggtgccaggacatgaggacagggtcaccatctccggcctggagccagacaacaagtacaagatgaacctgtacggcttccacggtggccagcgtgtgggccccgtgtctgccatcggggtgacagctgcagaggaagagacccccagccccacagaacccagcatggaggccccggagccccctgaggagccgctcctgggggagctgacagtgacaggatcctcccctgactcgctgagcctctcctggaccgtcccccagggccgcttcgactccttcaccgtgcagtacaaggacagggacgggcggccccaggtggtgcgtgttgggggcgaggagagcgaggtcaccgtggggggcctggagcctgggcgcaaatacaagatgcacctgtacggcctccacgaggggcggcgcgtgggcccggtgtccaccgtgggcgtgactgccccacaagaggatgtggacgagacccccagccctacagaaccaggcacagaggccccagagccccccgaggagcctctcctgggggagctgacagtgacaggatcctcccctgactcgctgagcctttcctggaccgtcccccagggccgctttgactccttcaccgtgcagtacaaggacagggatgggcggccccaggcggtgcgtgttgggggccaggagagcaaggtcactgtgaggggcctggagcctgggcgcaagtacaagatgcacctgtacggcctccacgaggggcggcgcctgggcccggtgtctgccgtgggcgtcacagaggatgaagccgagaccacccaagcagtgcctaccatgacccctgagccccccatcaagcctcgcctgggggagctgaccatgacagatgccacccctgactccctcagcctgtcctggacggttcccgagggccagtttgaccacttcctggtccagtacaggaatggggatgggcagcccaaggcggtgcgggtgccggggcacgaggacggggtcaccatctcaggcctggagccagaccataaatacaagatgaacctgtacggcttccacggtggccagcgcgtgggccccatctctgtcattggggtgacggctgcagaggaagagacccccagccccacggaactcagcactgaggccccggagccccctgaggagccgctcctgggggagctgacagtgacaggatcctcccctgactcgctgagcctctcctggaccatcccccagggccacttcgactccttcaccgtgcagtacaaggacagggacgggcggccccaggtgatgcgtgtcaggggcgaggagagcgaggtcaccgtggggggcctggagcccgggcgcaaatacaagatgcacctgtacggcctccacgaggggcggcgtgtgggcccggtgtccaccgtgggtgtgacagaggatgaagcagagaccacccaagcagtgcccaccacaacccctgagccccccaacaagcctcgcctcggggagctgaccgtgacagatgccacccctgactccctcagcctgtcctggatggtccccgagggccagtttgaccacttcctggtccagtacaggaatggggatgggcagcccaaggtggtgcgggtgccggggcacgaggacggggtcaccatctcaggcctggagccagaccacaagtacaagatgaacctgtacggcttccacggtggccagcgcgtgggccccatctctgtcattggggtgacagctgcagaggaagaaactcccgcccccacagaacccagcacggaggccccggagccccctgaggagccgctcctgggggagctgacagtgacaggatcctcccctgactcgctgagcctctcctggaccatcccccagggccgcttcgactccttcactgtgcagtacaaggacagggacgggcggccccaggtggtgcgtgtcaggggcgaggagagcgaggtcaccgtggggggcctggagcccgggtgcaaatacaagatgcacctgtacggcctccacgaggggcagcgcgtgggcccagtgtccgctgtgggtgtgacagctccaaaggatgaagccgagaccacccaagcagtgcctaccatgacccctgagccccccatcaagcctcgcctgggggagctgaccgtgacagatgccacccccgactccctcagcctgtcctggatggttcccgagggccagtttgaccacttcctggtccagtacaggaatggggatgggcagcccaaggcggtgcgggtgccggggcacgaggacggggtcaccatctcaggcctggagccagaccataaatacaagatgaacctgtacggcttccacggtggccagcgcgtaggccctgtgtctgccattggggtgacggaggaagagacccccagccccacagaacccagcactgaggccccggaggcccctgaggagccgctcctgggggagttgacagtgacaggatcctcccctgactcgctgagcctctcctggaccatcccccagggccgcttcgactccttcaccgtgcagtacaaggacagggacgggcagccccaggtggtgcgtgtcaggggcgaggagagcgaggtcaccgtggggggcctggagcccgggcgcaaatacaagatgcatctgtacggcctccacgaggggcagcgcgtgggcccagtgtccaccgtgggcatcacggcgcccctgcccacaccactgccggtggagccccgcctgggggagctggcggtggcggccgtgacctcggactcagtgggcctctcatggacggtggcccagggcccctttgactccttcctggtacagtacagggacgcgcaggggcagccccaggcagtgcctgtgagcggagacctccgagcggtcgccgtctcggggctggacccggcccgcaagtacaagttcctgctctttggactccagaatgggaaacgccacggcccagtccctgtggaggccaggaccgccccagacaccaaaccgtctccccgcctgggggagctgactgtgacagatgcgacccctgactccgtgggcctctcgtggacggtccctgagggcgaattcgactccttcgtggtccagtacaaggataaggatggtcggctccaggtggtgccggtggcagccaaccagcgggaggtcacagtccagggcctggagcccagtaggaaatacaggttcctgctctatggtctgtcaggcaggaaacgactgggccccatctctgctgacagcaccacagctcccctggagaaggagctacctccccacctgggggaactgaccgtggctgaggagacctccagctctctgcgcctgtcctggacggtagcccagggcccctttgactccttcgtggtccagtacagggacacggacgggcagcccagggcagtgcctgtggccgcagaccagcgcacagtcaccgtagaggacctggagcctggcaagaaatacaagtttctgctctacgggctccttgggggaaagcgcctgggcccggtctctgccctgggaatgacagccccagaagaggacacaccagccccagagttagccccagaggcccctgagcctcctgaagagccccgcctaggagtgctgaccgtgaccgacacaaccccagactccatgcgcctctcgtggagcgtggcccagggcccctttgattccttcgtggtccagtatgaggacacgaacgggcagccccaggccttgctcgtggacggcgaccagagcaagatcctcatctcaggcctggagcccagcaccccctacaggttcctcctctatggcctccatgaagggaagcgcctggggcccctctcagctgagggcaccacagggctggctcctgctggtcagacctcagaggagtcaaggccccgcctgtcccagctgtctgtgactgacgtgaccaccagttcactgaggctcaactgggaggccccaccgggggccttcgactccttcctgctccgctttggggttccatcaccaagcactctggagccgcatccgcgtccactgctgcagcgcgagctgatggtgccggggacgcggcactcggccgtgctccgggacctgcgttccgggactctgtacagcctgacactgtatgggctgcgaggaccccacaaggccgacagcatccagggaaccgcccgcaccctcagcccagttctggagagcccccgtgacctccaattcagtgaaatcagggagacctcagccaaggtcaactggatgcccccaccatcccgggcggacagcttcaaagtctcctaccagctggcggacggaggggagcctcagagtgtgcaggtggatggccaggcccggacccagaaactccaggggctgatcccaggcgctcgctatgaggtgaccgtggtctcggtccgaggctttgaggagagtgagcctctcacaggcttcctcaccacggttcctgacggtcccacacagttgcgtgcactgaacttgaccgagggattcgccgtgctgcactggaagcccccccagaatcctgtagacacctatgacatccaggtcacagcccctggggccccgcctctgcaggcggagaccccaggcagcgcggtggactaccccctgcatgaccttgtcctccacaccaactacaccgccacagtgcgtggcctgcggggccccaacctcacttccccagccagcatcaccttcaccacagggctagaggcccctcgggacttggaggccaaggaagtgaccccccgcaccgccctgctcacttggactgagcccccagtccggcccgcaggctacctgctcagcttccacacccctggtggacagacccaggagatcctgctcccaggagggatcacatctcaccagctccttggcctctttccctccacctcctacaatgcacggctccaggccacgtggggccagagcctcctgccgcccgtgtccacctctttcaccacgggtgggctgcggatccccttccccagggactgcggggaggagatgcagaacggagccggtgcctccaggaccagcaccatcttcctcaacggcaaccgcgagcggcccctgaacgtgttttgcgacatggagactgatgggggcggctggctggtgttccagcgccgcatggatggacagacagacttctggagggactgggaggactatgcccatggttttgggaacatctctggagagttctggctgggcaatgaggccctgcacagcctgacacaggcaggtgactactccatgcgcgtggacctgcgggctggggacgaggctgtgttcgcccagtacgactccttccacgtagactcggctgcggagtactaccgcctccacttggagggctaccacggcaccgcaggggactccatgagctaccacagcggcagtgtcttctctgcccgtgatcgggaccccaacagcttgctcatctcctgcgctgtctcctaccgaggggcctggtggtacaggaactgccactacgccaacctcaacgggctctacgggagcacagtggaccatcagggagtgagctggtaccactggaagggcttcgagttctcggtgcccttcacggaaatgaagctgagaccaagaaactttcgctccccagcggggggaggctgagctgctgcccacctctctcgcaccccagtatgactgccgagcactgaggggtcgccccgagagaagagccagggtccttcaccacccagccgctggaggaagccttctctgccagcgatctcgcagcactgtgtttacaggggggaggggaggggttcgtacgggagcaataaaggagaaactgaggtacccgg

SEQ ID NO: 201565 - DNA, 2852 bp, Artificial Sequence
  derived and/or modified sequence
agctgactgtgacagatgcgacccctgactccgtgggcctctcgtggacggtccctgagggcgaattcgactccttcgtggtccagtacaaggataaggatggtcggctccaggtggtgccggtggcagccaaccagcgggaggtcacagtccagggcctggagcccagtaggaaatacaggttcctgctctatggtctgtcaggcaggaaacgactgggccccatctctgctgacagcaccacagctcccctggagaaggagctacctccccacctgggggaactgaccgtggctgaggagacctccagctctctgcgcctgtcctggacggtagcccagggcccctttgactccttcgtggtccagtacagggacacggacgggcagcccagggcagtgcctgtggccgcagaccagcgcacagtcaccgtagaggacctggagcctggcaagaaatacaagtttctgctctacgggctccttgggggaaagcgcctgggcccggtctctgccctgggaatgacagccccagaagaggacacaccagccccagagttagccccagaggcccctgagcctcctgaagagccccgcctaggagtgctgaccgtgaccgacacaaccccagactccatgcgcctctcgtggagcgtggcccagggcccctttgattccttcgtggtccagtatgaggacacgaacgggcagccccaggccttgctcgtggacggcgaccagagcaagatcctcatctcaggcctggagcccagcaccccctacaggttcctcctctatggcctccatgaagggaagcgcctggggcccctctcagctgagggcaccacagggctggctcctgctggtcagacctcagaggagtcaaggccccgcctgtcccagctgtctgtgactgacgtgaccaccagttcactgaggctcaactgggaggccccaccgggggccttcgactccttcctgctccgctttggggttccatcaccaagcactctggagccgcatccgcgtccactgctgcagcgcgagctgatggtgccggggacgcggcactcggccgtgctccgggacctgcgttccgggactctgtacagcctgacactgtatgggctgcgaggaccccacaaggccgacagcatccagggaaccgcccgcaccctcagcccagttctggagagcccccgtgacctccaattcagtgaaatcagggagacctcagccaaggtcaactggatgcccccaccatcccgggcggacagcttcaaagtctcctaccagctggcggacggaggggagcctcagagtgtgcaggtggatggccaggcccggacccagaaactccaggggctgatcccaggcgctcgctatgaggtgaccgtggtctcggtccgaggctttgaggagagtgagcctctcacaggcttcctcaccacggttcctgacggtcccacacagttgcgtgcactgaacttgaccgagggattcgccgtgctgcactggaagcccccccagaatcctgtggacacctatgacgtccaggtcacagcccctggggccccgcctctgcaggcggagaccccaggcagcgcggtggactaccccctgcatgaccttgtcctccacaccaactacaccgccacagtgcgtggcctgcggggccccaacctcacttccccagccagcatcaccttcaccacagggctagaggcccctcgggacttggaggccaaggaagtgaccccccgcaccgccctgctcacttggactgagcccccagtccggcccgcaggctacctgctcagcttccacacccctggtggacagaaccaggagatcctgctcccaggagggatcacatctcaccagctccttggcctctttccctccacctcctacaatgcacggctccaggccatgtggggccagagcctcctgccgcccgtgtccacctctttcaccacgggtgggctgcggatccccttccccagggactgcggggaggagatgcagaacggagccggtgcctccaggaccagcaccatcttcctcaacggcaaccgcgagcggcccctgaacgtgttttgcgacatggagactgatgggggcggctggctggtgttccagcgccgcatggatggacagacagacttctggagggactgggaggactatgcccatggttttgggaacatctctggagagttctggctgggcaatgaggccctgcacagcctgacacaggcaggtgactactccatgcgcgtggacctgcgggctggggacgaggctgtgttcgcccagtacgactccttccacgtagactcggctgcggagtactaccgcctccacttggagggctaccacggcaccgcaggggactccatgagctaccacagcggcagtgtcttctctgcccgtgatcgggaccccaacagcttgctcatctcctgcgctgtctcctaccgaggggcctggtggtacaggaactgccactacgccaacctcaacgggctctacgggagcacagtggaccatcagggagtgagctggtaccactggaagggcttcgagttctcggtgcccttcacggaaatgaagctgagaccaagaaactttcgctccccagcggggggaggctgagctgctgcccacctctctcgcaccccagtatgactgccgagcactgaggggtcgccccgagagaagagccagggtccttcaccacccagccgctggaggaagccttctctgccagcgatctcgcagcactgtgtttacaggggggaggggaggggttcgtacaggagcaataaaggagaaactgaggtacccggc

SEQ ID NO: 201566 - DNA, 651 bp, Artificial Sequence
  derived and/or modified sequence
gccccaggaaaggatgaagaaatggccccagcctcgacagaacctcccacccctgaaccccccatcaagcctcgcctggaggagctgaccgtgacagatgcgacccctgactccctcagcctgtcctggacggttcccgagggacagtttgaccacttcctggtccagtacaagaatggggatgggcagcccaaggcaacacgggtgccaggacatgaggacagggtcaccatctccggcctggagccagacaacaagtacaagatgaacctgtacggcttccacggtggccagcgtgtgggccccgtgtctgccatcggggtgacagctgcagaggaagagacccccagccccacagaacccagcatggaggccccggagccccctgaggagccgctcctgggggagctgacagtgacaggatcctcccctgactcgctgagcctctcctggaccgtcccccagggccgcttcgactccttcaccgtgcagtacaaggacagggacgggcggccccaggtggtgcgtgttgggggcgaggagagcgaggtcaccgtggggggcctggagcctgggcgcaaatacaagatgcacctgtacggcctccacgaggggcggcgcgtgggcccggtgtccaccgtgggcgtgact

SEQ ID NO: 201567 - DNA, 939 bp, Artificial Sequence
  derived and/or modified sequence
acagaaccaggcacagaggccccagggccccccgaggagcctctcctgggggagctgacagtgacaggatcctcccctgactcgctgagcctttcctggaccgtcccccagggccgctttgactccttcaccgtgcagtacaaggacagggacgggcggccccaggcggtgcgtgttgggggccaggagagcaaggtcactgtgaggggcctggagcctgggcgcaagtacaagatgcacctgtacggcctccacgaggggcggcgcctgggcccggtgtctgccgtgggcgtcacagaggatgaagccgagaccacccaagcagtgcctaccatgacccctgagccccccatcaagcctcgcctgggggagctgaccatgacagatgccacccctgactccctcagcctgtcctggacggttcccgagggccagtttgaccacttcctggtccagtacaggaatggggatgggcagcccaaggcggtgcgggtgccggggcacgaggacggggtcaccatctcaggcctggagccagaccataaatacaagatgaacctgtacggcttccacggtggccagcgcgtgggccccatctctgtcattggggtgacggctgcagaggaagagacccccagccccacggaactcagcactgaggccccggagccccctgaggagccgctcctgggggagctgacagtgacaggatcctcccctgactcgctgagcctctcctggaccatcccccagggccacttcgactccttcaccgtgcagtacaaggacagggacgggcggccccaggtgatgcgtgtcaggggcgaggagagcgaggtcaccgtggggggcctggagcccgggcgcaaatacaagatgcacctgtacggcctccacgaggggcggcgtgtgggcccggtgtccaccgtgggtgtgaca

SEQ ID NO: 201568 - DNA, 939 bp, Artificial Sequence
  derived and/or modified sequence
atgacccctgagccccccatcaagcctcgcctgggggagctgaccatgacagatgccacccctgactccctcagcctgtcctggacggttcccgagggccagtttgaccacttcctggtccagtacaggaatggggatgggcagcccaaggcggtgcgggtgccggggcacgaggacggggtcaccatctcaggcctggagccagaccataaatacaagatgaacctgtacggcttccacggtggccagcgcgtgggccccatctctgtcactggggtgacggctgcagaggaagagacccccagccccacggaactcagcactgaggccccggagccccctgaggagccgctcctgggggagctgacagtgacaggatcctcccctgactcgctgagcctctcctggaccatcccccagggccacttcgactccttcaccgtgcagtacaaggacagggacgggcggccccaggtgatgcgtgtcaggggcgaggagagcgaggtcaccgtggggggcctggagcccgggcgcaaatacaagatgcacctgtacggcctccacgaggggcggcgtgtgggcccggtgtccaccgtgggtgtgacagctccagaggatgaagaggaagaaactcccgcccccacagaacccagcacggaggccccggagccccctgaggagccgctcctgggggagctgacagtgacaggatcctcccctgactcgctgagcctctcctggaccatcccccagggccgcttcgactccttcactgtgcagtacaaggacagggacgggcggccccaggtggtgcgtgtcaggggcgaggagagcgaggtcaccgtggggggcctggagcccgggtgcaaatacaagatgcacctgtacggcctccacgaggggcagcgcgtgggcccagtgtccgctgtgggtgtgaca

SEQ ID NO: 201569 - DNA, 1281 bp, Artificial Sequence
  derived and/or modified sequence
atgctggcgaagactgcggagaagaggtgccaaccattgagggcatgaggatgcatctcttggaggagacaacagttcggacagagtggaccccggctcctggccccgtggatgcctatgaaattcagttcatccccacgacagagggggcgagccccccattcacagcacgggttccaagctctgcctcagcctatgaccagagaggactggcccctggacaggagtaccaggtcactgtccgagcccttcgagggaccagctggggccttcctgcctccaagaccatcaccaccatgatcgatgggccccaggacctccgagtggtggctgtgacaccgacaacactggagcttggctggctgcgtccccaggctgaggtggaccgatttgtggtgtcctacgtcagtgccggcaaccagagggtgaggctggaagtgccccctgaagcagacgggacgctgctgactgacctgatgccaggcgtagaatatgtggtgactgtcacagcggagcggggccgggcagtcagctacccagcttctgtcagggccaacacagggtcctcacccttgggcctcttggggactaccgatgagcctcctccctcaggcccctcgacgacgcaaggggcccaggctcctctcctgcagcagcgcccccaggagctgggagagttgagggtgctgggcagagatgagacagggcgcctccgtgtggtctggaccgcccagcctgacacctttgcctacttccaactgcgcatgcgggtgcccgaggggccgggggcacatgaggaagtgctgccaggggacgtccgccaggctctggtgcctccaccccctcctggaaccccgtatgagctgtcacttcatggggtccctcctgggggcaagccctctgaccccatcatctaccaaggcattatggacaaggatgaggagaagcctgggaagtcctcaggcccaccacgcctgggtgagctgacggtgacagacaggacctccgactccttgctcctgcgctggacggtccccgagggcgagtttgactccttcgtgatccagtacaaagacagggacgggcagccccaggtggtgcccgtggaaggaccccagcgctcggccgtcatcacctccctggatcctggccgcaagtacaaatttgtcctgtatgggtttgttggcaagaagaggcatggtccgctggtggctgaagccaagatcttgcctcagagtgacccaagtccagggactccaccccacctgggaaacctgtggg

SEQ ID NO: 201570 - DNA, 2597 bp, Artificial Sequence
  derived and/or modified sequence
ctctacgggcttcgtggcaggcagcgtgtggggcccgagtctgtggtggccaagactgctcctcaggaggatgtggacgagacccccagccccacagaactgggcacggaggccccggagtcccccgaggagccgctcctgggggagctgacagtgacaggatcctcccctgattcgctgagcctcttctggaccgtcccccagggcagcttcgactctttcaccgtgcagtacaaggacagggatgggcggccccgggcggtgcgtgttgggggcaaggagagtgaggtcaccgtgggaggcctagagcccgggcacaagtacaagatgcacctgtacggcctccacgaggggcagcgcgtgggcccggtgtccgccgtgggcgtgacagccccacaacaagaagagacccctccagccactgagtccccgctggagccacgcctaggagagctgacagtgacagatgtgacccccaactctgtgggcctctcctggacagtccccgagggccagtttgactccttcatagtccagtacaaggacaaggacgggcagccccaggtggtgccggtggcggcagaccagcgagaggtcacagtctacaacctggagcctgagagaaaatataagatgaacatgtatggactacatgatgggcaacgcatgggccccctgtctgtggtcatcgtgacggctcccctcccaccagccccagccacagaggcctccaagcctcccctggagccacgcctaggggagctgacagtgacggatataacccctgactctgtgggcctctcatggacagtccctgagggtgaattcgactcctttgtggttcagtacaaggacagggacgggcagccccaggtggtgcccgtggctgcagatcagcgggaggtcactatccctgacctggaaccctcccgcaagtacaagttcctgctctttgggatccaggatgggaaacgacgcagcccagtctctgtggaggcaaagacggttgcccgaggtgacgccagcccaggggccccaccccgccttggggagctgtgggtgacagaccccaccccagactcactgcgcctctcctggacggttcctgagggccagttcgactcttttgtggtccagttcaaggacaaagacgggccccaggtggtgcccgtggagggccatgagcgctctgtcactgtcacccctctggatgccggccgcaagtacagattcctcctctatggcctcctgggcaagaagcgccatggccctctcactgccgacggcaccacggaagcccggagtgctatggatgatactggaacaaagcgtcccccaaaaccccgtctgggggaggagctgcaggtgaccaccgtgacccagaactccgtgggcctctcctggacagtccctgagggccagtttgactcctttgtggtccagtacaaagacagggacgggcagccccaggtggtgcccgtggagggcagcctcagggaggtcagcgtgccgggcctggaccctgcccacaggtacaagctgctgctctacgggctgcaccacggcaagcgtgtgggccccatctcggccgtcgccattactgccggcagggaagaaacggaaactgagaccacggccccgacccctccagcgcctgagccccacctcggggagttgacagtggaggaggccacgtcacacaccctgcatctctcctggatggtgactgagggagaatttgactccttcgaaatccagtacacagatagagacgggcaactccaaatggtccgcataggaggtgaccggaatgacatcaccctctctggcctggaatccgaccacagatacctggtgaccctgtatggtttcagtgatgggaagcatgtaggtcctgtccatgtcgaggccctgacagtcccggaggaggagaagccttcagaacctcccaccgcaacccccgagccccccatcaagcctcgcctgggggagctgaccgtgacagatgccacccctgactccctcagcctgtcctggacagttcccgagggacagtttgaccacttcctggtccagtacaggaatggagatgggcagcccaaggcagtgagggtgccagggcacgaggaaggggtcaccatctcgggcctggagccagaccataaatacaagatgaacctgtacggcttccacggtggccagcgcatgggccctgtgtctgtcgtcggggtgacagctgcagaggaagagacccccagccccacagaacccagcatggaggccccggagcccgctgaggagccgctcctgggggagctaacagtgacaggatcctcccctgactcgctgagcctctcctggaccgtcccccagggccgcttcgactccttcaccgtgcagtacaaggacagggacgggcggccccaggtggtgcgtgttgggggcgaggagagtgaagtcaccgtggggggcctggagcctgggcgcaagtacaagatgcacctgtacggcctccacgaggggcggcgcgtgggcccagtgtctgctgtgggcgtcacggcccccgaagaggagtcccctgatgctcctcttgcaaa

SEQ ID NO: 201571 - RNA, 12735 nt, Artificial Sequence
  derived and/or modified sequence
augaugcccgcccaguaugcuuuaacuagcucucuuguucugcugguccugcugaguacagcccgagccggcccauuuagcucuagguccaacguuacucuuccugccccuaggccaccaccccaaccuggcggucacacaguaggggcuggcgugggaagccccucuucucagcuguacgagcacacaguggaaggcggcgagaaacagguaguauuuacccacaggauuaaccugccuccuaguaccgguuguggcugucccccuggaaccgaaccaccgguucuggcaagugagguucaggcccuccgagugagguuggagaucuuagaggagcuugugaagggucucaaagaacaguguacaggcgguugcuguccugcaucugcucaggccgguaccggccagacagacgugagaacccucuguucccugcauggcguguucgaccuuucgcgcugcaccugcuccugcgagcccgggugggggggaccaacuugcagugacccgaccgaugcugaaauucccccaucaagccccccauccgcuucuggcucuugcccugaugauugcaacgaucagggucguugugugcggggaagguguguguguuucccuggauauaccggcccuaguugcggauggccuucuugucccggcgacugccagggccggggaagaugcguccagggagugugugucugccgagcuggguuuucuggacccgauuguucccagagauccuguccucgaggauguagccagagaggcaggugcgaaggagggcggugcguuugugaccccggcuacaccggcgaugauugcgguaugagaucauguccacggggcuguucacagcggggcagaugugaaaauggcaggugcgugugcaaucccggcuauacuggcgaggauuguggcguccgcucauguccccguggcuguagucaacgggggcguuguaaggacggaaggugcguuugugacccuggauauaccggagaggauuguggaaccaggagcugccccugggauuguggugaggggggccggugcgucgaugggcggugugugugcuggccgggcuauaccggcgaagauuguuccacaaggacuugcccccgcgacugccgaggccguggacgcugcgaggauggggaaugcaucugcgacacaggauacucgggcgacgacugcggcguacguuccuguccgggugauuguaaucagagagggagaugcgaggacggaaggugcguuugcuggccaggauacaccggaacugauugcggcuccagagcuugcccaagagacugucguggacgaggucggugugaaaacggagugugcgucugcaaugccggguauucaggggaagacugcggagugagaucgugccccggcgacugcagagggcgugggagaugugagaguggcagaugcauguguuggcccggcuacacaggucgggauuguggaaccagagcuugcccgggugacugccgcgguagggggcgcuguguugacggcagauguguuuguaacccuggguuuacaggggaagauugcgguucacgaagaugcccuggggauuguagggggcacggccugugugaggauggcgugugcgucugugaugcuggcuauucaggugaggacugcucuacccgaagcugucccgggggaugccgagggagggggcaguguuuggacgguaggugcgucugcgaagauggguacucaggcgaggacugcgggguccgccaaugcccaaaugauugcucccaacacggggugugccaggacgguguauguauuugcugggaaggguacgucucggaagacuguucaauuagaacuuguccaaguaacugccauggccgcgggcggugugaagaggggcguugccuaugcgacccuggguauaccggacccacaugugcgacacguaugugucccgccgauuguaggggucgugggagaugcgugcagggagugugcuuaugucaugucggcuacggcggcgaggauugcggacaggaggagccgccagcuagcgccuguccgggcgggugcgggccaagagaacugugcagagccgggcagugcgucuguguggagggauucagggggccagauugugccauccaaaccugccccggggacuguaggggacgcggggaaugccacgauggcuccugugucugcaaagaugguuacgccggcgaagacuguggggaagaaguccccacuauugaaggaaugagaaugcaucuccuggaggaaaccaccguuaggacugaguggacaccagccccaggaccaguagacgcguacgaaauucaguucauccccacuacugagggcgccuccccccccuucacugccagagugccuagcagcgcuagugccuaugaccaacguggcuuagcacccgggcaagaauaucaggugaccgugcgagcguuacggggaacaucuuggggccucccagcauccaaaacuauuacaacaaugauugaugggccacaagaccucagaguggucgcugucaccccaacaacauuagaacucggauggcuacgaccgcaggcagaaguugaccgcuuuguugugucauacguuucugcuggcaaucagcgcguucgauuagaaguuccuccugaggcugaugggacacucuuaacagaccugaugcccggcguugaguauguaguuaccgugacagcugaaagggggagagcagucucauauccagcauccguuagggcuaauacagguuccucuccguuggguuuguuggggacuacugacgaaccaccuccguccgggccaucuacaacucagggagcgcaagcacccuugcuucagcaaagaccccaggaacuuggggaacugcgcguucugggccgagacgaaacuggcagguugagggugguguggacggcccagccugauacguuugcuuacuuucagcugcgaaugaggguuccugaaggacccggcgcucacgaagaagugcuuccaggcgauguucggcaggcgcuggugccaccaccacccccagggacccccuacgagcugaguuuacacgggguuccucccgguggaaagcccucagauccaauuauuuaccaggggaucauggauaaagacgaggaaaaaccgggaaaaagcagcggaccacccaggcucggagagcugacuguaacagaucggacaucugacucucugcucuuaagguggaccgucccagaaggagaguuugauaguuuugugauccaauauaaagacagagauggacaaccacagguugucccagucgaggggccccagcgcucugccgugauuaccagucuggacccuggucgcaaauauaaguucguucuguauggguucguagggaagaagaggcauggcccauuaguggcggaagcuaaaauccuuccacaauccgacccuuccccagggacuccuccccaccuggguaaucuuuggguaacugaucccacacccgauagccuccaccugagcuggaccgugccugaaggacaguuugacacauucauggugcaguaucgagacagagauggacggccccagguugugccaguagaaggacccgagcguaguuuugucguuuccucucucgacccagaucauaaguaucgcuucacccuguucggcaucgcaaauaagaagcgguacgguccccucacugccgacggcacaaccgcaccagaacggaaagaagaaccaccgcgaccugaguuucuggagcagccccuccucggugagcucacgguaaccggcgugaccccugauagucugcggcugaguuggacuguugcacaggggccuuuugauagcuuuaugguccaguacaaagaugcucagggacagccccaagcuguccccguggccggcgacgagaaugaagugacugugccugggcuggaucccgacaggaaguacaagaugaaccucuauggucugcgcggccgacaacgcguggggcccgaaucagugguagcaaaaaccgcaccccaagaggaugucgaugaaaccccgucgccuacagaauuaggaacggaggcucccgaguccccugaagagccacugcucggugaacugacagucacuggcuccucaccugauucucugucucuguuuuggaccgugccacagggauccuuugacuccuucacuguccaguauaaggacagagacggacggccccgggcgguccggguugggggcaaggaaagcgaagucacggugggaggacuggagcccggacacaaguacaaaaugcacuuauauggucuccaugaaggccagcgagugggcccuguuagugcaguggggguuacugccccccagcaggaagaaacaccccccgcgacggaaucuccacucgaaccuaggcugggagagcuuacugugacagacgugacaccaaauagcgugggccuguccuggacaguccccgagggccaguuugacucuuucauuguccaauacaaggauaaagacggccagccacagguggugccuguagccgccgaccaacgugaggucacugucuauaauuuagagccugagagaaaauacaagaugaauauguauggccugcaugauggucagcgcauggggccuuuaucugucgucaucgugacggccccacucccuccagcuccugcaacugaggcuucaaagccaccccucgagccaaggcuuggcgagcugacggugaccgacaucacccccgauagugugggucuaagcuggacagugcccgaaggugaguucgauuccuuugucgugcaauauaaagaccgcgauggacagccacaagugguucccguggccgcagaucagagagaggugacaauaccugaucuggagccuucgcgcaaauauaaguuucugcucuucggcauacaggauggaaaacgcagaucuccuguaucuguagaggcaaaaaccguggccagaggcgacgccucccccggagcaccccccaggcugggagagcuauggguaaccgacccuacacccgacucguugcgcuuaaguuggaccguuccagagggccaguucgacagcuuuguugugcaguucaaagacaaagacgguccccaagucguuccgguugaaggucacgaaagaagugugaccgucacuccacuggacgccggccgaaaguaucgguucuuauuguacggucugcuugggaagaaacggcacggacccuugaccgcugacggcaccaccgaagcgaggucagcuauggaugacaccggcacuaaaaggccgccuaagccccgccuuggggaggaauuacagguaacuacagugacccagaacucagugggcuuguccuggaccgugcccgaaggacaguucgauuccuuugucguucaguacaaagaucgcgacggacaaccccaagucgucccaguggagggcucucuaagggaggugagugugccgggccuggaucccgcgcacagauauaaacucuuacuguacggccuucaccaugggaaacgugucggcccuauuuccgccguggcgauaacagcggggcgcgaagagacagaaacagagaccacagccccaacaccgcccgcuccggaaccucaccugggagaguuaacgguagaggaggcaacuucucacacccugcaccuauccuggauggugacugaaggcgaauucgacagcuucgagauccaguauacagauagagacgggcagcuccagaugguccggauugguggggacaggaaugacaucacauuaagcggccuggaguccgaucaccgguaucuuguaaccuuguacggcuucagugacggaaagcacguggguccaguacacguggaggcucucacagugccggaggaggaaaagccuuccgaaccuccuaccgcuacccccgaaccuccuaucaaaccuagacugggagagcucaccgugaccgacgccacacccgauucccuuucucucuccuggacuguacccgaaggccaguucgaucacuuucugguccaguauagaaauggugacggacagccuaaggcaguaagggucccaggccacgaggaaggcgucacuaucucaggccuugaaccugaccauaaguauaaaaugaaucucuaugguuuccacgguggucagcgaauggggccugucucaguagucggugugacagcagccgaggaggaaacuccuaguccaacggaaccaagcauggaggcgccggaaccagcugaggagccccugcugggcgaacucaccguaacagguuccuccccggacucacugucacuguccuggacugugccucaaggacgauucgauagcuuuaccguacaguacaaggaccgugaugggcgcccccagguggucaggguggguggcgaagagucagaagugacuguuggcggacuggagcccggccguaaauacaagaugcaucucuauggucugcacgaggggaggagaguuggcccuguuuccgcagucggcgucacagcuccugaggaggaaagcccagacgccccgcucgcuaagcugagacugggccagaugaccgugcgcgacaucacaagugacucccugagcuuguccuggacggucccagaagggcaguucgaucacuuccuggugcaguuuaagaauggagauggacagccaaaagccguucgugugcccgggcacgaggacggaguuacaaucucuggccuggagccggaucauaaguacaaaaugaaccuguacggauuucaugggggccagcggguuggcccuguuuccgccguuggacugacagcaccuggcaaggacgaggagauggcucccgccagcacggagccucccacccccgagccccccauaaagccucgucuagaggaguuaacagugacagacgcaacaccagacucccuuucacugaguuggacagugcccgagggccaguuugaucauuuucuggugcaguauaaaaacggagacgggcagccuaaagcuacccgaguaccugggcacgaggauaggguuacgauuucaggcuuagagcccgacaacaaauacaagaugaauuuguauggguuucacgggggccagaggguggggcccguguccgcuaucggcgucacggccgcggaagaagagaccccuagcccaaccgagccaaguauggaggccccugaaccccccgaggagccacugcugggcgagcugaccgugacuggcucaucccccgauagucugagucugaguuggacggucccacagggaagauuugacagcuucacaguccaguacaaggauagagacggaaggccccaagugguuagagugggaggcgaggagagcgagguuacagucggagggcucgagccugggagaaaauauaaaaugcacuuguacggucuucaugagggaagacgagucgguccaguuuccacagugggagugacagcuccgcaggaggauguggaugagacccccucaccuacagaaccgggaaccgaagcgccgggccccccagaggaaccucuucugggagaauugaccguaaccgggagcuccccagacucucuuagucuaucuuggacugucccccagggucguuucgauucauuuacaguacaauauaaggaucgggaugguaggccccaggccgugcggguugggggccaagaguccaagguaaccgugcgcggccuggaaccaggucgaaaguacaaaaugcaccuguaugggcugcaugaaggucgccgccucggcccugugagugcggucgguguaaccgaagacgaggccgaaacaacacaggccgucccaacuaugaccccagaacccccuaucaagccgcggcucggggaacugacaaugacagaugcaacccccgauagucugagccucagcuggaccgucccggagggacaauuugaccacuuuuugguucaguaccggaacggcgacgggcagcccaaggcagugagagugccaggccacgaagacggggugaccaucuccggacuggaacccgaccauaaauacaaaaugaaccuguauggcuuccauggagggcagagagugggaccuauuuccgugauuggugugacggccgccgaagaggagacucccucacccacagaguuaagcacugaggcccccgaaccccccgaggagccccuguugggugaacugaccgugaccggcucaucuccagauucacugagucugucauggacuauaccgcaggggcacuuugacaguuuuacaguacaguacaaagaucgcgacggacgaccgcaggugaugcgcguucgcggugaagaaucugaggugacgguggggggucuggaacccggacgaaaauacaaaaugcaccuuuacggguuacaugaagggcgacgaguaggaccuguaagcacugugggcgugacggccccagaagacgaggcagaaacgacccaggcuguuccuaccaccacuccugagccuccaaauaaaccuagacugggugaauuaacgguaacugaugcuacccccgacaguuuauccuugucuuggaugguuccugagggucaguuugaccacuuccuggugcaauauagaaauggggauggucagcccaaggucgucagaguuccaggucacgaagacggcgugacuauuuccggucuagagcccgaucacaaauacaagaugaaucuuuauggcuuccacggaggacagcgggucgggccuaucucagugauaggcgugacagcggccgaggaagagaccccagcuccuaccgaacccagcacugaggcacccgagcccccugaagagccacugcuuggcgagcucacagugacggguucaucaccagacucucucucccucaguuggacaauaccgcaggggagauuugacuccuucaccguacaguauaaggaccgagaugguagaccccagguugucagaguuagaggcgaggaauccgagguuaccgucggaggccuugagccaggguguaaauauaaaaugcaucucuacggucuccacgaaggacagcgcguagggccugugagcgcagugggcgucacagcaccuaaggaugaggccgaaacuacccaagcaguucccaccaugacaccagaaccgccgauuaagccucgucugggagagcugacaguaacugacgcaaccccagauucccugagucucagcuggauggucccugaggggcaauucgaccacuuuuuaguccaguaucgaaacggggauggacagccaaaggcugucagaguaccuggacaugaagauggagugacaaucagcggacuggaaccugaucacaaauacaaaaugaaccucuacggauuucauggcgggcagcgagucggucccgucagugcuaucggcgucacagaagaagagacgccgucuccuacugagccaucaaccgaggccccagaggcccccgaggagccccugcuuggcgagcugaccgucacaggauccucuccggacuccuugucuuuaaguuggacaguuccacaaggcagauucgacucauucaccguucaguacaaagaucgcgacggacagccgcagguggugcgcguacgcggugaggagagcgaggugacuguggguggccuggaaccggggaggaaguacaagaugcacuuguacggucuccacgaaggacagagagucgggccaguuuccacuguagggauaacagcaccccugccuacacccuugccagucgaacccaggcugggugaacuggccguagcugcagucacgucagauaguguuggacucaguuggacagucgcacaaggaccauuugacaguuuccuaguucaguacagggaugcgcaaggccagccccaagcgguacccguauccggugaucugcgcgcuguggcugucuccggucuugaucccgcgagaaaauacaaguuuuugcuauuugggcuucagaacgggaagaggcaugggcccgugccaguggaagcacgcacagcgccggauacuaagccaucuccuagacugggggaacugacgguuacugaugcuacgccggacucagugggacucucauggaccgucccugaaggcgaauucgauucuuucguuguucaguauaaggacaaagacggccggcuccaagugguuccuguugccgccaaccagcgagaggugacugugcagggccuggagccuagucggaaguaucgcuuccuucuguauggccugagcggacggaagcggcucgguccaaucagcgccgauaguacuacagcgccucuugaaaaagaguugcccccgcaucuaggggagcucacaguagccgaggaaacuagcucgagccugcgucuguccuggaccgucgcgcagggccccuuugauucguucgucguucaauacagagauacugacggccagcccagagcuguccccgucgcagcugaccagcgaacggugacuguggaggaucuugaaccuggcaaaaaauauaaauuucuauuguauggacuguuggggggaaaaaggcucgggcccgugucagcgcugggcaugacagcuccugaggaagauacgccugcaccugaacuggcaccagaggcuccagaacccccugaagagcccaggcuggggguucugaccgugacugacacaaccccugauagcaugcgucucagcuggucuguggcucagggucccuuugauaguuuugucgugcaguaugaagacacgaacggacagccucaggcauuacucguugauggggaccaguccaagauucucauuucugggcuggaacccucuacgccuuauagauuccuccuauacggucugcacgaggggaaacgccucggcccucugucagcugaagguaccaccggguuggcaccagcuggacagaccagcgaagaaucaaggccuaggcugucccagcugucagugaccgacgugacuacaucuagccugcggcugaauugggaggccccccccggagccuuugauuccuuccuguugcgauucggggugccuucuccuucuaccuuagagccacauccaagaccuuugcuacagcgggagcucauggugcccgggacucggcacuccgcugugcuuagagaccugcgguccggcacgcucuauucccugacucuguacgguuugcguggcccacacaaggcugacagcauccagggcaccgcucgcacucuaagucccgugcuagagaguccucgagacuugcaauucucggagauucgugaaaccuccgcaaagguuaacuggaugccaccuccuagcagggcugauucguuuaaaguaucuuaucagcucgcggauggaggagagccucagucggugcaggucgaugggcaggccaggacgcagaaacuucaggggcuuaucccgggagccagauaugagguaacaguggugagcguccggggauuugaggagucagagccccugacaggguuucucacaaccguuccugacggaccaacgcaguuacgcgcacugaauuugaccgaaggguucgcaguacuucauuggaaaccgccacagaacccuguugacacauaugaugugcagguaacugcucccggugcaccuccguugcaggccgagacaccagggagcgcuguggauuacccccuacacgaucuaguguuacauacuaacuauacagcuacagugagaggccuucggggucccaaccucaccucccccgccucaaucacauuuaccaccgggcucgaagccccaagggaccuugaggccaaggaagucacaccuagaacugcccugcugacauggacggaaccuccaguaagaccugccggguauuuauuguccuuucauaccccuggaggccagaaucaggagaucuuacugccaggcggcauuacgagucaucagcuccuggggcuuuucccaagcacaaguuauaaugccagacuucaggcaauguggggucagucucuccucccaccuguuagcaccagcuuuacuacugguggccugcgcauccccuuuccacgggacuguggggaggagaugcagaacggggcaggggccagccgcacuucaacaauuuucuuaaaugggaaucgggaacggccacuuaauguuuuuugugacauggaaacagaugggggcggcuggcucgucuuucagcgucgcauggacgggcagacugacuucuggagagauugggaagauuacgcccauggcuuugggaauaucaguggggaguucuggcucggcaacgaggcuuugcauagucuuacucaggcuggugauuacagcaugagaguggaccuacgggcuggggacgaggccguguuugcccaguaugacuccuuccauguggauucagcagcggaauacuaucggcuccaucuggagggcuaucacggaacagcaggcgacagcaugucuuaucauagcggaaguguauuuagugcuagggacagagauccaaauagccugcuuauuagcugugccguaucuuaucgcggggcauggugguaccggaauugccauuacgcuaaccugaauggauuauacggcuccacuguggaucaccaagguguuucgugguaucauuggaaaggcuuugaauucuccguccccuucacagaaaugaaacugcgccccaggaacuuccgaagcccagcaggcggaggcuag

SEQ ID NO: 201572 - RNA, 12729 nt, Artificial Sequence
  derived and/or modified sequence
augaugcccgcacaguacgcccuuacaaguucacuggugcuccuggugcugcuuucgacagcccgcgccggacccuucucaagccgaucuaacgugacccugccggcuccuaggccaccaccccagcccggcggucacaccgucggugcaggcgucggcagucccuccucucagcucuacgagcauaccgucgaagguggcgaaaaacaggucguguucacacaucgcauuaaccucccgccauccaccggcugcgggugcccaccuggcacugagccacccguccuugccuccgagguacaggcauugaggguccgccuggagauuuuggaggagcucguuaaaggauuaaaggaacagugcaccggggguuguugucccgcaucagcgcaggcaggaacaggccaaacugacguccgaacccuuugcuccuugcaugggguguucgaucuguccagguguaccuguuccugugaaccuggcuggggaggcccuacauguucagaucccacugaugcagagauucccccauccagccccccaagcgccaguggcaguuguccagacgacuguaaugaccagggacgcugcgugcgaggucggugcguguguuuuccaggauacacaggucccucguguggcuggccuaguugcccuggggacugucaggggcgcgggcgcugcgugcagggugugugcguuugccgggccggguuuagcggacccgauugcucccagcgcagcuguccuagaggcugcagccagcgcggccggugugaaggaggccguugcgugugcgacccaggauacacuggcgaugauugugggaugagauccugcccgcgcggcugcucccaaagaggcagaugcgagaauggccgaugcguaugcaauccaggauauacuggagaggacugugguguucgcagcugcccacggggcugcagucagcgaggacggugcaaagacgggaggugcguuugugauccuggcuauacaggggaagacuguggaaccagaucauguccgugggauuguggugagggcggccggugcguggauggacgcugugucugcuggccaggcuauaccggggaggauuguaguacccggacguguccaagggacugccggggacgaggucggugugaggauggugagugcaucugcgacacuggauauucgggugaugacuguggcguaaggucuuguccuggcgacugcaaccagcgggggagaugcgaggacggcagaugcguguguuggcccggcuauacuggcacggauugcggaucacgagcuugcccaagggauugccggggacgcgggcgcugugaaaauggagugugugugugcaaugcaggauauucuggagaggacuguggaguacguagcuguccuggcgacugcagaggcagaggaaggugcgaauccggcagauguauguguuggccaggcuacaccgggagggacugcgggaccagggccugcccgggugacugucggggccgggggagauguguugauggcagauguguuugcaaccccggauucacaggagaggacugugggucgcggcgcugcccaggcgauugcagagggcacggacugugcgaagauggcgugugugugugcgaugcaggguacagcggggaggauugcucuacgcguuccugccccggugguugccgcggaagagggcagugcuuggaugguagaugugugugcgaggacgguuauaguggcgaagauugcggcgugcgacagugccccaacgauuguucacagcacggaguaugccaggauggcgugugcauuugcugggaaggcuacgucagcgaggauuguuccaucagaaccugcccaaguaacugccacgguagaggccggugugaggaagggcgcugcuugugugauccgggauauacaggaccuacuugugcuacacguaugugucccgcugacuguaggggccggggacgcuguguacagggaguaugccuaugccacguaggguacggaggcgaggauugcggucaagaggaaccuccagccucagccuguccgggggggugugggccucgcgaguugugucgugcaggccaaugcguguguguggaaggcuucaggggcccugauugcgccauccagacauguccuggcgacuguaggggcagaggcgagugccacgacggaucaugcguguguaaagacggcuaugccggggaggacugcggcgaggaagucccuaccaucgagggcaugagaaugcaccuccucgaggagaccacggucaggacugaauggacgccugcacccgguccuguagacgcguacgagauccaguuuauccccacaaccgaaggugccucgccacccuuuacagcacgaguccccucaucugccagcgccuacgaucagaggggccucgccccaggacaagaguaucaaguuacagugagggcucuacggggcacauccuggggacucccagcauccaagacuaucacgacgaugaucgacggaccacaggaccuacggguuguggcggugaccccgacgacucuugaacugggcuggcucagaccucaggccgagguggaccgauuuguggugucuuacguuuccgccggaaaucagcgugucagauuagagguccccccugaggccgaugggacccugcucacggaucuuaugccgggcgucgaguacgugguuacuguuacugcugagagggguagagccguuuccuacccagcaagcguccgggcgaacaccggcaguagcccguuggggcugcucgguaccaccgacgagcccccgccuucgggcccuucaaccacccagggggcccaggcaccccuacuucagcagagaccacaagagcuuggagaauuacgugugcugggcagggaugaaacaggcaggcuccgagucguuuggaccgcccagccagauacuuucgcuuacuuucagcuucgaaugaggguucccgagggcccuggagcccaugaggagguacuacccggagaugugagacaagcccugguaccccccccuccgccuggaacgccuuaugaguuaucuuuacauggaguaccccccggugguaaaccuucugaccccauuauuuaccagggaauuauggauaaggacgaggagaagcccgggaaaaguucaggccccccuagacugggugaacuuaccguuacagauagaaccuccgacagcuugcuccugcgauggacagucccugagggggaguuugacaguuucgugauucaguacaaggauagagauggacagccucaagucgugcccguggaaggaccacagcgcagcgcggugaucaccagccuggacccagguaggaaguauaaauucguguuauacgguuucguuggcaagaaaagacacggcccacuugucgcugaggcuaaaauccugccccaaucugacccuucaccgggcacacccccgcaucuagggaaccuauggguaacagauccgacucccgacagccuccaccugagcuggaccgucccugagggccaguuugacacauuuauggugcaguaccgcgaccgugacgggcguccccagguggugcccguggaaggaccagagcgaagcuuuguuguuucuucccuggacccagaccacaaauaucgauucacacuuuuuggaauugccaacaagaagagauacggaccucuuaccgccgacggaaccaccgccccugaaaggaaggaagagccgccgagacccgaauuucuugaacagcccuuguugggggaacugacaguaacaggaguuacuccugacucccuuaggcucucauggaccguggcccaaggccccuucgauuccuucauggugcaauacaaggaugcacagggacagccacaggcagucccagucgccggggaugaaaacgaagucaccguccccggccuggauccugaccgcaaguacaagaugaaucuuuauggccuaagaggaagacagcguguggggccagaaaguguuguggcaaagacggcaccccaggaggacguagacgaaacgcccagucccacagagcucggcacggaagcuccagagagcccugaggagccccugcucggcgagcucacaguuacuggguccagcccggauucucugucuuuguucuggacgguuccccaggggagcuucgauagcuucacuguacaauacaaggauagggacggaaggccccgcgcugugagagucggcgggaaggaguccgaagucaccgugggcggacuggagccuggucacaaguauaaaaugcaccucuacggcuuacacgagggccaaagggugggcccggugucagcugucggagugaccgccccgcaacaggaagagaccccuccugcuacugagucaccacuggagccacggcuaggggagcucaccgucacugacgugaccccuaauagcgucggacugucuuggaccgugccugagggccaauuugacuccuucaucguccaauauaaggauaaagauggccagccccaggucgugccugucgccgcugaccagcgggagguaacaguguacaaucuggagccggaacggaaauauaaaaugaacauguacggccugcaugacggccagcggauggguccccucuccguggugauaguaacagcuccucugccgcccgcuccagccacagaggcuucuaaaccaccucuggaacccagacuaggcgagcugacgguuacggauaucacucccgauagcguggguuuauccuggacaguccccgagggugaauucgacaguuuugucgugcaguacaaggacagagauggccagccccaggugguuccuguugccgccgaucaacgcgagguuacuauuccagauuuggaaccgagccgaaaauacaaguuccuacucuucgguauccaggauggaaagagacgcuccccugucaguguggaggccaaaacgguggcccggggugacgccucuccuggcgccccaccucgccugggcgaacucugggugacugaucccacaccugauucccuucguuuaagcuggaccgugccugagggucaguucgauagcuucgugguucaauuuaaggauaaagaugggccccagguggucccaguagaaggccacgaaagguccgucacuguuacaccauuagaugccggucgaaaguaccgauuccugcuguauggccugcuggggaagaaacgacaugguccacuuacugcugacggaacuacggaggcccgcagcgcaauggaugauacaggcaccaaacggcccccuaagccaaggcucggugaggaacuacaagugacgacaguaacacagaauuccguuggguugucuuggacugugccagaaggacaauuugacuccuuugugguucaguacaaggauagggacggccagccccaaguaguaccaguggagggcucccugagggaaguauccgucccaggucuggauccggcacaccgcuacaaauuacuauuguacggccuacaccaugguaaaagagugggccccauuagcgcugucgcaaucaccgccgguagagaggagacagagacagaaacgacagcacccaccccccccgcgcccgaaccacaucucggcgagcuuaccguugaagaggccacuucucauacauuacaucugucuuggauggugaccgagggagaguuugauucuuuugaaauccaguacacagaucgagauggacaacuacaaauggugcgaauugggggugaucguaaugauauuacccuaagugggcuggaaucagaucaccgguaucuaguuacauuguauggguuuagcgacggcaagcacgugggcccugugcaugucgaggcucugacgguuccagaggaggagaaaccaucugaaccacccacagcgacaccggaaccaccgaucaagccgcggcugggggagcugacggucacggacgcaacacccgauucccucucccugaguuggacugugcccgaagggcaguucgaucacuuucuaguccaguaucggaauggggauggccaaccaaaggcaguccgggucccagggcacgaggagggcgugacuauuuccggacucgaaccagaccacaaauacaaaaugaauuuguacggcuuccauggggggcaaaggauggggccaguuuccgugguaggagugaccgcagccgaggaggaaaccccaagucccaccgagccuucuauggaggccccagagcccgcugaggaaccccuccugggggagcucaccgugaccggguccaguccagacagucugucucuuucuuggacaguuccacagggcagauuugacagcuuuacgguacaguacaaggauagagacggccggccucaaguggugcgcguggggggggaagagagcgagguuaccgucggaggucuggagccaggaaggaaauauaaaaugcaccucuacggacugcacgaagggaggcgggugggaccugugagcgccguuggcgugaccgcacccgaggaggagucuccggacgccccauuggcuaagcuccgcuuagggcagaugacugugcgcgacauuaccagugacucccugagcuugucguggacgguucccgaaggacaguuugaucauuuccucgugcaauuuaagaauggugacgggcaaccuaaggccguaagagugcccggccacgaggauggcguuacuauuagcgggcuggagcccgaccauaaauacaaaaugaaccucuacggauuccacgggggacagcgcgucggaccugugucggccguuggacuuacagccccaggcaaagacgaggagauggcuccagccucaacugagccacccacuccggagcccccuauuaaacccagacuggaggagcuaacugucacagacgccacgccugacucucucagccugucuuggacagugccagaggggcaauucgaccauuuucugguucaauauaagaauggagacggacagccuaaagccacacggguccccggacacgaggacagaguuacuaucagcggucuggagccagauaauaaauauaagaugaacuuauacgguuuucacggaggccagcgcgucggcccagucagugccauuggagucaccgcugccgaggaggaaaccccuagcccuacugagcccaguauggaagcgcccgagccuccagaagagccucuccugggcgaacuuacugugaccggaagcuccccugacagcuuaagccugucauggaccguuccucaggggagguucgacucauucaccguucaguacaaagauagggauggucggccacaggugguucgaguggggggcgaagagagugaagucacggugggcggacuggaaccaggcaggaaauacaagaugcaccuguacggccuucaugagggcagacgagucggacccgucaguacaguaggcguaaccgcuccucaggaggauguggaugagaccccuagcccaaccgaacccggcaccgaagcaccugguccuccggaggagccacuucucggggagcugacugugacaggcucauccccggauucucuguccuugaguuggacaguaccacagggacgauuugacucuuuuacgguacaguauaaggaucgcgacgguagaccucaggcugugcgggugggggggcaggaaaguaaggugaccgugaggggucuggagccugggcgcaaauacaaaaugcacuuguacggccuccacgagggccgcaggcuuggaccaguuagcgcugugggggugacggaggacgaagcugaaacgacucaggcuguaccuacuaugaccccagaaccuccaaucaaaccccgacuaggagaacugacaaugacagaugcaacaccugacagccuuucgcugucuuggacugucccggagggucaguuugaucacuuucugguacaguaccgcaacggcgacggccagcccaaagcagugagagucccuggccacgaggauggcgugacaaucucuggacuggaaccugaucacaaguauaagaugaaucucuacggauuccauggggggcagcgcguuggcccaaucagugugaucggcguaaccgcagcagaggaggagacacccuccccaacugagcuaagcaccgaggccccugagcccccugaagaaccccuccucggugaacuaacagugacaggcagcuccccagacucccugagccucaguuggacaaucccccagggccacuucgacucguuuaccguucaauacaaggauagggacggcaggccacaagucaugagaguuaggggugaggaaucggaaguaacugucgggggacucgagccgggccguaaauacaagaugcaucucuauggguugcacgagggacguagagugggcccagugagcaccgugggcguuacugaggacgaagccgagaccacgcaggcuguaccaacaaccaccccugagccuccgaacaaacccagacugggggagcuaacugugaccgacgcaacaccugacagucucucacucucuuggauggugcccgaggggcaguucgaucacuuucuuguucaauacaggaacggcgaugggcagcccaaaguggucagggugccuggucacgaagacgguguaacaauuagcggacucgagccagaccauaaauacaagaugaaccuguacggguuucacggcggucagagggugggccccauaagcgucaucggugugaccgccgcggaggaggagaccccagcacccacagagcccucaacagaagcccccgaaccccccgaggaaccccuccugggagagcugacuguuacgggcuccucgcccgauucacugagccuauccuggacaauuccccaaggacguuucgacucguucacaguccaguacaaggauagagauggacguccucagguuguucgaguccgcggggaagaaucggaagugacaguugggggucuggaaccuggcugcaaauauaaaaugcacuuguauggauugcacgagggacagaggguuggacccgucuccgcuguggggguuacggcgcccaaagacgaagcugaaacgacucaggcaguaccgaccaugaccccagaaccccccaucaaaccacgccucggcgaacugaccgugacagaugccacgccagacucucuuagccugagcuggauggugcccgagggucaguucgaccauuuucuagugcaauaccggaacggcgauggucagccaaaagccgugcgggugcccggccaugaagacggaguaacuaucucagguuuggaacccgaucauaaauacaagaugaaccuauacggcuuucauggaggccagcgaguggggccagugucagcaauaggcgugaccgaagaggagacacccucaccaacugaaccuucuacggaagcaccagaggcccccgaggaaccucuucugggggaauugacuguaaccggcucgucacccgacagccuuucccugagcuggacuguuccucagggaagguuugacucuuucaccgugcaauacaaagauagagacggccagccucaggugguacgcguuagaggggaagaguccgaggugacuguagguggguuggagcccggccggaaguacaagaugcaucuauacggucuucaugaaggacagagggugggccccguuucuacugucggaauaaccgcuccuuugcccacuccccucccuguugaaccuaggcugggugaauuggcaguggccgcugugacaagcgacucaguggggcucuccuggacaguggcucagggccccuuugacagcuuucugguccaguaucgggaugcccaggggcagccacaggcuguaccuguuaguggcgaccuccgggccgucgcuguguccggcuuagauccugcgcgcaaguauaaauuucuauuauuuggucuacagaauggcaaaaggcauggccccgugccaguagaagcuagaaccgcuccagacacaaaaccuucacccagauuaggagaauuaaccgugacagacgccaccccagacucuguuggucugagcuggacuguuccagagggcgaauuugauaguuucgucgugcaguauaaggacaaggacggccggcuccagguggugcccguugcggccaaccaacgugaggugacuguucaagggcucgaaccaagccgaaaguauagguuuuugcuuuauggacugagcggccgcaagcgccuagguccaauuucagccgacucuacaacugcgccacuggagaaagaauugcccccucaccugggggaacucacuguugccgaggaaaccuccuccaguuuaagguuaagcuggaccguugcccagggccccuucgauucauuuguugugcaguacagagauacagacgggcagccacgugcuguuccugucgcagcggaucagaggacggugacuguggaggaccuugaacccggcaaaaaguacaaauuccugcuguacggacugcucggggggaagcgcuugggcccaguaucugccuuaggcaugaccgcgcccgaggaagacaccccugccccugaacuggcaccagaggcucccgaaccucccgaggagccuagauuaggcguacugacgguaacagacacuacacccgacucuaugcgccucuccuggucaguggcccagggcccguuugauucuuucgugguccaguaugaagacacgaacggccagccucaggcgcuccuuguggacggugaccaaaguaagaucuugauuagcggccuggagcccaguacgcccuacagauuucuucuguauggccugcacgaaggaaaacgcuuagggccccugucagcagaagggaccacagggcuggcgcccgcagggcagaccagcgaagaaucccgcccucgguuaucacaacucuccgucacugaugugacaacaagcagucugaggcugaacugggaagcgccgccaggugccuuugacagcuuccuacuuagauuugggguccccucgcccuccacucuugagccgcauccccguccacugcugcagcgggagcuuaugguacccgggacacggcauuccgccguccuccgcgaccuucggucuggcacucuuuauagucugacuuuauacggccuuaggggcccgcacaaggcugauaguauacagggaacugcccggacauugucgcccguguuagagaguccgcgggaccuccaguucagugaaauuagagagaccagcgccaaagucaauuggaugcccccgcccucacgggccgauagcuuuaagguaucuuaucaguuggcugaugguggcgaaccccaguccgugcaggucgacggucaagcccggacccaaaaguuacagggccugaucccuggugcucgauacgaggugaccguagugaguguucgaggguuugaagagagcgagccccuuacaggguuccugacuacggucccggacgguccuacucagcugcgggcucuaaaucucacugagggauuugccgugcuucauuggaagccuccccagaauccagucgacacauaugacgugcagguuacagcacccggcgccccucccuuacaggccgagacccccgggucggcugucgauuacccccuucacgaccuggucuuacacacaaacuacaccgccacagugcggggccugcgaggcccaaaucucacuagccccgcguccauuacauuuacaaccggccuagaggcuccacgcgaucuugaagcuaaggagguaacuccacgcacugccuuacugacguggacugagccaccuguuaggccagcaggcuaccuucugucuuuucauacaccggguggccaaaaucaggagauccuccuaccgggaggcauaaccucucaucagcugcucggccuuuuccccagcacaagcuauaaugcaaggcugcaagcaaugugggggcagucauugcugcccccagugagcaccaguuucaccaccggaggcuugcguauucccuuuccaagagacugcggcgaagaaaugcaaaacggggccggggcaucgaggacaucaaccaucuucuugaauggaaauagagagcgcccacugaacgucuucugcgacauggagacugauggcggggguugguugguguuccagcgacgcauggacggccaaaccgacuucuggagagacugggaggacuacgcucacggauuugguaacaucucuggggaauucugguugggaaaugaggcucugcacucccuaacgcaggcuggcgacuacaguaugagaguggacuugcgggcaggagacgaagcgguguuugcccaguacgauucauuucacguagacuccgccgccgaguacuaccgucuacaccuugaaggguaccacggaacugccggggauaguaugaguuaucacucaggaucugucuuuucagcacgggaucgagaucccaacucauuguuaauuucuugcgccgucucuuauaggggagccuggugguaccggaacugucacuacgcgaacuugaacggucuguacggcuccaccguggaucaucagggggugucaugguaccacuggaaaggauuugaauuuucuguuccguucaccgagaugaagcugaggccgcguaauuuccgcucccccgccggcggaggauag

SEQ ID NO: 201573 - RNA, 12735 nt, Artificial Sequence
  derived and/or modified sequence
augaugcccgcccaauaugcucucacaucgagccuagugcuccucguucuguugucaacugccagagcuggacccuucucuucccgauccaaugucacuuugccagcgccuagaccccccccgcagccaggaggccacacagucggcgccggcgugggaagcccaucaagccaauuguacgaacauacgguugagggaggugagaagcagguaguguucacucaccgcaucaauuuaccuccuuccaccgggugcgggugcccucccggaacugagccaccaguccucgcuucagaaguucaggcucuuagaguccggcucgagauucuggaggaacucguaaaaggguuaaaagaacaaugcacaggggguugcuguccagccucugcucaagcuggcacgggccaaaccgacgugcggacccucuguucacuucaugggguauuugaucugucucgcugcaccugcucuugcgagcccggcuggggcggcccuacauguuccgauccuaccgaugcugagauccccccguccucuccuccuagugcuucugguagcuguccagaugauugcaacgaucaaggacguugugugcggggacguugcguuuguuucccaggauauacuggccccuccugugguuggccuuccugccccggcgauugucagggacgagggcgauguguucagggugugugugucugcagggcaggguucucuggacccgacugcagucagagaucuuguccgaggggauguucacagagagggaggugugagggcgguagaugcgugugcgauccaggcuacacuggcgaugauugugggaugcguaguugcccuagaggcugcucacagagaggcaggugugagaaugggcgaugcgugugcaaucccggguacacuggcgaggauugcggcgugagaucaugccccagagguugcucucaaagggggagaugcaaggauggacgcugcgugugugauccuggauauaccggagaagauugcgguacgcggaguugcccaugggauugcggcgaggggggucgauguguugauggacgaugugugugcuggccuggauauacuggggaagacuguagcacuaggaccugcccucgggauugccggggccggggccgaugugaagauggcgaaugcaucugugauacugguuauaguggugaugauugcggcguacguuccuguccgggugauuguaaucagagagggagaugcgaggacggaaggugcguuugcuggccaggauacaccggaacugauugcggcuccagagcuugcccaagagacugucguggacgaggucggugugaaaacggagugugcgucugcaaugccggguauucaggggaagacugcggagugagaucgugccccggcgacugcagagggcgugggagaugugagaguggcagaugcauguguuggcccggcuacacaggucgggauuguggaaccagagcuugcccgggugacugucgggggcgcggccgcugugucgauggccgaugcguauguaauccgggauuuacaggggaagauuguggcagucggagaugcccaggugauugcaggggucauggacugugcgaggauggcguguguguaugcgacgcaggguauagcggggaagauuguaguacaagaucgugcccuggcgguuguagagggagggggcagugccuggauggcaggugcgugugcgaggauggcuacaguggcgaggacugcggaguacggcagugucccaacgauugcagucaacauggggucugccaggacggagucugcauuuguugggagggguacguguccgaggauuguucuauuagaaccugcccaucaaauugccacgggaggggccguugcgaagaaggccgcuguuugugcgaccccggauacacaggaccgacuugugcaacacguaugugucccgccgacugccggggccggggacgcugugugcaagggguguguuugugccacgugggcuacgggggagaggauugcggucaggaagagccucccgccucagcauguccagguggaugcgguccacgggaguugugccgcgcagggcagugugucugcgucgagggauuuagggggcccgauugcgccauacaaacgugucccggggauugccguggccgaggugagugccacgauggguccugcguuugcaaggacggauacgcuggagaggauugcggcgaagagguuccaacgaucgagggcaugagaaugcaccuguuagaggaaacaacaguacgcacagaguggaccccugcacccggcccagucgacgcuuacgagauccaauuuaucccuacaacagaaggggcuucuccaccauuuaccgcucgggugccaucuagcgcuagugccuaugaccaacguggcuuagcacccgggcaagaauaucaggugaccgugcgagcguuacggggaacaucuuggggccucccagcauccaaaacuauuacaacaaugauugaugggccacaagaccucagaguggucgcugucaccccaacaacauuagaacucggauggcuacgaccgcaggcagaaguugaccgcuuuguugugucauacguuucugcuggcaaucagcgcguucgauuagaaguuccuccugaggcugaugggacacucuuaacagaccugaugcccggcguugaguauguugugaccgugacugcagaaagaggucgagccguaucauauccagcgagugugagagcuaacacaggaucaucaccucugggccugcucgggacaacagaugaaccuccuccauccggccccagcaccacacagggugcccaggcucccuuacugcagcagagaccccaggagcuaggugaacucagagucuuaggcagggaugaaaccgguagauuacgcgugguuuggacugcucagccugauacguuugccuacuuucaauugcgaaugagagugccugagggcccuggcgcccacgaggagguucuuccaggggacguucgccaggcucugguuccacccccaccaccaggcaccccguaugagcuuucacuccauggcgucccacccggaggcaagccaucugaccccaucauauaccagggcauuauggacaaagacgaagagaagccaggcaaauccucaggcccuccccgccugggagaacugaccguuacugacagaacuagcgauucccugcuccuuagauggaccgugcccgagggagaguuugacagcuucguaauccaguacaaggaccgugacggacagccccaaguaguccccguagagggaccccaaaggagugcuguuauaacaucgcucgacccuggaaggaaguauaaguuuguccucuauggcuuugugggaaagaagcgccacggcccucuggucgccgaagcuaagauccugccccaguccgacccuuccccaggcacaccuccccaccucggcaaccugugggugacagacccuacccccgacucacuccaccucuccuggacugugccagagggacaguuugacaccuucaugguucaguacagagauagagacggcaggccccagguggugcccguugaagguccagaacggagcuucguggugucuagucucgauccagaccacaaguacagauucacccuguucggcauugccaacaagaagagauauggcccauuaacugccgacggaacaaccgccccggaaaggaaggaggagccucccagaccugaguuucuugaacaaccccugcucggcgaguuaacagugacaggaguuaccccagauucuuugcgcuugucauggacaguagcacaaggcccuuucgauagcuuuaugguacaguauaaagacgcucaaggccagccccaggccguuccugucgcuggggaugagaacgagguaacagugcccggacuggacccugaucggaaauacaaaaugaaccucuauggucugcgugggaggcagcgcguagguccagaaagcgucguggcuaaaaccgcaccucaggaagacguagaugagacuccuucccccacugaacuugggacugaggcuccagaaucaccugaagaaccucuguugggagaguugacagugaccgguuccuccccggacucgcuaucucuguucuggacggugccgcagggauccuuugauucuuucacagugcaguacaaggaucgagacggaagaccuagggccguuagggugggcgguaaggagucagaagugaccgucggaggacuggaacccggccacaaauauaagaugcaccuguauggccugcacgaaggacagagaguugguccaguguccgcaguuggagucaccgccccgcagcaggaagaaaccccaccagccaccgaaucccccuuggaaccaagacugggugaacucaccguaaccgaugucacccccaacagcgucggguuaagcuggaccgugccugaaggccaauuugauucauuuaucgugcaauauaaagacaaagacggacagccacaggugguccccguagcagcggaccagagggaaguaaccguguauaacuuagaaccagagcgaaaauacaagaugaacauguacggacuacaugacggccagaggaugggaccauuaagugucguaauugugacagcuccucugccuccagcgccggccacugaggcaaguaaaccaccacuggaaccacgacugggggagcucaccgugacagacauuacacccgauagcgucggucucucauggacgguacccgaaggggaguucgauaguuuuguggugcaguauaaagauagggauggccaaccacagguagugccaguugccgccgaccagcgcgaagugacaaucccagaccuugaaccuagcaggaaguauaaguuucuucuguuuggaauucaggacggaaagagaagauccccuguuuccguggaagcuaagacuguggcucgcggcgaugccucgccaggagcgccuccccgguugggggaauuguggguuacagauccuacuccugauagccugagacuauccuggacagugccugaaggccaguucgauaguuuuguagugcaguucaaagauaaagaugggccccaaguggucccuguagaagggcacgagagaagcguuaccgucacaccacuggacgcugggcggaaauacagauuccuguuauauggacuucuugggaaaaaacggcacggaccccugacggcggauggcacuacugaggcgagaagcgcuauggacgauaccggaaccaaaagacccccuaaacccagacucggagaggagcugcaagugaccacgguuacgcagaacucgguaggucuguccuggacggugccagagggacaguucgauaguuuuguggugcaguacaaagaccgagacggacagccccaggucgugcccgucgaaggcagccuuagggaagugucugugccaggauuggauccagcccauagauacaaacuccuccuguacgggcuccaccauggcaagaggguaggccccauuucugccguagcaaucacugcaggacgcgaagagacagaaaccgagaccacagccccuacuccccccgcccccgagccucauuuaggagaguuaacuguggaggaagcuacaagccauaccuuacacuugucauggauggugacagagggugaauucgauuccuuugaaauccaguauacagauagggaugggcagcuccagaugguacgcauugggggugaccggaaugacaucacacucuccggcuuagagagugaccacagauaccuggugacacuauacggcuucucagauggcaaacacgucggaccaguccacgucgaagcccugacaguucccgaagaggagaaaccuagugagccuccuaccgccacuccagaaccaccaaucaaaccuagacuuggcgagcugaccgugacagaugcaacuccugacucacuaucgcugagcuggacgguacccgaaggacaauuugaucauuucuuggugcaguaccgaaauggugaugggcagccuaaagccgugcgugugcccggacacgaggagggggugaccauuaguggauuggagccagaccauaaauauaaaaugaaccuauacggauuucacgggggacagaggaugggaccagugaguguggugggcgucacggcugcugaagaagaaacuccuagcccuaccgaaccgucuauggaggcgcccgagcccgcagaagaaccacugcugggagaacuuacugugacagggaguucacccgauucucucucacucuccuggaccgugccacaaggaagguuugauucuuuuacagugcaauacaaagaucgagacgguaggccucaggucgugaggguugguggggaagaguccgaggugacuguuggaggacuagagcccggccguaaguacaaaaugcauuuauacggauugcacgagggacgucgcgugggaccuguguccgccguugggguuacggcacccgaggaagaaucuccggaugcaccacuggccaaacugagacucggucaaaugaccguccgcgauauaaccagcgacucccucucacugagcuggacaguccccgagggccaguucgaccauuuucuggugcaauuuaagaacggugacgggcagcccaaggccguccgcgugcccggccaugaagacggcgugaccauuagcggcuuggagccggaccacaaguauaaaaugaaucuguaugguuuucacggcggccaaagagucggaccuguaucugcagugggguugacggcgcccgguaaagaugaggagauggcaccggcuagcaccgaaccaccaacccccgagcccccuauaaaaccacggcuugaagaacuuaccgugacagacgcuacacccgacucucucagucugucuuggaccgugccugaaggacaguuugaucauuuccucgugcaauacaagaauggugacggacagccuaaggcuacacguguaccaggucacgaagaucgaguuacuaucuccgggcuagaaccagauaacaaauacaaaaugaaccuguauggguuccacggaggacagaggguuggaccaguuucugccaucgguguuacagcugcagaagaagaaacaccaagcccuacagaacccucuauggaagcaccagagccaccagaggagccacuccugggagagcugacuguaaccgguucaaguccugauagccuuagucuuuccuggaccgugccucagggcagauucgauuccuucacaguacaauacaaggauagagauggcagaccucaggucgugaggguaggaggagaagaaucagaagucacagucgguggucuggaacccgggaggaaauauaaaaugcauuuauacggucugcaugaggguaggagaguuggucccgugagcacugucggugugacagccccccaggaagaugucgacgagacaccaaguccuacagaacccgguaccgaagcccccggaccccccgaagagcccuuguuaggcgagcuuacagugaccggcucaucuccggauucucucagccugucauggacugugccgcagggaagguuugacucguucacagugcaauauaaggaucgggauggacgaccucaggcugugcggguggggggccaggagucuaaagugaccgugcgcggccuggaacccgggaggaaauauaaaaugcaucuuuacggccugcacgaaggcagacgccugggacccguuagugcugugggaguaacugaagaugaagccgagacuacacaggcggugcccacuaugacuccugaaccacccauaaaacccaggcuaggugaacuuaccaugaccgacgcuacacccgacucacuuucucuuagcuggaccgugccagaagggcaguuugaccacuuccucgugcaguaccggaacggcgacggacaaccuaaggcaguaagaguucccgggcaugaggacggagucacaaucucagggcucgagcccgaccacaaauauaagaugaaucuuuauggcuuccaugggggacagcgcgugggacccauaagcgugaucggaguaacugcugccgaggaagagacuccaucuccgaccgagcuuucaacagaagccccagagccuccagaggagcccuugcuaggcgagcuuacugugacugguagcagcccugacucuuuaaguuuguccuggacuauuccacagggccacuucgacucuuuuaccguucaguacaaggacagagauggcagaccacaggugaugagagugagaggggaggagagcgaagucaccguuggaggguuggagccgggaaggaaauauaaaaugcaucucuacggauugcacgaggggagacgcgucggaccugugucaacagugggaguuaccgccccagaagacgaagcagagaccacucaagcuguuccuacuacaacccccgaaccaccuaauaaaccacgccucggcgagcucacagugacggacgccaccccagauucucuaucccucagcuggauggucccagaaggccaguucgaccacuuccuaguucaauaccguaauggagauggccagccgaaagucguucgcguuccugggcaugaagauggugugaccauuaguggacuggaaccggaucacaaguauaagaugaauuuguacgguuuucauggaggccaacgaguuggaccaauuagugugaucggugugacagccgccgaagaggagacaccagccccaaccgaacccucaaccgaggccccugagccccccgaggaaccucuguuaggcgagcucacugugacugggagcagucccgauagcuugagucuuucuuggacaauaccucagggccgguuugacagcuuuaccgugcaauacaaagacagagacggccggccccaggugguuagaguuaggggggaggaauccgaggugaccgugggaggacucgaaccugguugcaaguauaaaaugcaccucuauggacuucaugagggacagcgcgugggaccuguaucggcagugggugucacagccccaaaagacgaggcugaaacgacacaggcagucccaacaaugacaccagagccacccauaaagccucggcugggggagcuuacuguuacggacgcuacaccugauucacuuaguuuauccuggaugguaccugaagggcaauucgaccacuucuuaguccaauaucggaauggagacgggcagccaaaggcuguaagagugccaggucaugaagacggaguuacuauuuccggccuggaacccgaucacaaguauaaaaugaaucucuacggauuucacggggggcaaaggguugggccugucuccgccauagggguuacugaggaagaaaccccaucaccuacugaaccauccaccgaagcaccugaagcuccugaggaacccuuauuaggcgagcucacagugaccggauccucuccagauucucucucacucucuuggaccguaccacagggacgauucgauuccuuuacggugcaauacaaggaucgggacggucagccucagguaguacgggugcguggcgaggaaucugaagucaccgugggaggcuuggaaccuggaagaaaguauaagaugcaccuuuacggccuucacgaaggccagaggguugggccuguguccacuguuggaauaacagcuccacugcccacuccauugcccguggagccaagacugggagaacuggcuguagcugccgugaccagcgauucugugggucugagcuggacugucgcccagggcccguuugauagcuuuuuaguacaauaccgggaugcucaggggcagccucaagcgguacccgucagcggugaccucagggccguggcaguaagcggccuggauccugcccgcaaguacaaauuucuccuuuucggacugcaaaauggaaagcggcaugggcccguuccuguggaagccagaacugcacccgauacaaaacccuccccucgccucggagaacucacaguaacugacgcaacacccgauucugugggccucagcuggaccgucccugaaggggaguuugacucauuuguagugcaauauaaggauaaggauggcagauugcaggugguacccgucgcugccaaccaaagagaggucaccguacagggcuuagagcccagccgcaaauaccgguuuuugcuuuauggcuugucgggacguaagcgacucggaccuaucucugcugauagcaccaccgccccccuagaaaaagaguugccuccccaccuaggagaguugacuguagccgaagaaaccucaucaucccucagauuauccuggacaguggcucaaggaccuuucgacucguucguuguucaguaccgagacacggauggccaaccacgcgcugugccuguugcagcggaccagcgcaccguuaccguggaagaucuugaaccuggcaagaaguauaaauuucugcucuauggccugcuaggagggaagagauuaggcccugucagcgcacugggcaugacugcuccagaggaagacacaccagcaccggaacuggccccugaggcaccggagccaccagaagaacccaggcugggcguccugaccgugaccgauacuacuccagacucuaugcggcuuucuugguccguugcucaaggaccauuugacuccuucguggugcaguacgaggacacaaaugggcagccucaagcucugcucguggacggagaucagagcaagauucugauaagcggccuagagccaucaacuccauacagguuccuguuguacggacugcaugaaggaaagcggcucggaccccuguccgcagaggguaccacaggacuggcuccugcugggcagacauccgaagagagucggccccgucuaucucagcugucuguuaccgacguaaccaccucuucccucagacugaacugggaggccccaccuggcgcuuuugauucuuuucuccucagauucggaguuccgucuccuagcacccuugaaccccacccacguccucuccuccagcgggaacugaugguccccgggacaagacauagcgccgugcugagagaccugcguagugguacauuauacucuuugacacuguauggucuucgcgguccacacaaggcugacucuauucaaggcacugcucgaacauuauccccuguuuuggaaaguccccgagaucuccaauucucagagauucgugaaaccuccgcuaaagucaauuggaugccuccaccaucuagagcagacuccuucaagguuucuuaucagcucgccgacggaggugaaccucaaucagugcaggucgauggacaggcaaggacccaaaagcuucaggggcugaucccaggagcgcgauacgaggucaccguugucagcgugcguggauuugaggagucagagccucuuacuggauuucuuacaacagugccagauggcccuacucagcuucgcgcccuaaaucuuaccgaaggcuuugcuguauugcacuggaagcccccacaaaacccagucgacaccuaugacguucagguuaccgcucccggcgcaccaccucuucaggcagagaccccugggagcgccguggacuacccucugcacgaucugguucugcacacuaauuauacggcgacagugcgcggccugcgcggaccuaaucugacuucuccagcuuccauuacuuuuaccaccgggcuugaagcuccacgcgaccuugaggcuaaggaagucacacccagaaccgcucuuuugacauggaccgaacccccaguccggccugccggcuaccuucuaucauuccacacccccgguggucagaaccaagagauuuuacugccuggaggaaucaccucccaucaacugcugggccucuuucccucaaccucguacaaugcucggcuucaggcuaugugggggcagagccuucucccacccgugaguacuagcuuuaccacaggcgggcuaaggaucccauuuccccgugacugcggagaagaaaugcagaauggugccggagccucuagaaccucaacaauuuuuuuaaacgguaaucgcgaacggccccuuaauguuuuuugugacauggaaacagacggcggagguuggcuuguauuccaaagacggauggacgggcagacugauuuuuggagagacugggaagacuacgcacauggcuuugguaacaucaguggggaguuuugguuagguaacgaagcgcugcacucacugacucaggcaggggacuacagcaugaggguggaucuucgagccggugaugaagccguuuuugcacaguaugacucauuccacguggacucggccgcagaauacuacaggcugcaucuggagggauaccacgggacugccggcgacucaaugucauaccauaguggcucuguguuuagcgcccgggacagggauccgaacucgcuguuaauuucgugugcuguaaguuauaggggcgcauggugguaccggaauugucacuacgcgaacuuaaacggguuguacggaucaacaguggaucaccaaggagucaguugguaucauuggaagggauucgaguuuucaguuccguucaccgagaugaaacugcggccccguaauuuuaggaguccagcaggcggagguuag

SEQ ID NO: 201574 - RNA, 12729 nt, Artificial Sequence
  derived and/or modified sequence
augaugccggcucaguaugcacucaccuccaguuuaguguuguugguuuuauuaucuaccgcuagagccggaccuuucuccagcagaagcaacguuacccugccugcaccucggccuccuccucagccaggaggucacaccgugggggccgguguggguucacccucaucacagcuguaugagcacaccguggagggcggggaaaagcagguuguguuuacucacaggauuaaccucccaccaagcacgggguguggaugccccccaggaaccgaaccgcccguguuagcuagcgaaguucaagcucugagggugagacuagaaauucuagaggaacuggugaagggacucaaagaacaaugcaccggagguugcugcccagcuagcgcacaggcugguacuggccaaacugacguuaggacgcucugcucacuccacgggguuuuugaucuguccagauguacguguucgugugagcccggcugggguggaccuacaugcucugaccccacugaugcggaaaucccaccuucguccccaccaucggcuucaggcucuuguccugacgauugcaacgaucagggaaggugugugcguggccgcuguguuuguuuuccgggguauacgggcccuucauguggguggccuuccugcccaggugauugccaaggccgcgggaggugcgugcaggggguguguguguguagggccggguucucgggaccugauugcagccagcguuccuguccgcggggcuguagccagagaggucggugcgaaggaggaaggugugugugcgauccugguuauaccggagaugauugugguaugcggucgugcccucgaggauguagccagcgagggagaugcgaaaaugguaggugugugugcaauccagguuauacaggcgaggauuguggggugcggaguuguccucgcgggugcagccaacgggguagguguaaggauggaagaugugugugcgaucccggcuacacuggagaggauugugggacucguagcugcccaugggauugcggcgaagggggcagauguguggacgggagaugugucuguuggccgggcuacacaggagaagacugcagcaccaggacgugcccacgggacugucgaggccgcggaagaugcgaggauggggagugcauuugcgauaccggguacuccggggacgauugcggcguucgaagcugcccaggugacuguaaucaaagagggcgcugcgaagacggaagaugcguaugcuggccuggguauacaggaacagauugcgggagucgagcaugcccucgcgauuguagaggccguggaaggugugaaaauggggucuguguguguaaugcgggauauucuggcgaggacugcggcguccgaaguugccccggugacugucgagggagaggcaggugcgaaucaggcagguguaugugcuggcccggguauacuggacgggacuguggcacaagggcgugcccgggugacugucgaggacguggucgcuguguagaugggagauguguauguaacccagguuucaccggcgaggauugugggucuaggagguguccuggcgauugccggggacauggccuuugcgaggacggugugugugugugcgaugccggcuacucuggugaggacugcagcacccgaagcugccccggggguugcagaggaaggggucagugccuggaugggaggugcguaugugaggacggguauuccggggaggauugcggggucagacaaugccccaacgacugcucacagcaugggguuugccaggacgggguguguaucuguugggaagguuacguuagcgaggacugcucaauucgaacuugcccaucuaacugucaugguagaggucguugugaagaaggccggugccugugugaucccggauauacagguccgacuugcgcgacucgaauguguccagccgacugucgggggcgaggccguuguguccagggggugugucuaugccacgugggguacggcggagaggauuguggacaggaagaaccaccagcuagcgcuugcccaggaggcuguggaccacgugaacuguguagagccggucagugugucuguguugaagguuuccgagggccagauugcgcuauucagaccugcccuggggacugccggggccgaggcgaaugucaugaugggagcugcgugugcaaggauggcuacgccggggaagauugcggugaggaaguuccuacaauugaagggaugagaaugcacuuacuggaagaaacgacaguucgcacagaguggacuccugcacccggcccaguggaugccuacgagauccaguuuauacccacgacugaaggagcaucgccuccauuuacagcccgagucccauccucugcgucagccuacgaucagcgaggucuggcuccuggacaagaauaucaagugaccguucgggcgcugagggggacuuccuggggacuccccgcuucuaaaacuaucaccacgaugauugaugggccacaggaucugcgagugguggcugucacaccgacaaccuuagaauuaggguggcuaagaccccaggcagaaguggaccgcuucguaguuucuuacguaucugcugguaaucaaagaguacguuuggagguuccuccagaagcugacggaacccuuuugaccgacuuaaugccagggguugaguauguuguaaccguuacugcugaaagagguagggcagucuccuacccagcaucaguacgcgcuaauacuggaagcagccccuuaggccuccuagguacuaccgacgagccaccaccgagcggacccagcacgacccagggugcacaggcgccacuguuacaacagaggccacaggaacucggcgaacugagggugcugggacgagacgagacuggcagacugagagucguguggacggcccagccugauacauuugcauauuuccagcugagaaugagggucccagaaggcccuggagcccaugaggagguacuacccggagaugugagacaagcccugguaccccccccuccgccuggaacgccuuaugaguuaucuuuacauggaguaccccccggugguaaaccuucugaccccauuauuuaccagggaauuauggauaaggacgaggagaagcccgggaaaaguucaggccccccuagacugggugaacuuaccguuacagauagaaccuccgacagcuugcuccugcgauggacagucccugagggggaguuugacaguuucgugauucaguacaaggauagagauggucagccacaggucgugccaguggaaggcccucaacguagcgcugugauuacuucucuggacccaggacgaaaauauaaguucguacuuuaugguuucgugggaaaaaaaaggcacgggccccucgucgcagaagcaaagauacuaccgcaaucugacccuagucccgggacucccccucaccucgguaaccuguggguaacugauccaacccccgauucacuucaccugucuuggaccguucccgagggacaguucgauaccuuuauggugcaguacagggacagagauggccggccccagguaguccccguggagggaccagaacgaucuuucgugguaaguagccuggauccugaucauaaauaccguuucacccuguucggaaucgccaauaaaaagcguuacggcccuuuaacugcugacgggacaaccgcccccgagaggaaggaggagccacccagaccagaguuccuggaacaaccacugcuuggcgaacucacugucacaggugucacucccgauucucugcggcuuuccuggacuguggcccaaggcccuuucgacucuuucaugguacaguauaaagaugcacaaggccaaccgcaagcaguuccuguagcgggcgaugagaacgaggugacaguuccuggacuagacccagauagaaaguacaagaugaaccuauacggauugaggggacgucagagaguugguccagaauccguuguagcgaagaccgccccacaagaggacguggacgaaacccccaguccuaccgaacuggggacagaggccccagaaagucccgaagagccgcuccuaggagagcuuaccgugaccgguagcagcccagacucccuuuccuuguucuggacagugccccaagguaguuuugacucuuucacuguucaauacaaggauagagacggaagaccacgcgcugugagagucggagguaaggagucugaaguuacuguuggaggucuugaaccaggacauaaauauaagaugcaucuguauggccuccacgaaggucagaggguggggccugucucugcuguaggaguaaccgcuccacaacaagaggagacucccccugcuacagaaucuccguuggagccgaggcugggugaacugacugugaccgacgugaccccuaacucagugggccuuucuuggacugugccugagggccaauuugauucuuucauuguucaguauaaggacaaggacggucaaccacaagucgugccuguagcggcugaccagcgugaagugacaguuuauaaccuagagccagagaggaaauacaagaugaacauguacggguugcaugacggccaacgaaugggcccucugucagucguuauaguuacugccccgcugccacccgccccugcuacugaagcaaguaaaccuccgcuggagccuagacuuggagaacuaacaguaaccgauaucacuccugauucaguaggcuuaucuuggacaguaccugaaggcgaguuugauaguuuugucguccaguauaaagauagagacggacaaccucaagucgugccuguagccgcugaccagagagaggugacaauaccggaccucgagcccucccgcaaauauaaguucuuacucuucggcauccaagacggcaagcgccggucccccguguccguggaagcaaagaccguggcgagaggagacgcuuccccuggggcuccaccacgccugggcgaacucuggguuaccgaucccaccccugacagccuacggcugagcuggacugugccggaagggcaauuugacuccuucguaguacaguuuaaagacaaagacggaccucaggucgugcccgucgaaggucacgagagaucugugaccgugacuccacuugaugcuggacggaaguacagauuuuuguuguacgggcugcucgggaagaaaagacauggcccacugacggccgauggaaccacagaggccagauccgcuauggaugacacagggacgaaacggcccccuaaaccuagguuaggagaagaacuccaaguuacuacugugacccagaacaguguuggccuaucauggacggugccggagggacaauuugacuccuuugugguucaguacaaggauagggacggccagccccaaguaguaccaguggagggcucccugagggaaguauccgucccaggucuggauccggcacaccgcuacaaauuacuauuguacggccuacaccaugguaaaagagugggccccauuagcgcugucgcaaucaccgccgguagagaggagacagagacagaaacgacagcacccaccccccccgcgcccgaaccacaucucggcgagcuuaccguugaagaggccacuucucauacauuacaucugucuuggaugguaacagaaggagaauuugacuccuuugagauucaauauacugaccgagauggacaauugcaaauggugagaauuggcggggaucgcaacgacauuacacugaguggacuggagucugaucaccgcuaccuggugacucucuauggguucagcgacggcaagcacgugggccccguacacguugaggcacuaaccguccccgaagaagagaaaccauccgaaccuccuacagcuacgccggaaccucccauuaaaccuagacucggggagcucacugugacugacgccacuccagauagccugucacugucguggaccguaccagagggacaauuugaucacuuccucguucaguaccgcaacggugacggccagccuaaggccguucgcguacccgggcacgaagaaggugucacuauuucuggacuggagccugaucauaaauauaagaugaauuuguauggauuucacggcggacaacgaaugggcccugugagcguggucggcgugacugcugcugaagaagagacacccucgccaacggaaccgucaauggaggccccugagcccgccgaagaaccucuauuaggagaauuaaccguuacagguagcucuccugacucauuaagucucucuuggacagucccccagggaagguuugauaguuucaccgugcaguacaaggaccgugacgggcgaccccaggucgucagggugggaggcgaagagagugaaguuacggucggaggauuagagcccggaaggaaauacaaaaugcaucuguauggguugcacgaggguaggcgggugggaccagucagcgcugugggcguuacagcacccgaagaggaaaguccagacgcuccccuggcaaagcucagacuuggucagaugacuguccgcgauaucaccagcgauucuuuaucucucucauggaccgugcccgagggccaauucgaucacuuucuggugcaauuuaaaaacggcgacggccagcccaaagcugugagagugcccggccacgaggacggcgugacuaucucuggccuggaaccagaucacaaauacaaaaugaaccuguacgguuuccauggagggcagcggguuggaccaguuagugccgugggccugaccgcacccggaaaggacgaggagauggcuccagcuucuaccgaaccaccuacccccgaaccucccaucaaaccccgacuagaagaacugacaguaaccgacgccacuccagacagccugucucucagcuggacggugcccgagggacaauuugaucacuuucucgugcaguacaaaaauggggacggccagcccaaagcaacccgggucccuggccacgaggaccgcgugaccauuucuggguuagagcccgauaacaaguauaaaaugaaucuauacggguuucacggugggcagagaguuggaccagugucagccaucggagugacagccgcagaagaggaaacaccaucaccaacugaaccguccauggaagccccugagcccccugaagaaccucuacucggggaacugacagugaccgggaguagcccugacucacucucuuugaguuggacaguaccacaaggucguuucgacagcuucaccgugcaauacaaggauagagacgggcgcccucaagucguacggguugggggagaagaauccgaaguaacggucgggggccuggaaccaggaagaaaauauaagaugcauuuauaugggcuacacgaaggacgccgcgucggcccggugaguacagugggagugacggccccgcaagaagacguggaugagacccccagcccuacagaaccaggaacugaggccccaggaccuccagaagaaccacuguuaggugaacugaccgugaccggaagcuccccugauagcuugucucuaucauggacugucccacaaggucgcuuugauucuuuuacuguacaauacaaagacagagauggaagaccccaggcggugagaguggggggacaggaguccaaagugaccguucggggauuggaaccaggaaggaaauauaaaaugcaccuguacggauugcaugagggccgacgacucgggcccguuagcgcagugggaguaacggaggacgaggccgagaccacccaagccgucccuaccaugacuccagaaccuccaauuaagccucgcuuaggugagcucacaaugacagacgcgacaccugacucacuaucauugucuuggaccgucccugaagggcaauucgaccauuuuuuaguacaauaucgcaacggagauggccagccaaaagcuguacgaguccccggucacgaagacggcguaacaauuucuggacuggagccugaccauaaauacaaaaugaaccuguacggcuuucauggaggucaacgugucgggcccauuagcguaauuggaguuacagccgccgaagaggaaacuccauccccgacggagcucaguacugaagcacccgaaccaccagaggagccccuucugggcgaacugacugugacaggaucuagucccgacucccucucacuguccuggaccauaccacagggucauuucgauucauucacaguucaauauaaagauagagacggccggccucaggugaugagagugcgaggggaggagagcgaagucaccguugggggucuggaaccugggaggaaguauaaaaugcauuuauaugggcuucaugagggaaggagaguuggcccggugagcacaguuggcgugaccgaggacgaggccgagacaacccaggcugugccaaccacgacccccgagccacccaacaaaccuagacucggcgaacugacagucacagaugcuacgccugauucccuaucacugagcuggauggugccugaaggacaguucgaucacuuccuggugcaguacagaaauggcgacggacagccaaaagugguucgaguuccugggcacgaggacgguguaaccauuucuggacuggagcccgaucauaaguacaagaugaaccuguauggcuuucacggugggcagcgcguuggaccuauuagugugauuggugucaccgcggccgaagaggaaaccccagcaccuacugaaccaucgacugaggcuccugaacccccggaagaaccacuguuaggugaacuuaccguuacgggcucaucccccgacucacuaucucuaucuuggaccauuccccagggacgcuuugauagcuuuaccgugcaguauaaagaucgggacggacggccacagguugugcgcgugaggggagaggagucagaagucaccguagguggacucgagccuggauguaaguacaaaaugcaccuguauggccuacacgagggacagcgagugggacccgugucagcggucggcgugaccgcgccuaaagaugaggccgaaacaacacaagcuguacccacaaugaccccugaaccucccauuaaacccagacugggcgagcugacaguuaccgacgcaaccccugacucccuaagucucucuuggauggugccugaggggcaguuugaucacuuuuuggugcaguacaggaacggcgaugggcagccaaaggccguaagagucccuggucaugaagacggagucaccauuuccggacuggagccagaucacaaauacaagaugaaucuuuauggauuccacggugggcagcgaguuggccccgucagugccauuggagugacagaagaagaaaccccaagcccuaccgaaccauccaccgaagccccagaagcacccgaggaaccucugcuaggugagcugacuguuaccgguuccucccccgacucucugagucugagcuggacgguuccgcagggccguuuugauagcuuuaccgugcaguauaaagauagagauggccagccucagguuguccgaguuaggggggaagaaucugaagugacagugggcgggcuggagccuggucgaaaguacaagaugcaucuguauggacuccaugagggccaaaggguugggccaguuucuacagucggaaucacugcaccgcugccuacaccauugccuguagaaccucgucuuggcgagcuugccguugcggcuguaacuagugacucagucggccuguccuggacaguggcccagggaccauucgacucuuuucucgugcaguaccgcgaugcucagggacagccucaagcaguuccugugucaggggaccuucgcgccguggccgugucaggauuggauccggcuagaaaauacaaguucuugcuguuugggcuccagaauggaaagcggcacggacccguccccguagaagcccgcaccgcacccgauaccaagccuucgccucgacuuggcgagcugacagugacagaugccacuccggauucuguggguuugagcuggacuguucccgaaggcgaauuugacucuuucguagugcaguacaaggauaaagacgguaggcuccaaguagugccuguagccgcaaaccagagagaaguuacagugcagggacuggaacccucaagaaaauaucguuuccugcucuacggacucucgggucggaagcgucucggaccaauaucagcugauuccacaacagcuccucuugagaaagaauuaccuccccaccuuggagagcugaccguagcugaggagacaucaaguucccugcgucuaucuuggaccgucgcucagggcccauucgauaguuuuguggugcaguauagagacacggacggccagccacgcgcaguaccgguggccgcugaccagagaacagugaccguugaagaccuggaaccuggcaaaaaguacaaauuuuugcuguauggauugcuuggaggaaagaggcuggguccagucagcgcccuggguaugaccgcaccugaagaagauacaccggcgccugaauuagcaccagaagccccugaaccgccugaagagccaagacugggggugcugaccguaacggauacaaccccagauucaaugagacucuccuggagcgucgcccaaggacccuucgauagcuucgucguucaauaugaggacacaaacgggcagccucaagcauugcucgucgacggagaccagucaaaaauacugaucaguggcuuggaacccucaacuccguacagauuucucuuguauggguugcacgaaggaaaacgacucgguccccucagcgccgaaggaacaacagggcuggcccccgcaggacagaccucagaagaaucacgacccagacugucucaacuuucuguuacugacgucacgacuagcagucuucgacugaauugggaggccccaccuggcgcauuugauaguuuccuacuucgguuuggagucccuucaccuucuacucucgagccccaucccaggcccuuguuacaacgcgaacuuauggugcccggaacucgccauuccgccgugcuacgugaccuaagaucuggcacucuauauucccucacacuuuauggucugcgcggaccacacaaggcagacucuauccaaggcaccgcuagaacacugagucccgugcucgaaucucccagggauuugcaguuuucugagauucgcgaaacuucggcuaaagugaauuggaugcccccgcccucccgugcagauucauucaaagucaguuaccagcucgccgauggaggcgagccucaguccgugcaaguugauggacaagcacguacucagaagcuccaaggcuugauccccggugcccgguaugaggugacuguggucucaguucgugguuucgaggagucagaaccucugacuggauuucugacaacagugcccgacgggccaacucaauugagagcuuugaaccuuaccgaaggauucgccguccuccacuggaagccgccucagaauccgguggauacuuacgaugugcaagugacagcuccuggcgcacccccccugcaggcagaaacaccuggcucagcuguggauuacccucuccaugaucucguuuuacauaccaauuacacagcuacugugcgcggccugagggggccaaaucuuacaucacccgcuucuauuacuuucacaacagggcuggaagcuccgagggaucucgaggccaaggaggucaccccccgaaccgccuugcucacuuggaccgagccuccagugaggccugccggcuaccugcuaucuuuucauacaccuggcggacaaaaccaagagauucugcuacccggagggauuacaagccaccagcugcucggacuuuucccuaguacguccuacaacgcccggcuccaggcaauguggggucagagccuacugccacccgucucgaccagcuuuacgaccggaggacucagaauuccuuuuccucgagacugcggcgaggagaugcagaauggcgcuggggcaaguagaacaaguacgauuuucuugaauggaaaucgggaaagacccuuaaacgucuuuugcgacauggaaaccgacggaggaggaugguuaguguuccagcgacgaauggacggacaaacugacuucuggcgggacugggaagauuaugcacacggguucggaaacaucagcggcgaguuuuggcugggaaaugaagcccuccauagucucacccaagccggcgauuacagcaugcguguggauuuaagggcuggagacgaggccguauuugcucaguacgauuccuuucacguugauucagcugccgaauacuaucgacuucaccuggaagguuaucacggcacugcaggcgauaguaugagcuaccacuccggcuccguguucuccgcucgagaucgggacccuaauucucugcuuaucaguugugcugucaguuaucguggagcuuggugguaucggaauugucacuacgcuaaccugaacggccuguacgggucaacaguggaccaucagggugugucuugguaucauuggaaaggcuuugaguucaguguccccuucacagaaaugaaacugaggccuagaaauuucaggaguccagcuggcggagguuag

SEQ ID NO: 201575 - protein, 286 aa, Artificial Sequence
  derived and/or modified sequence
MSKGQSGLGKSTLVNTLFKSQVSRKASSWNREEKIPKTVEIKAIGHVIEEGGVKMKLTVIDTPGFGDQINNENCWEPIEKYINEQYEKFLKEEVNIARKKRIPDTRVHCCLYFISPTGHSLRPLDLEFMKHLSKVVNIIPVIAKADTMTLEEKSEFKQRVRKELEVNGIEFYPQKEFDEDLEDKTENDKIRQESMPFAVVGSDKEYQVNGKRVLGRKTPWGIIEVENLNHCEFALLRDFVIRTHLQDLKEVTHNIHYETYRAKRLNDNGGLPPVSVDTEESHDSNP

SEQ ID NO: 201576 - protein, 83 aa, Artificial Sequence
  derived and/or modified sequence
MSKGLPETRTDAAMSELVPEPRPKPAVPMKPMSINSNLLGYIGIDTIIEQMRKKTMKTGFDFNIMVVAGSPLRSTSMSSTRSS

SEQ ID NO: 201577 - protein, 350 aa, Artificial Sequence
  derived and/or modified sequence
MSKGLPETRTDAAMSELVPEPRPKPAVPMKPMSINSNLLGYIGIDTIIEQMRKKTMKTGFDFNIMVVGQSGLGKSTLVNTLFKSQVSRKASSWNREEKIPKTVEIKAIGHVIEEGGVKMKLTVIDTPGFGDQINNENCWEPIEKYINEQYEKFLKEEVNIARKKRIPDTRVHCCLYFISPTGHSLRPLDLEFMKHLSKVVNIIPVIAKADTMTLEEKSEFKQRVRKELEVNGIEFYPQKEFDEDLEDKTENDKIRQESMPFAVVGSDKEYQVNGKRVLGRKTPWGIIEVENLNHCEFALLRDFVIRTHLQDLKEVTHNIHYETYRAKRLNDNGGLPPVSVDTEESHDSNP

SEQ ID NO: 201578 - protein, 178 aa, Artificial Sequence
  derived and/or modified sequence
MSELVPEPRPKPAVPMKPMSINSNLLGYIGIDTIIEQMRKKTMKTGFDFNIMVVGQSGLGKSTLVNTLFKSQVSRKASSWNREEKIPKTVEIKAIGHVIEEGGVKMKLTVIDTPGFGDQINNENCWEPIEKYINEQYEKFLKEEVNIARKKRIPDTRVHCCLYFISPTGHSLRPLDLE

SEQ ID NO: 201579 - DNA, 861 bp, Artificial Sequence
  derived and/or modified sequence
atgagcaaaggtcaaagtggtctaggaaaatcgactctggtaaatacactgtttaagagccaagtgtcccggaaggcctcttcttggaatagggaagaaaaaatcccaaaaacggtggagattaaggcaatcggacacgttatcgaagagggtggagtgaagatgaagcttacagttatcgacacaccgggatttggcgatcagatcaacaacgagaattgctgggagcccattgaaaagtacatcaacgaacaatacgaaaagttcctgaaggaggaggtgaatatcgctagaaagaagagaattccagacactcgagtccattgctgcctgtatttcattagtcctacgggccacagcctacgccccttagacttggaatttatgaagcatctgtccaaggtggtgaatattattccggttattgcaaaggcagacactatgacgctggaagagaagtccgagttcaaacagagggttcggaaggaactcgaggtaaacggcattgagttctacccccagaaagagtttgatgaggacctcgaagacaagaccgagaatgacaagattagacaagaatctatgccttttgcagtcgttggctctgataaagagtatcaggtaaacgggaaaagggttttgggacggaaaactccatggggaataatagaagtggaaaacctgaaccactgtgagttcgcgcttctccgggactttgtgattcggacccacctacaagacctgaaggaagtgacccacaacatacattacgagacgtacagggccaagcgtctgaacgataatggaggtctgccccctgtgtcagttgataccgaagagagtcacgactcgaacccttag

SEQ ID NO: 201580 - DNA, 252 bp, Artificial Sequence
  derived and/or modified sequence
atgagcaagggactgcctgaaacgagaacggacgcggcaatgtctgagctggttccggagccacggcctaagccggcagtccccatgaaacctatgtccatcaacagtaaccttcttgggtacataggcatagatacaattatcgaacaaatgcgcaagaaaacgatgaaaacagggttcgacttcaatataatggtggtagcgggaagtccactcagaagtacctccatgtcgtcaactagaagctcatag

SEQ ID NO: 201581 - DNA, 1053 bp, Artificial Sequence
  derived and/or modified sequence
atgtcaaagggcctgcccgagaccaggactgatgctgccatgtcagagctggtcccagagccaaggccaaagcctgctgtgcccatgaagcctatgtctatcaacagtaatcttctgggctacatcggcattgacacaatcatcgaacagatgcgaaaaaaaacaatgaaaacgggttttgatttcaatattatggtggttggccagtccgggttgggtaagagcaccctcgtgaacaccctgttcaaatcgcaagtatcccggaaagcatcatcttggaaccgagaagaaaaaattcccaagactgtagagattaaggccatcgggcacgtgatagaggagggcggcgtgaagatgaagttgactgtcattgacacaccaggttttggcgaccagattaacaatgagaattgttgggagcccatagaaaagtacatcaatgaacagtacgaaaagttcttgaaagaagaagttaacatagcacgcaagaaacgcattcctgatactagggtccactgttgtctttactttataagcccgacagggcactcattgcggcctttggacctggaatttatgaagcacttatcaaaggtcgttaacatcattcctgtgattgctaaggccgataccatgaccctggaggaaaagtcagaatttaaacagagggtacgcaaggaactggaagtaaacggcatcgagttttaccctcagaaggagttcgatgaggatctagaggacaaaaccgagaacgataagatccggcaggaaagtatgcccttcgctgtggtgggaagtgacaaagagtaccaggtcaatggaaagcgcgtcttaggaaggaaaacaccctggggcataatcgaagtggagaatctcaaccattgtgagtttgccctgctgcgcgattttgtcatccgcacgcacctccaggacctgaaggaagtaactcataatatccattatgagacgtatcgagctaaaaggctgaatgataacggaggtctcccccccgtttctgttgatacagaagaatcgcacgacagcaatccatag

SEQ ID NO: 201582 - DNA, 537 bp, Artificial Sequence
  derived and/or modified sequence
atgtccgaattggtgccagagcccaggcctaaacccgctgtccctatgaaacccatgtccatcaatagcaatcttctcgggtacatcggcatcgatactattattgaacagatgcggaagaaaaccatgaaaacaggcttcgattttaacatcatggtcgtggggcagtctggtctgggcaaatccacccttgttaacactctcttcaagagtcaggtgagtcgtaaggcgagcagctggaatcgagaggagaaaattcccaagaccgtcgagatcaaagctatcggacacgtgatcgaggaagggggggtgaaaatgaaactgaccgtgatcgacactccaggtttcggagatcaaatcaacaacgaaaattgctgggagccaatcgagaaatacataaacgaacagtatgagaaatttcttaaagaggaggtgaacattgctagaaagaagagaattcctgacacaagagtgcactgttgcctgtacttcatttcgccaaccggacacagcttgagaccactggacctcgaatag

SEQ ID NO: 201583 - DNA, 861 bp, Artificial Sequence
  derived and/or modified sequence
atgagcaagggccagagcggcctgggcaagagcaccctggtgaacaccctcttcaagagccaggtgtccaggaaggccagctcctggaaccgggaggagaagatccccaagacagtggagatcaaggccatcggccacgtgattgaggagggcggcgtgaagatgaagctgaccgtcatcgacaccccaggctttggagaccagatcaacaatgaaaactgctgggagcccatcgagaagtacatcaatgagcagtatgagaagttcctgaaggaggaggtgaacatcgccaggaagaagaggatcccagacaccagggtgcactgctgcctgtacttcatcagccccaccggccacagcctgcggcccctggacctggagttcatgaagcacctgagcaaggtggtgaacatcatccctgtgattgccaaggctgacaccatgaccctggaggagaagtctgagttcaagcagagggtgaggaaggagctggaggtgaatggaattgagttctacccccagaaggagtttgatgaggacctggaggacaagacagaaaatgacaagatccggcaggagagcatgccctttgctgtggtgggcagtgacaaggagtaccaggtgaatggcaagagggtgctgggcaggaagaccccctggggcatcatcgaggtggagaacctgaaccactgtgaatttgccctgctgcgggactttgtgatccgcacccacctgcaggacctgaaggaggtgacccacaacatccactatgagacctaccgggccaagaggctgaatgacaatggaggcctgccccctgtgtctgtggacacagaggagagccatgacagcaacccctag

SEQ ID NO: 201584 - DNA, 252 bp, Artificial Sequence
  derived and/or modified sequence
atgagcaagggcctgcctgagaccaggacagatgctgccatgtctgagctggtgcctgagccccggcccaagccagctgtgcccatgaagcccatgagcatcaacagcaacctgctgggctacatcggcatcgacaccatcatcgagcagatgaggaagaagaccatgaagacaggctttgacttcaacatcatggtggtggccggcagccccctgcggagcacctccatgagcagcaccaggagcagctag

SEQ ID NO: 201585 - DNA, 1053 bp, Artificial Sequence
  derived and/or modified sequence
atgagcaagggcctgcctgagaccaggacagatgctgccatgtctgagctggtgcctgagccccggcccaagccagctgtgcccatgaagcccatgagcatcaacagcaacctgctgggctacatcggcatcgacaccatcatcgagcagatgaggaagaagaccatgaagacaggctttgacttcaacatcatggtggtgggccagagcggcctgggcaagagcaccctggtgaacaccctcttcaagagccaggtgtccaggaaggccagctcctggaaccgggaggagaagatccccaagacagtggagatcaaggccatcggccacgtgattgaggagggcggcgtgaagatgaagctgaccgtcatcgacaccccaggctttggagaccagatcaacaatgaaaactgctgggagcccatcgagaagtacatcaatgagcagtatgagaagttcctgaaggaggaggtgaacatcgccaggaagaagaggatcccagacaccagggtgcactgctgcctgtacttcatcagccccaccggccacagcctgcggcccctggacctggagttcatgaagcacctgagcaaggtggtgaacatcatccctgtgattgccaaggctgacaccatgaccctggaggagaagtctgagttcaagcagagggtgaggaaggagctggaggtgaatggaattgagttctacccccagaaggagtttgatgaggacctggaggacaagacagaaaatgacaagatccggcaggagagcatgccctttgctgtggtgggcagtgacaaggagtaccaggtgaatggcaagagggtgctgggcaggaagaccccctggggcatcatcgaggtggagaacctgaaccactgtgaatttgccctgctgcgggactttgtgatccgcacccacctgcaggacctgaaggaggtgacccacaacatccactatgagacctaccgggccaagaggctgaatgacaatggaggcctgccccctgtgtctgtggacacagaggagagccatgacagcaacccctag

SEQ ID NO: 201586 - DNA, 537 bp, Artificial Sequence
  derived and/or modified sequence
atgtctgagctggtgcctgagccccggcccaagccagctgtgcccatgaagcccatgagcatcaacagcaacctgctgggctacatcggcatcgacaccatcatcgagcagatgaggaagaagaccatgaagacaggctttgacttcaacatcatggtggtgggccagagcggcctgggcaagagcaccctggtgaacaccctcttcaagagccaggtgtccaggaaggccagctcctggaaccgggaggagaagatccccaagacagtggagatcaaggccatcggccacgtgattgaggagggcggcgtgaagatgaagctgactgtgattgacaccccaggctttggagaccagatcaacaatgaaaactgctgggagcccatcgagaagtacatcaatgagcagtatgagaagttcctgaaggaggaggtgaacatcgccaggaagaagaggatcccagacaccagggtgcactgctgcctgtacttcatcagccccaccggccacagcctgcggcccctggacctggagtag

SEQ ID NO: 201587 - DNA, 861 bp, Artificial Sequence
  derived and/or modified sequence
atgagcaagggccagagcggcctgggcaagagcaccctggtgaacacgctctttaagagccaagtgtctcgtaaagcctcttcctggaacagggaggagaagatcccaaaaacagtggaaatcaaagccatcgggcacgttattgaagaaggaggagttaagatgaagttaactgtaattgacactccagggtttggagaccagatcaacaacgagaactgctgggagcctattgagaagtatataaatgaacagtatgaaaagttccttaaggaggaggtgaatatagctcgaaagaaacggatacccgatacacgcgtgcattgttgcctttactttatcagcccgaccgggcactctctgcgtcctttggacctcgagttcatgaaacacctgagcaaggtggttaacataattcccgtcattgccaaagccgacaccatgaccctggaagaaaagtcggagttcaagcagagagtgcgcaaggaactggaggtgaatggaatcgagttttacccacagaaggagtttgatgaggatctcgaggacaagactgagaacgacaagatacgccaagagagcatgcccttcgctgtcgtgggctccgacaaagaataccaggtcaacggtaagcgggttttaggcagaaagactccctggggcattattgaagtcgaaaacttaaatcactgtgagttcgccctcctacgggattttgtcatcaggacccacctgcaggaccttaaggaagtgactcacaatattcactacgagacctaccgtgcaaaacgactgaatgacaacggcgggctgccaccagtcagcgttgatactgaggagtcccacgattcgaatccatag

SEQ ID NO: 201588 - DNA, 252 bp, Artificial Sequence
  derived and/or modified sequence
atgagcaagggcctgcccgagacccggaccgacgccgccatgagcgagcttgtgccagaaccaagaccgaagcccgctgttcctatgaaacctatgagcattaattccaacctgctcggatatatcggtattgatacgatcatcgaacaaatgagaaagaaaaccatgaagacgggctttgattttaacattatggttgttgcggggagccctttaaggtctacaagtatgtcaagcactaggagttcctag

SEQ ID NO: 201589 - DNA, 1053 bp, Artificial Sequence
  derived and/or modified sequence
atgagcaagggcctgcccgagacccggaccgacgccgccatgagcgagctggtcccagaacctcgtccaaagcctgccgtgccaatgaagcccatgagcatcaactcaaatctattaggctacattggaatagatacaattattgaacaaatgaggaagaaaactatgaagacaggcttcgactttaacatcatggtagtgggccagtcaggcttaggtaaatctactttagttaacactctgttcaaatcccaggtgtctcggaaggcctctagctggaaccgcgaagagaagatccccaaaacagtcgaaattaaggcaataggtcacgtcatcgaggagggtggtgttaagatgaagctgaccgtgatagacacacccggctttggtgatcaaattaacaacgagaattgctgggaacctattgagaagtatatcaacgaacaatacgagaaattcctgaaggaggaggtgaatattgctaggaagaagcgaatcccagacacccgagtgcactgttgcctgtattttatttctccaactggccacagtctgaggcccctggacctagagtttatgaaacacttatcaaaggtagtcaatataataccggtaattgccaaggccgatactatgaccctcgaggaaaagtctgaattcaagcagcgtgttcgcaaagaattagaagtaaatggcattgagttttacccacaaaaggaatttgatgaagatctggaggataagacagaaaatgacaagatccggcaagaaagcatgccttttgctgtggtcggatctgacaaagagtaccaagtgaacggcaaaagggttctggggaggaagaccccatggggaattattgaggttgagaacctgaaccattgtgagtttgccctcctcagggatttcgtcattcgcacgcacctgcaggacttaaaagaggttactcacaatatacactacgaaacttaccgcgctaaaagactgaacgataatggcggactccctcctgtcagtgtggatacggaagaatcccacgatagtaacccttag

SEQ ID NO: 201590 - DNA, 537 bp, Artificial Sequence
  derived and/or modified sequence
atgagcgagctggtgcccgagccccggcccaagcccgccgtgcccatgaaacctatgagcatcaacagtaacctgcttggatatattggcatcgacacaataatcgaacagatgaggaaaaaaacgatgaagactggcttcgactttaatattatggttgtcggacagtccggcctgggaaaatcgacccttgttaacaccctgttcaagtcacaagtgagtcggaaagctagcagttggaaccgggaggagaagattccaaagaccgtggagattaaggctatcggacacgtgatagaagaggggggagtcaaaatgaaactaaccgtcatcgacacacctggcttcggagaccaaatcaataatgagaactgttgggaacccattgagaagtacatcaatgaacagtatgagaagttcctgaaagaggaggttaacattgcacgcaagaagagaatccccgacactagggtccactgctgtctctatttcatcagccctaccggccactcattaagacccctagacctagaatag

SEQ ID NO: 201591 - DNA, 861 bp, Artificial Sequence
  derived and/or modified sequence
atgtccaaggggcagtctggcttggggaaatcaacacttgtgaatacactgttcaagtctcaggttagtcgcaaggcttcttcctggaaccgtgaggagaaaatccccaagacggtggaaatcaaagccatcggccatgtcatagaggagggcggagtcaaaatgaaactgaccgtcatagatacaccaggattcggcgatcaaattaacaacgagaactgttgggagcctattgaaaagtatattaacgaacagtacgaaaagtttttaaaagaggaggtcaacattgccagaaagaaacgcatcccagacacccgcgtgcattgttgcttgtactttatctcccccacgggccatagtttgcggccattggatttggagtttatgaaacatctctccaaggtggtgaatataattccagttatcgccaaggccgacaccatgactctggaggaaaagagcgagtttaagcagcgagtgaggaaggaattggaggttaatggtattgagttttacccccagaaagagttcgacgaagatcttgaagacaagaccgagaacgacaagattcgtcaggagtccatgcccttcgccgtagtcgggagtgataaggaataccaggtgaacggcaaaagggtactcggcaggaagactccctggggaattattgaagtagaaaatttaaaccattgtgagtttgctctactgagggattttgtgatccgaacccatctgcaggacctcaaagaagtgactcataacattcactacgagacatacagagcaaaaagactgaacgataatggtggcctcccccctgtgtccgtagatacagaggaatcccacgattctaatccttag

SEQ ID NO: 201592 - DNA, 252 bp, Artificial Sequence
  derived and/or modified sequence
atgagcaaagggctgcccgaaaccagaacggacgcagcaatgtctgagttagttccggaacccaggcctaaacctgccgtgcctatgaaaccaatgtccattaattctaacctgctgggatatatcggcatcgacacaatcatcgagcagatgcgaaagaagaccatgaaaacaggcttcgactttaacatcatggtcgtcgccggatctccattacggagcacgagcatgtcaagcactagatccagttag

SEQ ID NO: 201593 - DNA, 1053 bp, Artificial Sequence
  derived and/or modified sequence
atgtcaaaagggctgcccgaaactcggacggacgcagctatgagcgagctcgtccccgaaccaagacccaagcccgcagtgcccatgaagccaatgagtattaatagtaatctgcttggctatatcggtattgatactataatagagcagatgcgaaaaaaaacaatgaagaccgggtttgattttaacattatggtcgttggacaatccggccttggcaagagcaccttggtaaatactctgttcaaaagtcaggtgagccggaaagccagctcctggaaccgcgaggaaaagattccaaaaaccgtcgaaatcaaggccataggacacgttatcgaagagggaggcgtgaagatgaagctgactgtcatcgacactcctggttttggcgaccagattaacaatgagaactgttgggaacccatcgagaagtatataaacgagcagtacgagaaatttctgaaggaagaagtgaatattgctcgtaagaagcgcatacctgatactagggtgcattgttgtctctatttcatctcacctacaggtcattctttgcggcctctggatctggaatttatgaaacatctttccaaggtggttaatataatccccgtcatagcgaaggcagatactatgacactcgaggagaaatctgaatttaaacagcgggtgagaaaggaattggaggttaatggcatagagttctatccgcaaaaggagtttgatgaggacctcgaagataaaactgaaaatgacaagatccgacaggaatccatgccctttgctgtggtggggtcggataaggagtatcaggtaaatggaaaacgcgtgctgggaagaaagacaccctggggcattatcgaagtggagaacctcaaccactgcgaatttgcgctgctaagagattttgtgatccggacacaccttcaggaccttaaggaagtgacccacaacatacactatgagacataccgtgccaagcgtctgaatgataatggaggcctaccgccagtcagcgtggacaccgaagagagccatgactctaacccttag

SEQ ID NO: 201594 - DNA, 537 bp, Artificial Sequence
  derived and/or modified sequence
atgtctgagttggttcccgaacccagacccaaaccagctgtcccaatgaaacccatgtctatcaattccaatctgttaggatatataggtatcgacaccataattgagcagatgaggaaaaaaaccatgaagaccggattcgattttaatatcatggtggttgggcagtccggcctgggcaagagcacacttgtgaacactttattcaagtcacaggtatctcgcaaggcatcttcctggaatagagaagaaaaaatccctaaaaccgtggagattaaggctattgggcatgtcatcgaggaaggtggcgtcaagatgaaacttactgtgattgacacaccgggtttcggcgaccaaatcaacaacgaaaattgttgggaaccaatcgagaagtacattaatgaacaatacgagaagtttcttaaggaggaggttaacattgcccgaaagaagcgtatccccgacacaagggtgcactgttgcctatactttatttctcccacaggtcacagtctccggccactcgatctggagtag

SEQ ID NO: 201595 - DNA, 991 bp, Artificial Sequence
  derived and/or modified sequence
agcccgcgccccgctcagccttgcagccccgcgcccggagcatctccctggaggaacggagacaaaggaggattcatgtccaaaggccagagtggactgggcaaatcaacgctggtcaacacgctcttcaaatcccaagtgagccgcaaggcctccagctggaaccgggaggagaagatccccaagacagtggagatcaaagctatcgggcatgtgatagaggaaggcggtgtcaaaatgaagctgaccgtcatcgacaccccaggctttggagaccaaatcaacaatgaaaactgctgggagcccattgagaagtacatcaatgagcagtacgagaagttcctgaaggaggaggtcaacatcgccaggaagaaacgcatccctgacactcgtgtccactgctgcctttacttcatctctcccacaggacactccttgcgacctctggatcttgagttcatgaaacacctcagcaaggttgtgaacatcatccctgtcattgctaaggctgacaccatgaccctggaggagaagtctgaattcaagcaaagggttcgcaaggagcttgaagtaaatggcattgaattctacccccagaaggaatttgatgaggatttggaggataagacggagaatgacaaaatcaggcaggagagcatgccttttgctgtggtgggaagtgacaaggagtaccaagtgaatggcaagagggtcctcggccgaaaaactccatgggggatcatcgaagtggaaaacctcaaccactgtgagtttgccctgcttcgagactttgtcatcaggacccacctccaggacctcaaggaagtgacacacaacatccactatgagacttacagggccaagcggctcaatgacaatggaggcctccctccggtgagcgtggacacagaggaaagccacgacagtaacccatgacgaccacttctctgtgtcatcacacatacccacttcacacacacacatcccaaat

SEQ ID NO: 201596 - DNA, 4649 bp, Artificial Sequence
  derived and/or modified sequence
tgggaggagagcgcgaaggggcgaggcccgtttgcaggggccgctcggcccggggaagcccgcgccccgctcagccttgcagccccgcgcccggagcatctccctggaggaacggagacaaaggaggattcatgtccaaagggctcccagagaccaggacggacgcagccatgtcagagctggtgcctgagcccaggcctaagccagcggtgcccatgaagcccatgagcatcaactccaacctgctgggctacatcggcatcgacaccatcatcgagcagatgcgcaagaagaccatgaagaccggtttcgacttcaacatcatggtcgttggccagagtggactgggcaaatcaacgctggtcaacacgctcttcaaatcccaagtgagccgcaaggcctccagctggaaccgggaggagaagatccccaagacagtggagatcaaagctatcgggcatgtgatagaggaaggcggtgtcaaaatgaagctgaccgtcatcgacaccccaggctttggagaccaaatcaacaatgaaaactgctgggagcccattgagaagtacatcaatgagcagtacgagaagttcctgaaggaggaggtcaacatcgccaggaagaaacgcatccctgacactcgtgtccactgctgcctttacttcatctctcccacaggacactccttgcgacctctggatcttgagttcatgaaacacctcagcaaggttgtgaacatcatccctgtcattgctaaggctgacaccatgaccctggaggagaagtctgaattcaagcaaagggttcgcaaggagcttgaagtaaatggcattgaattctacccccagaaggaatttgatgaggatttggaggataagacggagaatgacaaaatcaggcaggagagcatgccttttgctgtggtgggaagtgacaaggagtaccaagtgaatggcaagagggtcctcggccgaaaaactccatgggggatcatcgaagtggaaaacctcaaccactgtgagtttgccctgcttcgagactttgtcatcaggacccacctccaggacctcaaggaagtgacacacaacatccactatgagacttacagggccaagcggctcaatgacaatggaggcctccctccggtgagcgtggacacagaggaaagccacgacagtaacccatgacgaccacttctctgtgtcatcacacatacccacttcacacacacacatcccaaataccaccaccaaccaccttcttcctctcaactctgtcccacaggcctgtctggtatttgtggagcatcttgtctgtgtgtgtgtgtgtgtgtgtgtgtgtgtgtgtgtgtgtgacagagagagagcgagagagcctgtgtgtgtgcatgcaggggtgaggtattttcactgccctccctggagagtcccttgtaagtttggctcctccatgcctgtccattatctgtctcctttccttgtgtcccaaaacaaagctgtttgcctcactcaggagatctgggggaggtttcatttaaaagtgctgggagcaggtgagccacaggcaactcttctctcggaacctgcacacaaactggggctatagagattctccaaggacagatggcagtggagctagacctgagtagggggcagggagttcaggacaaccctcctgtaagttgggggtggtctgggggtaaggctggggcttcctgggaaaaggaaggccatgagaaggcagagaagtaggccagagctgggttcttgcagaaagcatcagtgcctacaaatggagctccacccttcagtctgtgtcgtgttcagtgtcacaaagctaccacctgtcaccagagcctactgctgctctccactcaactggcctctgctgccaggccactgcctgtctctgcttccgactttgtcttctttctccctttccctccttccctcatacattgctttctctccctctcctgcgtgtctctgacatctctcacttccttttagatgaatctactttaggttcattcctatatttagcatttatgcccagtctacttccagaaatgactttagactgcctttcacataaaatcacaaaactacaggacagtacaaacagattgccagagaaatctgggtcaaagaaaggaataggaaagaaagtttctgtagtcaagcacctgaacaggccctgagctcacaggcagccaatgtaaagagggaaacacagtgagttatgcagttcccagtgtccagttaaaggaagcacacatgctagtcatgtgagacaaccttttattgggacatcaggttctagaactaattctaaagaagtatcagaaacaatatacataatttgtctttcttagtaatttggcttcaaagacaaatttttgaccacacctccgttttctccgtcagacttctctcccttctaagcaggcttctctgttgctccatttgcttcatacatacttgacctctcttttctattccccatcacttttgtgctgaagctaatcatatttatgtctgtctttctctacttttccctaattccctctcctcctgactcctgtagacattcccaatgatacccaccgtcatacatttaggcttttcttgcctttccctgaagccctgtatttattaatgcatatatttcccctgcttgttgtacaagtaagttactcttttcctttaatctgtaagattcatgaaattcggggccagggaaacagtttagccttagggaagggaaaacactaagtgaaactgtttacaataacctcatacaaccttctgtcccatctcctggttcagcctaggtgtttcactggtcctctatgaatcccagcacttataatcccagtcttttatcactcaggtgctaggaaaaaaaacatagactcaagacccaagattcaatggaccaggagaaaggggggcggtgatcaggtcaccagtgaccccaacctatgctctcggtctttcctggaggctgccaacccagccctcatcctcccttgctcacaaagttacagggtaggcacctgtcaggacagaacagcagcagcgctacagcccagaggttatacatttcaacagaacagggatccttggctactgtagaagcagtcctgtatggagaccttggaccagcaggggaagatctatgggcatgggaggtgggcgttggaaaggctgagtaggaatggtgcctggcacccctgaaccatgatctgagcctccctggagaaggtattttatatgtctgctgccagctgctggtctccacaccctcaaccgttctcaacccccctgcagggagaaggcctcctgggcactgtccttccacctgtgccagccaccccctgccccactgctgaatgaaggccatttcaagcgctgcttctcactccattcctctcagctgttattgctgcagggccaagccctttttagtgctgtgctcgtccagctcaccaccacagcccctctcagccctcagtaggtgggaggggccagctgcctctttaggccagttgcatcctccatttatccaaaccactcctctcctcccagtggagtggggttctgccagtacagccctactgcatcatctgcgtcagccggtcctagcccatctgcagggtgaaagaactcatcaagagctccttctgcccttgtaagcccatcccagctacttgtaaccatctctaagggcaatggcattgctccctacccattcatctgcatgagctactcttggcttccttaaagggtcaagaaagcaatttttctgcttactagattcattgagatcagctgtgtgagccccaaagtgggacaagggtgtctccttcattacttaaagatattcatgagggtgggtcactacagatgttggggagcaagggctaggatcactttttaaaaaatcaccacttgtggctgtcccagagtgcggttgtacatcctccccacctcataacgcagccactgaggaagagtggttttcctaagaagacattgctggagttgactttcttctgtccaaacaaacaaacaaaaactaaacacacacacaaacccccagaaacccacaatatgtacacgctaaggaaaaactagcacccttctgtccactcagcaataagagggatctcttcccacctaccctacctactcctacccccaacccccttccccattaatgtgagtaatgaattagcctgaccacaggtggtcactgtaggctaatggaaaatacccaagggagggcaaagccccccatcagatgcatgaatgtttgcgaatgttgactgccactgccccacacactgtgtctttatagaattcccctttgcccaccctcttcctgtctccacctggacacaacttgctcaaaggctggtgacttgtgggccattcatctacaaccaagtcctgatggagcaagaggcccacgcctaggggatgcaagaacaacccgtttcttaaatgttaccagtcccagccaatcttacggtgacattacagttaaatttcccaattgaaaacaagcaaacagacactcaaactggtcctgtaattgttgctagactttatgtgttgtacaactaaacattgctgtttgaacagtaa

SEQ ID NO: 201597 - DNA, 876 bp, Artificial Sequence
  derived and/or modified sequence
actagacccagaaccttcgaggggagggatggttgtcctcacccctgtgaggcaatatgctgtccattagtatccactgaatgcgtgaaatttttttctaatgggcaaactgaggctcagagaagttcctgtctggctcaaggttattggttcatcattctggagcagggcctggaacccgggcccctgactcggctctacaggcacccgcgcaacaccccagcccccgcgtgactcacgcgcgctcacggccgcccgcagctgccactggtcccctgcgcccctccgcccgtccccgccgcagcccagtggggctcccagagaccaggacggacgcagccatgtcagagctggtgcctgagcccaggcctaagccagcggtgcccatgaagcccatgagcatcaactccaacctgctgggctacatcggcatcgacaccatcatcgagcagatgcgcaagaagaccatgaagaccggtttcgacttcaacatcatggtcgttggccagagtggactgggcaaatcaacgctggtcaacacgctcttcaaatcccaagtgagccgcaaggcctccagctggaaccgggaggagaagatccccaagacagtggagatcaaagctatcgggcatgtgatagaggaaggcggtgtcaaaatgaagctgaccgtcatcgacaccccaggctttggagaccaaatcaacaatgaaaactgctgggagcccattgagaagtacatcaatgagcagtacgagaagttcctgaaggaggaggtcaacatcgccaggaagaaacgcatccctgacactcgtgtccactgctgcctttacttcatctctcccacaggacactccttgcgacctctggatcttgagt

SEQ ID NO: 201598 - DNA, 861 bp, Artificial Sequence
  derived and/or modified sequence
atgagcaagggccagagcggcctgggcaagagcaccctggtgaacaccctgttcaagagccaggtgagcagaaaggccagcagctggaacagagaggagaagatccccaagaccgtggagatcaaggccatcggccacgtgatcgaggagggcggcgtgaagatgaagctgaccgtgatcgacacccccggcttcggcgaccagatcaacaacgagaactgctgggagcccatcgagaagtacatcaacgagcagtacgagaagttcctgaaggaggaggtgaacatcgccagaaagaagagaatccccgacaccagagtgcactgctgcctgtacttcatcagccccaccggccacagcctgagacccctggacctggagttcatgaagcacctgagcaaggtggtgaacatcatccccgtgatcgccaaggccgacaccatgaccctggaggagaagagcgagttcaagcagagagtgagaaaggagctggaggtgaacggcatcgagttctacccccagaaggagttcgacgaggacctggaggacaagaccgagaacgacaagatcagacaggagagcatgcccttcgccgtggtgggcagcgacaaggagtaccaggtgaacggcaagagagtgctgggcagaaagaccccctggggcatcatcgaggtggagaacctgaaccactgcgagttcgccctgctgagagacttcgtgatcagaacccacctgcaggacctgaaggaggtgacccacaacatccactacgagacctacagagccaagagactgaacgacaacggcggcctgccccccgtgagcgtggacaccgaggagagccacgacagcaacccctag

SEQ ID NO: 201599 - DNA, 252 bp, Artificial Sequence
  derived and/or modified sequence
atgagcaagggcctgcccgagaccagaaccgacgccgccatgagcgagctggtgcccgagcccagacccaagcccgccgtgcccatgaagcccatgagcatcaacagcaacctgctgggctacatcggcatcgacaccatcatcgagcagatgagaaagaagaccatgaagaccggcttcgacttcaacatcatggtggtggccggcagccccctgagaagcaccagcatgagcagcaccagaagcagctag

SEQ ID NO: 201600 - DNA, 1053 bp, Artificial Sequence
  derived and/or modified sequence
atgagcaagggcctgcccgagaccagaaccgacgccgccatgagcgagctggtgcccgagcccagacccaagcccgccgtgcccatgaagcccatgagcatcaacagcaacctgctgggctacatcggcatcgacaccatcatcgagcagatgagaaagaagaccatgaagaccggcttcgacttcaacatcatggtggtgggccagagcggcctgggcaagagcaccctggtgaacaccctgttcaagagccaggtgagcagaaaggccagcagctggaacagagaggagaagatccccaagaccgtggagatcaaggccatcggccacgtgatcgaggagggcggcgtgaagatgaagctgaccgtgatcgacacccccggcttcggcgaccagatcaacaacgagaactgctgggagcccatcgagaagtacatcaacgagcagtacgagaagttcctgaaggaggaggtgaacatcgccagaaagaagagaatccccgacaccagagtgcactgctgcctgtacttcatcagccccaccggccacagcctgagacccctggacctggagttcatgaagcacctgagcaaggtggtgaacatcatccccgtgatcgccaaggccgacaccatgaccctggaggagaagagcgagttcaagcagagagtgagaaaggagctggaggtgaacggcatcgagttctacccccagaaggagttcgacgaggacctggaggacaagaccgagaacgacaagatcagacaggagagcatgcccttcgccgtggtgggcagcgacaaggagtaccaggtgaacggcaagagagtgctgggcagaaagaccccctggggcatcatcgaggtggagaacctgaaccactgcgagttcgccctgctgagagacttcgtgatcagaacccacctgcaggacctgaaggaggtgacccacaacatccactacgagacctacagagccaagagactgaacgacaacggcggcctgccccccgtgagcgtggacaccgaggagagccacgacagcaacccctag

SEQ ID NO: 201601 - DNA, 537 bp, Artificial Sequence
  derived and/or modified sequence
atgagcgagctggtgcccgagcccagacccaagcccgccgtgcccatgaagcccatgagcatcaacagcaacctgctgggctacatcggcatcgacaccatcatcgagcagatgagaaagaagaccatgaagaccggcttcgacttcaacatcatggtggtgggccagagcggcctgggcaagagcaccctggtgaacaccctgttcaagagccaggtgagcagaaaggccagcagctggaacagagaggagaagatccccaagaccgtggagatcaaggccatcggccacgtgatcgaggagggcggcgtgaagatgaagctgaccgtgatcgacacccccggcttcggcgaccagatcaacaacgagaactgctgggagcccatcgagaagtacatcaacgagcagtacgagaagttcctgaaggaggaggtgaacatcgccagaaagaagagaatccccgacaccagagtgcactgctgcctgtacttcatcagccccaccggccacagcctgagacccctggacctggagtag

SEQ ID NO: 201602 - protein, 173 aa, Artificial Sequence
  derived and/or modified sequence
MAAPSGGWNGVGASLWAALLLGAVALRPAEAVSEPTTVAFDVRPGGVVHSFSHNVGPGDKYTCMFTYASQGGTNEQWQMSLGTSEDHQHFTCTIWRPQGKSYLYFTQFKAEVRGAEIEYAMAYSKAAFERESDVPLKTEEFEVTKTAVAHRPGAFKAELSKLVIVAKASRTEL

SEQ ID NO: 201603 - DNA, 522 bp, Artificial Sequence
  derived and/or modified sequence
atggcggccccttctggcgggtggaacggagtgggggcaagcttgtgggcggcgctgctgctcggggccgttgcactccggccagcagaagccgtgtctgagcctacaacagtggcgtttgatgtgcggcctggcggggtagtccacagcttttcccacaacgttggaccaggcgataaatacacctgcatgtttacttacgcctcgcagggaggcacgaacgagcagtggcagatgagcctgggaacaagcgaagaccaccagcacttcacttgcacaatctggaggccacaggggaaatcttacctgtactttacgcagtttaaggctgaagtccgcggggccgagatcgaatatgctatggcatattccaaagctgcgtttgagcgcgagagtgatgtccctctgaagacggaagagtttgaagtgaccaagaccgcagtcgcacacaggccaggtgccttcaaggctgagcttagcaagttggtgatagttgccaaagcctccagaaccgagctgtag

SEQ ID NO: 201604 - DNA, 522 bp, Artificial Sequence
  derived and/or modified sequence
atggccgcccccagcggcggctggaatggagtgggcgccagcctgtgggccgccctgctgctgggcgctgtggccctgcggcctgctgaggccgtgtctgagcccaccaccgtggcctttgatgtgcggcctgggggcgtggtgcacagcttcagccacaacgtgggccctggggacaagtacacctgcatgttcacctacgccagccagggcggcaccaatgagcagtggcagatgagcctgggcaccagcgaggaccaccagcacttcacctgcaccatctggaggccccagggcaagagctacctgtacttcacccagttcaaggccgaggtgagaggagctgagattgaatatgccatggcctacagcaaggccgcctttgagcgggagagtgatgtgcccctgaagacagaggagtttgaggtgaccaagacagctgtggcccacaggcctggggccttcaaggccgagctgagcaagctggtgattgtggccaaggccagcaggacagagctgtag

SEQ ID NO: 201605 - DNA, 522 bp, Artificial Sequence
  derived and/or modified sequence
atggccgcccccagcggcggctggaacggcgtgggcgccagcctgtgggccgccttgctcctgggcgctgtagctctccgtcccgccgaggccgtcagcgagcctactacggtggcttttgatgtgaggcctggcggtgtggtgcactccttttcccacaatgtcgggcccggagacaagtacacatgcatgttcacatatgcctcccagggcggaactaacgagcagtggcagatgtcactgggcaccagtgaggatcatcagcacttcacttgcaccatctggcggccccaaggaaagagctacctctattttacgcagttcaaggcagaggtcagaggtgccgaaattgaatacgccatggcctactccaaggccgcttttgagagggagagtgatgtacccttgaagactgaggagttcgaggtgactaaaaccgccgtcgctcaccggccaggcgcattcaaggctgaactgtcaaagctggttatcgtcgccaaagccagccgtaccgagctgtag

SEQ ID NO: 201606 - DNA, 522 bp, Artificial Sequence
  derived and/or modified sequence
atggctgcaccctcaggcggatggaacggggtcggggcttcactatgggcagccctgcttctgggggctgtagcactgcggcctgcggaagccgtgtccgagcctacaaccgtagccttcgacgttcgaccaggaggggtcgtgcacagttttagccataatgtgggacccggagacaaatacacctgcatgttcacatatgcttcccagggcggtactaacgaacagtggcagatgtccctaggcacctcggaggaccatcagcattttacgtgcacaatatggagaccccaaggcaagtcctatttatactttacccaattcaaggctgaggtgcggggagcggagattgagtatgccatggcttactcgaaggcggcttttgagcgggaatcagacgtccccctgaagacggaagagttcgaagtaacaaagacggctgttgctcaccgccctggcgctttcaaggcagagctgagcaagctggtaatagtggctaaagcctctcgaaccgagctatag

SEQ ID NO: 201607 - DNA, 1042 bp, Artificial Sequence
  derived and/or modified sequence
ggcggacgctccacgtgtccctcgccgcgccccgtctacccgcccctgccctgaggaccctagtccaacatggcggcgcccagcggagggtggaacggcgtcggcgcgagcttgtgggccgcgctgctcctaggggccgtggcgctgaggccggcggaggcggtgtccgagcccacgacggtggcgtttgacgtgcggcccggcggcgtcgtgcattccttctcccataacgtgggcccgggggacaaatatacgtgtatgttcacttacgcctctcaaggagggaccaatgagcaatggcagatgagtctggggaccagcgaagaccaccagcacttcacctgcaccatctggaggccccaggggaagtcctatctgtacttcacacagttcaaggcagaggtgcggggcgctgagattgagtacgccatggcctactctaaagccgcatttgaaagggaaagtgatgtccctctgaaaactgaggaatttgaagtgaccaaaacagcagtggctcacaggcccggggcattcaaagctgagctgtccaagctggtgattgtggccaaggcatcgcgcactgagctgtgaccagcagccctgttgcgggtggcaccttctcatctccggtgaagctgaaggggcctgtgtccctgaaagggccagcacatcactggttttctaggagggactcttaagttttctacctgggctgacgttgccttgtccggaggggcttgcagggtggctgaagccctggggcagagaacagagggtccagggccctcctggctcccaacagcttctcagttcccacttcctgctgagctcttctggactcaggatcgcagatccggggcacaaagagggtggggaacatgggggctatgctggggaaagcagccatgctccccccgacctccagccgagcatccttcatgagcctgcagaactgctttcctatgtttacccaggggacctcctttcagatgaactgggaagagatgaaatgttttttcatatttaaataaataagaacatt

SEQ ID NO: 201608 - DNA, 522 bp, Artificial Sequence
  derived and/or modified sequence
atggccgcccccagcggcggctggaacggcgtgggcgccagcctgtgggccgccctgctgctgggcgccgtggccctgagacccgccgaggccgtgagcgagcccaccaccgtggccttcgacgtgagacccggcggcgtggtgcacagcttcagccacaacgtgggccccggcgacaagtacacctgcatgttcacctacgccagccagggcggcaccaacgagcagtggcagatgagcctgggcaccagcgaggaccaccagcacttcacctgcaccatctggagaccccagggcaagagctacctgtacttcacccagttcaaggccgaggtgagaggcgccgagatcgagtacgccatggcctacagcaaggccgccttcgagagagagagcgacgtgcccctgaagaccgaggagttcgaggtgaccaagaccgccgtggcccacagacccggcgccttcaaggccgagctgagcaagctggtgatcgtggccaaggccagcagaaccgagctgtag

SEQ ID NO: 201609 - protein, 464 aa, Artificial Sequence
  derived and/or modified sequence
MAASCLVLLALCLLLPLLLLGGWKRWRRGRAARHVVAVVLGDVGRSPRMQYHALSLAMHGFSVTLLGFCNSKPHDELLQNNRIQIVGLTELQSLAVGPRVFQYGVKVVLQAMYLLWKLMWREPGAYIFLQNPPGLPSIAVCWFVGCLCGSKLVIDWHNYGYSIMGLVHGPNHPLVLLAKWYEKFFGRLSHLNLCVTNAMREDLADNWHIRAVTVYDKPASFFKETPLDLQHRLFMKLGSMHSPFRARSEPEDPVTERSAFTERDAGSGLVTRLRERPALLVSSTSWTEDEDFSILLAALEKFEQLTLDGHNLPSLVCVITGKGPLREYYSRLIHQKHFQHIQVCTPWLEAEDYPLLLGSADLGVCLHTSSSGLDLPMKVVDMFGCCLPVCAVNFKCLHELVKHEENGLVFEDSEELAAQLQMLFSNFPDPAGKLNQFRKNLRESQQLRWDESWVQTVLPLVMDT

SEQ ID NO: 201610 - protein, 353 aa, Artificial Sequence
  derived and/or modified sequence
MYLLWKLMWREPGAYIFLQNPPGLPSIAVCWFVGCLCGSKLVIDWHNYGYSIMGLVHGPNHPLVLLAKWYEKFFGRLSHLNLCVTNAMREDLADNWHIRAVTVYDKPASFFKETPLDLQHRLFMKLGSMHSPFRARSEPEDPVTERSAFTERDAGSGLVTRLRERPALLVSSTSWTEDEDFSILLAALEKFEQLTLDGHNLPSLVCVITGKGPLREYYSRLIHQKHFQHIQVCTPWLEAEDYPLLLGSADLGVCLHTSSSGLDLPMKVVDMFGCCLPVCAVNFKCLHELVKHEENGLVFEDSEELAAQLQMLFSNFPDPAGKLNQFRKNLRESQQLRWDESWVQTVLPLVMDT

SEQ ID NO: 201611 - DNA, 1395 bp, Artificial Sequence
  derived and/or modified sequence
atggctgccagctgtctcgtgctgctagccctttgtttgttgctgccactgcttctactcggggggtggaagcgctggagacggggccgggccgcaaggcacgtggtcgccgtggtgttaggcgatgtgggaaggtctcccagaatgcagtaccacgcactgtccttggcaatgcacggcttttcagtcactctcctcggattctgtaattcaaagcctcacgacgaactcctccagaataatcggatccaaatcgtgggtttgacagaattgcaatccttagctgtcggaccaagagtgttccaatatggggtgaaggtcgtcttgcaagccatgtaccttttgtggaagctgatgtggcgggaacccggggcctatatctttttacagaaccctcccggattgccctcaatcgccgtttgctggtttgtcgggtgtctgtgcggcagtaagctagttatcgattggcataattacggctactccatcatgggcctagtgcatggtcctaaccacccattagttctgcttgccaaatggtatgagaaattttttggccgtcttagccacctgaacttgtgcgtgacgaatgctatgcgagaagatcttgctgacaattggcacatcagggctgttacagtttacgacaagccagcttctttttttaaggaaaccccattagatctccagcacagattgtttatgaaactaggatcgatgcactcacccttcagagcccgttctgagccggaggaccccgtgactgaacggtccgctttcactgagagggatgctggatccggcctggtgactcgactgcgtgaaagacctgctctgctagtatcctctacatcgtggactgaggatgaagatttttcgattctactggctgctctggaaaaatttgagcagctgaccctcgacgggcacaacctgccatcattggtgtgcgttattactggcaagggccccctgcgagaatactattcacgacttatccaccaaaagcactttcaacatatccaggtttgcactccctggctggaagctgaagattacccactcttactcgggagcgctgacttgggcgtgtgcctccacacgtccagttccggcctcgacctacccatgaaagtcgtggatatgtttggatgctgtctgcctgtgtgtgccgttaatttcaaatgcttacacgagttggttaagcacgaagagaatggattggtctttgaagattctgaggaattagccgctcagctgcagatgcttttttcgaacttccccgatcccgccgggaagcttaatcagtttcggaaaaatttacgcgagagtcaacagctgcgctgggacgaaagctgggtgcagactgtgcttcccttggtgatggatacgtag

SEQ ID NO: 201612 - DNA, 1395 bp, Artificial Sequence
  derived and/or modified sequence
atggccgccagctgcctggtgctgctggccctgtgcctgctgctgcccctgctgctgctgggcggctggaagcgctggaggcggggccgggccgcccggcacgtggtggccgtggtgctgggagatgtgggccgcagccccaggatgcagtaccacgccctgagcctggccatgcacggcttctctgtgaccctgctgggcttctgcaacagcaagccccatgatgagctgctgcagaacaaccgcatccagatcgtgggcctgacagagctgcagagcctggccgtgggccccagggtcttccagtatggagtgaaggtggtgctgcaggccatgtacctgctgtggaagctgatgtggagggagcccggggcctacatcttcctgcagaaccccccaggcctgcccagcattgctgtgtgctggtttgtgggctgcctgtgtggcagcaagctggtgattgactggcacaactacggctacagcatcatgggcctggtgcacggccccaaccaccccctggtgctgctggccaagtggtatgagaagttcttcggccgcctgagccacctgaacctgtgtgtgaccaatgccatgagggaggacctggccgacaactggcacatccgggctgtgacagtgtatgacaagccagccagcttcttcaaggagacccccctggacctgcagcacaggctcttcatgaagctgggctccatgcacagccccttccgggcccggtctgagccagaagatcctgtgacagagaggtctgccttcacagaaagagatgctggcagcggcctggtgacccggctgcgggagaggcctgccctgctggtgagcagcacctcctggacagaagatgaggacttcagcatcctgctggccgccctggagaagtttgagcagctgaccctggatggccacaacctgcccagcctggtgtgtgtgatcaccgggaagggccccctgcgggagtactacagccgcctcatccaccagaagcacttccagcacatccaggtgtgcaccccctggctggaggccgaggactaccccctgctgctgggcagcgctgacctgggcgtgtgcctgcacaccagcagcagcggcctggacctgcccatgaaggtggtggacatgtttggctgctgcctgcctgtgtgtgctgtgaacttcaagtgcctgcacgagctggtgaagcatgaagaaaatggcctggtgtttgaagattctgaggagctggccgcccagctgcagatgctgttcagcaacttcccagaccctgctgggaagctgaaccagttcaggaagaacctgcgggagagccagcagctgcgctgggatgagagctgggtgcagacagtgctgcccctggtgatggacacctag

SEQ ID NO: 201613 - DNA, 1395 bp, Artificial Sequence
  derived and/or modified sequence
atggccgccagctgcctggtgctgctggccctgtgcctgctgctgcctctgctgttactgggaggctggaaacgatggcggcggggtcgagctgcaaggcacgtcgtcgctgtggtcctcggcgacgtggggcgctcccccagaatgcagtatcacgcactcagcttggccatgcacgggttctcagttacccttctcggtttttgtaactctaagccacatgatgaattgctgcagaacaatcggattcagattgtgggacttacagaacttcagtcgctcgcagttggacctcgagtcttccaatacggagtcaaggtggtgctacaggcaatgtacctcttatggaagctgatgtggagggaaccaggcgcttatatctttctgcagaatccacccggtttgccgagcattgcagtttgctggttcgttggatgtctttgcggcagcaagctggtaatcgactggcataattatggatactctatcatgggacttgtgcacgggcctaaccatcctcttgtcctgttggctaaatggtacgaaaagtttttcggccgtttgagtcatctgaacctgtgcgtcactaatgccatgcgggaggacctggctgacaattggcatatccgggccgtaaccgtgtatgataaaccagcaagtttctttaaagaaaccccccttgatcttcagcacagattgttcatgaagctgggctccatgcattcaccatttagggcacggtctgagcctgaggacccagtgacagaacggtctgcctttactgagcgggacgccggatccggtctggtcacccggttgagggaacgtcctgcccttctggtgtcatcaaccagctggactgaggatgaggacttcagtattctgctcgcagcattggaaaaattcgagcaactcactctggacgggcataacctgccctcactggtgtgcgtaattactgggaagggcccccttcgagaatactacagccgcctgatccaccagaaacattttcaacatatccaggtgtgtaccccttggcttgaggctgaagactaccctttgttgctcgggagcgccgacctgggcgtctgtctacacacgtcatccagtggacttgacctgcctatgaaggttgtagatatgtttgggtgctgcctgccagtgtgcgctgttaatttcaagtgcctacacgaactggtcaaacacgaggaaaatggactggtattcgaagactctgaggagctagctgctcagctgcaaatgctattcagcaattttcctgatcccgccggtaagttaaaccagtttagaaagaatctgcgggagtcacaacagctgaggtgggatgagtcatgggtccagactgttctacccctggttatggatacatag

SEQ ID NO: 201614 - DNA, 1395 bp, Artificial Sequence
  derived and/or modified sequence
atggctgccagctgtctagtgcttctagctctgtgcctgctgttgcccttgctgctactcggaggatggaaaagatggaggaggggcagagccgctcgacatgtcgtagcggtagtgcttggggatgtcggacggagtcccaggatgcagtatcatgccctgagtctcgcgatgcacggcttttcggttaccctcctgggcttttgtaacagcaagccccatgatgaactcttacagaataatcgaatccagatcgtgggactaaccgaactgcagagcctagctgtggggcctcgcgtcttccagtacggcgtcaaggttgtgttacaggcaatgtacctcctgtggaaacttatgtggcgagagccgggagcctatatattcctgcagaatcctccaggacttccctcaatcgcagtttgctggttcgtcgggtgtctctgtggaagcaaacttgttattgactggcataattacggctattccatcatggggctggttcacggcccaaaccacccccttgtgctgctggccaaatggtatgagaagttctttgggcgtctctcacatcttaatctatgcgttactaacgccatgcgcgaagatctagcggacaactggcatatccgtgctgtaacagtgtatgacaagcctgcatcgttcttcaaggagacacccttagatctgcaacaccgcctttttatgaagctggggtccatgcattccccgtttcgagcaaggtctgagcccgaggacccggttacagaaagaagtgcatttacggaacgagacgcgggtagtgggctcgtcaccaggctacgggagaggcccgctctgctggtgtcctccaccagctggaccgaagacgaagacttttctattctgctggcagccctagaaaaatttgaacagctgacccttgacgggcacaacttgccctccctcgtttgtgttatcaccggcaaaggccctcttagagaatactattcccgactgatccaccagaagcacttccaacacatccaggtgtgtactccttggctggaggcagaagactatccgctgttgttaggctccgcggatttgggggtctgcctgcacactagttccagtggcctcgacctgcctatgaaggtggtggacatgttcggttgttgcctaccagtctgtgcagtaaacttcaagtgccttcacgagttagtgaagcacgaagagaatggcctggtcttcgaggacagcgaggaacttgcagcacagttgcagatgctgttctccaactttcctgatccagcgggaaagctgaaccagtttagaaaaaatctgagggaatcccaacagctcaggtgggacgagtcttgggtgcagacagtcctgccacttgtaatggacacttag

SEQ ID NO: 201615 - DNA, 1939 bp, Artificial Sequence
  derived and/or modified sequence
gcggtcacgtgactgctgcgggccagccaagatggcggcctcatgcttggtcctgctggcgctgtgtctgctgctgccgctgctgctgctgggaggatggaagcgctggcgccgggggcgggcggcccggcatgtagtagcggtggtgctgggcgacgtgggccgcagcccccgtatgcagtaccacgcgctgtcgttggccatgcacggcttctcggtgaccctcctggggttctgcaactccaaaccccatgatgagctcttgcagaacaacagaattcagattgtggggttgacagaacttcagagtcttgcagttgggccccgagttttccagtacggagtcaaagttgtacttcaggctatgtacttgctgtggaagttgatgtggagggagccaggtgcctatatctttctccagaaccccccaggtctgcctagcattgctgtctgctggttcgtgggctgcctttgtggaagcaagctcgtcattgactggcacaactatggctactccatcatgggtctggtgcatggccccaaccatcccctcgttctgctggccaagtggtacgagaagttctttgggcgcctgtcccacctgaacctgtgtgttaccaatgctatgcgagaagacctggcggataactggcacatcagggctgtgaccgtctacgacaagcccgcatctttctttaaagagacacctctggacctgcagcaccggctcttcatgaagctgggcagcatgcactctccgttcagggcccgctcagaacctgaggacccagtcacggagcggtcggccttcacggagcgggatgctgggagcgggctggtgacgcgtctccgtgagcggccagccctgctggtcagcagcacgagctggacagaggacgaagacttctccatcctgctggcagctttagaaaagtttgaacaactgactcttgatggacacaaccttccttctctcgtctgtgtgataacaggcaaagggcctctgagggagtattatagccgcctcatccaccagaagcacttccagcacatccaggtctgcaccccctggctggaggccgaggactaccccctgcttctagggtcggcggacctgggtgtctgtctgcacacgtcctccagtggcctggacctgcccatgaaggtggtggacatgttcgggtgctgtttgcctgtgtgtgctgtgaacttcaagtgtttacatgagctggtgaaacatgaagaaaatggcctggtctttgaggactcagaggaactggcagctcagctgcagatgcttttctcaaactttcctgatcctgcgggcaagctaaaccagttccggaagaacctgcgggagtcgcagcagctccgatgggatgagagctgggtgcagactgtgctccctttggttatggacacataactcctgggccagaggctaaaaccccaggacccctgctgtccttcccgcagcttcttcttggagtctcagggcaaaccctttcgagcagcacctcccagtggccagaagctgaaatgacagcagtggtactgcctggtaaaagaattggttctgtgacccgggaagctttggttggccttgatttcttctctggaggcttggaaacgcttcctctcttcttctgttcttcacgccccatgcccctgctagcgtattactgttctgtgacttccctgtgacctctgcagaactcctcatcctgcgtttggtctccaggtgtcccctttctgccgtgttcctaacattttgattcctgtcttgaaaaaagcacctgctgcaccgtaagcccagggatgtggcagctgcagtgggcttggctttgtgaggaactgagtgtgtccacgttgggggaacatcatacttgatacacacgtttttatttgcacaaagaaaatgctatttttggagccagaa

SEQ ID NO: 201616 - DNA, 1419 bp, Artificial Sequence
  derived and/or modified sequence
cacgtgtcagaagtgtgttaagtgaatccattgcgtggtctcacgtaattctcctaactccaaaccccatgatgagctcttgcagaacaacagaattcagattgtggggttgacagaacttcagagtcttgcagttgggccccgagttttccagtacggagtcaaagttgtacttcaggctatgtacttgctgtggaagttgatgtggagggagccaggtgcctatatctttctccagaaccccccaggtctgcctagcattgctgtctgctggttcgtgggctgcctttgtggaagcaagctcgtcattgactggcacaactatggctactccatcatgggtctggtgcatggccccaaccatcccctcgttctgctggccaagtggtacgagaagttctttgggcgcctgtcccacctgaacctgtgtgttaccaatgctatgcgagaagacctggcggataactggcacatcagggctgtgaccgtctacgacaagcccgcatctttctttaaagagacacctctggacctgcagcaccggctcttcatgaagctgggcagcatgcactctccgttcagggcccgctcagaacctgaggacccagtcacggagcggtcggccttcacggagcgggatgctgggagcgggctggtgacgcgtctccgtgagcggccagccctgctggtcagcagcacgagctggacagaggacgaagacttctccatcctgctggcagctttagaaaagtttgaacaactgactcttgatggacacaaccttccttctctcgtctgtgtgataacaggcaaagggcctctgagggagtattatagccgcctcatccaccagaagcacttccagcacatccaggtctgcaccccctggctggaggccgaggactaccccctgcttctagggtcggcggacctgggtgtctgtctgcacacgtcctccagtggcctggacctgcccatgaaggtggtggacatgttcgggtgctgtttgcctgtgtgtgctgtgaacttcaagtgtttacatgagctggtgaaacatgaagaaaatggcctggtctttgaggactcagaggaactggcagctcagctgcagatgcttttctcaaactttcctgatcctgcgggcaagctaaaccagttccggaagaacctgcgggagtcgcagcagctccgatgggatgagagctgggtgcagactgtgctccctttggttatggacacataactcctgggccagaggctaaaaccccaggacccctgctgtccttcccgcagcttcttcttggagtctcagggcaaaccctttcgagcagcacctcccagtggccagaagctgaaatgacagcagtggtactgcctggtaaaagaattggttctgtgacccgggaagctttggttggc

SEQ ID NO: 201617 - DNA, 1395 bp, Artificial Sequence
  derived and/or modified sequence
atggccgccagctgcctggtgctgctggccctgtgcctgctgctgcccctgctgctgctgggcggctggaagagatggagaagaggcagagccgccagacacgtggtggccgtggtgctgggcgacgtgggcagaagccccagaatgcagtaccacgccctgagcctggccatgcacggcttcagcgtgaccctgctgggcttctgcaacagcaagccccacgacgagctgctgcagaacaacagaatccagatcgtgggcctgaccgagctgcagagcctggccgtgggccccagagtgttccagtacggcgtgaaggtggtgctgcaggccatgtacctgctgtggaagctgatgtggagagagcccggcgcctacatcttcctgcagaacccccccggcctgcccagcatcgccgtgtgctggttcgtgggctgcctgtgcggcagcaagctggtgatcgactggcacaactacggctacagcatcatgggcctggtgcacggccccaaccaccccctggtgctgctggccaagtggtacgagaagttcttcggcagactgagccacctgaacctgtgcgtgaccaacgccatgagagaggacctggccgacaactggcacatcagagccgtgaccgtgtacgacaagcccgccagcttcttcaaggagacccccctggacctgcagcacagactgttcatgaagctgggcagcatgcacagccccttcagagccagaagcgagcccgaggaccccgtgaccgagagaagcgccttcaccgagagagacgccggcagcggcctggtgaccagactgagagagagacccgccctgctggtgagcagcaccagctggaccgaggacgaggacttcagcatcctgctggccgccctggagaagttcgagcagctgaccctggacggccacaacctgcccagcctggtgtgcgtgatcaccggcaagggccccctgagagagtactacagcagactgatccaccagaagcacttccagcacatccaggtgtgcaccccctggctggaggccgaggactaccccctgctgctgggcagcgccgacctgggcgtgtgcctgcacaccagcagcagcggcctggacctgcccatgaaggtggtggacatgttcggctgctgcctgcccgtgtgcgccgtgaacttcaagtgcctgcacgagctggtgaagcacgaggagaacggcctggtgttcgaggacagcgaggagctggccgcccagctgcagatgctgttcagcaacttccccgaccccgccggcaagctgaaccagttcagaaagaacctgagagagagccagcagctgagatgggacgagagctgggtgcagaccgtgctgcccctggtgatggacacctag

SEQ ID NO: 201618 - protein, 229 aa, Artificial Sequence
  derived and/or modified sequence
MAISGVPVLGFFIIAVLMSAQESWAIKEEHVIIQAEFYLNPDQSGEFMFDFDGDEIFHVDMAKKETVWRLEEFGRFASFEAQGALANIAVDKANLEIMTKRSNYTPITNDKFTPPVVNVTWLRNGKPVTTGVSETVFLPREDHLFRKFHYLPFLPSTEDVYDCRVEHWGLDEPLLKHWEFDAPSPLPETTENVVCALGLTVGLVGIIIGTIFIIKGLRKSNAAERRGPL

SEQ ID NO: 201619 - protein, 254 aa, Artificial Sequence
  derived and/or modified sequence
MAISGVPVLGFFIIAVLMSAQESWAIKEEHVIIQAEFYLNPDQSGEFMFDFDGDEIFHVDMAKKETVWRLEEFGRFASFEAQGALANIAVDKANLEIMTKRSNYTPITNVPPEVTVLTNSPVELREPNVLICFIDKFTPPVVNVTWLRNGKPVTTGVSETVFLPREDHLFRKFHYLPFLPSTEDVYDCRVEHWGLDEPLLKHWEFDAPSPLPETTENVVCALGLTVGLVGIIIGTIFIIKGLRKSNAAERRGPL

SEQ ID NO: 201620 - protein, 229 aa, Artificial Sequence
  derived and/or modified sequence
MAISGVPVLGFFIIAVLMSAQESWAIKEEHVIIQAEFYLNPDQSGEFMFDFDGDEIFHVDMAKKETVWRLEEFGRFASFEAQGALANIAVDKANLEIMTKRSNYTPITNDKFTPPVVNVTWLRNGKPVTTGVSETVFLPREDHLFRKFHYLPFLPSTEDVYDCRVEHWGLDEPLLKHWEFDAPSPLPETTENVVCALGLTVGLVGIIIGTIFIIKGVRKSNAAERRGPL

SEQ ID NO: 201621 - protein, 254 aa, Artificial Sequence
  derived and/or modified sequence
MAISGVPVLGFFIIAVLMSAQESWAIKEEHVIIQAEFYLNPDQSGEFMFDFDGDEIFHVDMAKKETVWRLEEFGRFASFEAQGALANIAVDKANLEIMTKRSNYTPITNVPPEVTVLTNSPVELREPNVLICFIDKFTPPVVNVTWLRNGKPVTTGVSETVFLPREDHLFRKFHYLPFLPSTEDVYDCRVEHWGLDEPLLKHWEFDAPSPLPETTENVVCALGLTVGLVGIIIGTIFIIKGVRKSNAAERRGPL

SEQ ID NO: 201622 - protein, 180 aa, Artificial Sequence
  derived and/or modified sequence
MAISGVPVLGFFIIAVLMSAQESWAIKEEHVIIQAEFYLNPDQSGEFMFDFDGDEIFHVDMAKKETVWRLEEFGRFASFEAQGALANIAVDKANLEIMTKRSKPSPRDYRERGVCPGPDCGSGGHHYWDHLHHQGIAQKQCSRTQGASVRHMEVMVFLREKITEETSALMALQSWQYYNP

SEQ ID NO: 201623 - protein, 237 aa, Artificial Sequence [sequence omitted]

SEQ ID NO: 201624 - protein, 165 aa, Artificial Sequence
  derived and/or modified sequence
MAKKETVWRLEEFGRFASFEAQGALANIAVDKANLEIMTKRSNYTPITNVPPEVTVLTNSPVELREPNVLICFIDKFTPPVVNVTWLRNGKPVTTGVSETVFLSIAFSCIYFPLFPIILLSPCNASGIKHTGVCLCYGMPHGASLVYLLFKVSSNCDFSEHNKLF

SEQ ID NO: 201625 - protein, 150 aa, Artificial Sequence
  derived and/or modified sequence
MAISGVPVLGFFIIAVLMSAQESWAIKEEHVIIQAEFYLNPDQSGEFMFDFDGDEIFHVDMAKKETVWRLEEFGRFASFEAQGALANIAVDKANLEIMTKRSNYTPITNVPPEVTVLTNSPVELREPNVLICFIIKGVRKSNAAERRGPL

SEQ ID NO: 201626 - protein, 180 aa, Artificial Sequence [sequence omitted]

SEQ ID NO: 201627 - protein, 180 aa, Artificial Sequence
  derived and/or modified sequence
MAISGVPVLGFFIIAVLMSAQESWAIKEEHVIIQAEFYLNPDQSGEFMFDFDGDEIFHVDMAKKETVWRLEEFGRFASFEAQGALANIAVDKANLEIMTKRSKPSPRDYRECGVCPGPDCGSGGHHYWDHLHHQGSAQKQCSRTQGASVRHMEVMMFLREKITEETSALMTLQSWQYYNP

SEQ ID NO: 201628 - DNA, 690 bp, Artificial Sequence
  derived and/or modified sequence
atggccatcagcggcgtgcccgtgctgggcttcttcatcatcgccgtgctgatgagcgcccaggagagctgggccatcaaggaggagcacgtgatcatccaggccgagttctacctgaaccccgaccagagcggcgagttcatgttcgacttcgacggcgacgagatcttccacgtggacatggccaagaaggagaccgtgtggagactggaggagttcggcagattcgccagcttcgaggcccagggcgccctggccaacatcgccgtggacaaggccaacctggagatcatgaccaagagaagcaactacacccccatcaccaacgacaagttcaccccccccgtggtgaacgtgacctggctgagaaacggcaagcccgtgaccaccggcgtgagcgagaccgtgttcctgcccagagaggaccacctgttcagaaagttccactacctgcccttcctgcccagcaccgaggacgtgtacgactgcagagtggagcactggggcctggacgagcccctgctgaagcactgggagttcgacgcccccagccccctgcccgagaccaccgagaacgtggtgtgcgccctgggcctgaccgtgggcctggtgggcatcatcatcggcaccatcttcatcatcaagggcctgagaaagagcaacgccgccgagagaagaggccccctgtag

SEQ ID NO: 201629 - DNA, 765 bp, Artificial Sequence
  derived and/or modified sequence
atggccatcagcggcgtgcccgtgctgggcttcttcatcatcgccgtgctgatgagcgcccaggagagctgggccatcaaggaggagcacgtgatcatccaggccgagttctacctgaaccccgaccagagcggcgagttcatgttcgacttcgacggcgacgagatcttccacgtggacatggccaagaaggagaccgtgtggagactggaggagttcggcagattcgccagcttcgaggcccagggcgccctggccaacatcgccgtggacaaggccaacctggagatcatgaccaagagaagcaactacacccccatcaccaacgtgccccccgaggtgaccgtgctgaccaacagccccgtggagctgagagagcccaacgtgctgatctgcttcatcgacaagttcaccccccccgtggtgaacgtgacctggctgagaaacggcaagcccgtgaccaccggcgtgagcgagaccgtgttcctgcccagagaggaccacctgttcagaaagttccactacctgcccttcctgcccagcaccgaggacgtgtacgactgcagagtggagcactggggcctggacgagcccctgctgaagcactgggagttcgacgcccccagccccctgcccgagaccaccgagaacgtggtgtgcgccctgggcctgaccgtgggcctggtgggcatcatcatcggcaccatcttcatcatcaagggcctgagaaagagcaacgccgccgagagaagaggccccctgtag

SEQ ID NO: 201630 - DNA, 690 bp, Artificial Sequence
  derived and/or modified sequence
atggccatcagcggcgtgcccgtgctgggcttcttcatcatcgccgtgctgatgagcgcccaggagagctgggccatcaaggaggagcacgtgatcatccaggccgagttctacctgaaccccgaccagagcggcgagttcatgttcgacttcgacggcgacgagatcttccacgtggacatggccaagaaggagaccgtgtggagactggaggagttcggcagattcgccagcttcgaggcccagggcgccctggccaacatcgccgtggacaaggccaacctggagatcatgaccaagagaagcaactacacccccatcaccaacgacaagttcaccccccccgtggtgaacgtgacctggctgagaaacggcaagcccgtgaccaccggcgtgagcgagaccgtgttcctgcccagagaggaccacctgttcagaaagttccactacctgcccttcctgcccagcaccgaggacgtgtacgactgcagagtggagcactggggcctggacgagcccctgctgaagcactgggagttcgacgcccccagccccctgcccgagaccaccgagaacgtggtgtgcgccctgggcctgaccgtgggcctggtgggcatcatcatcggcaccatcttcatcatcaagggcgtgagaaagagcaacgccgccgagagaagaggccccctgtag

SEQ ID NO: 201631 - DNA, 765 bp, Artificial Sequence
  derived and/or modified sequence
atggccatcagcggcgtgcccgtgctgggcttcttcatcatcgccgtgctgatgagcgcccaggagagctgggccatcaaggaggagcacgtgatcatccaggccgagttctacctgaaccccgaccagagcggcgagttcatgttcgacttcgacggcgacgagatcttccacgtggacatggccaagaaggagaccgtgtggagactggaggagttcggcagattcgccagcttcgaggcccagggcgccctggccaacatcgccgtggacaaggccaacctggagatcatgaccaagagaagcaactacacccccatcaccaacgtgccccccgaggtgaccgtgctgaccaacagccccgtggagctgagagagcccaacgtgctgatctgcttcatcgacaagttcaccccccccgtggtgaacgtgacctggctgagaaacggcaagcccgtgaccaccggcgtgagcgagaccgtgttcctgcccagagaggaccacctgttcagaaagttccactacctgcccttcctgcccagcaccgaggacgtgtacgactgcagagtggagcactggggcctggacgagcccctgctgaagcactgggagttcgacgcccccagccccctgcccgagaccaccgagaacgtggtgtgcgccctgggcctgaccgtgggcctggtgggcatcatcatcggcaccatcttcatcatcaagggcgtgagaaagagcaacgccgccgagagaagaggccccctgtag

SEQ ID NO: 201632 - DNA, 543 bp, Artificial Sequence
  derived and/or modified sequence
atggccatcagcggcgtgcccgtgctgggcttcttcatcatcgccgtgctgatgagcgcccaggagagctgggccatcaaggaggagcacgtgatcatccaggccgagttctacctgaaccccgaccagagcggcgagttcatgttcgacttcgacggcgacgagatcttccacgtggacatggccaagaaggagaccgtgtggagactggaggagttcggcagattcgccagcttcgaggcccagggcgccctggccaacatcgccgtggacaaggccaacctggagatcatgaccaagagaagcaagcccagccccagagactacagagagagaggcgtgtgccccggccccgactgcggcagcggcggccaccactactgggaccacctgcaccaccagggcatcgcccagaagcagtgcagcagaacccagggcgccagcgtgagacacatggaggtgatggtgttcctgagagagaagatcaccgaggagaccagcgccctgatggccctgcagagctggcagtactacaacccctag

SEQ ID NO: 201633 - DNA, 714 bp, Artificial Sequence
  derived and/or modified sequence
atgagcgcccaggagagctgggccatcaaggaggagcacgtgatcatccaggccgagttctacctgaaccccgaccagagcggcgagttcatgttcgacttcgacggcgacgagatcttccacgtggacatggccaagaaggagaccgtgtggagactggaggagttcggcagattcgccagcttcgaggcccagggcgccctggccaacatcgccgtggacaaggccaacctggagatcatgaccaagagaagcaactacacccccatcaccaacgtgccccccgaggtgaccgtgctgaccaacagccccgtggagctgagagagcccaacgtgctgatctgcttcatcgacaagttcaccccccccgtggtgaacgtgacctggctgagaaacggcaagcccgtgaccaccggcgtgagcgagaccgtgttcctgcccagagaggaccacctgttcagaaagttccactacctgcccttcctgcccagcaccgaggacgtgtacgactgcagagtggagcactggggcctggacgagcccctgctgaagcactgggagttcgacgcccccagccccctgcccgagaccaccgagaacgtggtgtgcgccctgggcctgaccgtgggcctggtgggcatcatcatcggcaccatcttcatcatcaagggcgtgagaaagagcaacgccgccgagagaagaggccccctgtag

SEQ ID NO: 201634 - DNA, 498 bp, Artificial Sequence
  derived and/or modified sequence
atggccaagaaggagaccgtgtggagactggaggagttcggcagattcgccagcttcgaggcccagggcgccctggccaacatcgccgtggacaaggccaacctggagatcatgaccaagagaagcaactacacccccatcaccaacgtgccccccgaggtgaccgtgctgaccaacagccccgtggagctgagagagcccaacgtgctgatctgcttcatcgacaagttcaccccccccgtggtgaacgtgacctggctgagaaacggcaagcccgtgaccaccggcgtgagcgagaccgtgttcctgagcatcgccttcagctgcatctacttccccctgttccccatcatcctgctgagcccctgcaacgccagcggcatcaagcacaccggcgtgtgcctgtgctacggcatgccccacggcgccagcctggtgtacctgctgttcaaggtgagcagcaactgcgacttcagcgagcacaacaagctgttctag

SEQ ID NO: 201635 - DNA, 453 bp, Artificial Sequence
  derived and/or modified sequence
atggccatcagcggcgtgcccgtgctgggcttcttcatcatcgccgtgctgatgagcgcccaggagagctgggccatcaaggaggagcacgtgatcatccaggccgagttctacctgaaccccgaccagagcggcgagttcatgttcgacttcgacggcgacgagatcttccacgtggacatggccaagaaggagaccgtgtggagactggaggagttcggcagattcgccagcttcgaggcccagggcgccctggccaacatcgccgtggacaaggccaacctggagatcatgaccaagagaagcaactacacccccatcaccaacgtgccccccgaggtgaccgtgctgaccaacagccccgtggagctgagagagcccaacgtgctgatctgcttcatcatcaagggcgtgagaaagagcaacgccgccgagagaagaggccccctgtag

SEQ ID NO: 201636 - DNA, 543 bp, Artificial Sequence
  derived and/or modified sequence
atggccatcagcggcgtgcccgtgctgggcttcttcatcatcgccgtgctgatgagcgcccaggagagctgggccatcaaggaggagcacgtgatcatccaggccgagttctacctgaaccccgaccagagcggcgagttcatgttcgacttcgacggcgacgagatcttccacgtggacatggccaagaaggagaccgtgtggagactggaggagttcggcagattcgccagcttcgaggcccagggcgccctggccaacatcgccgtggacaaggccaacctggagatcatgaccaagagaagcaagcccagccccagagactacagagagagaggcgtgtgccccggccccgactgcggcagcggcggccaccactactgggaccacctgcaccaccagggcagcgcccagaagcagtgcagcagaacccagggcgccagcgtgagacacatggaggtgatggtgttcctgagagagaagatcaccgaggagaccagcgccctgatgaccctgcagagctggcagtactacaacccctag

SEQ ID NO: 201637 - DNA, 543 bp, Artificial Sequence
  derived and/or modified sequence
atggccatcagcggcgtgcccgtgctgggcttcttcatcatcgccgtgctgatgagcgcccaggagagctgggccatcaaggaggagcacgtgatcatccaggccgagttctacctgaaccccgaccagagcggcgagttcatgttcgacttcgacggcgacgagatcttccacgtggacatggccaagaaggagaccgtgtggagactggaggagttcggcagattcgccagcttcgaggcccagggcgccctggccaacatcgccgtggacaaggccaacctggagatcatgaccaagagaagcaagcccagccccagagactacagagagtgcggcgtgtgccccggccccgactgcggcagcggcggccaccactactgggaccacctgcaccaccagggcagcgcccagaagcagtgcagcagaacccagggcgccagcgtgagacacatggaggtgatgatgttcctgagagagaagatcaccgaggagaccagcgccctgatgaccctgcagagctggcagtactacaacccctag

SEQ ID NO: 201638 - DNA, 690 bp, Artificial Sequence
  derived and/or modified sequence
atggctatcagcggcgtgccagtcctgggcttcttcatcattgccgtgttaatgagcgcccaggagagctgggcgatcaaggaggagcatgtgattattcaggcagagttctacttgaatccagatcagtcaggcgagttcatgtttgacttcgacggagacgagattttccacgtcgacatggcaaaaaaggaaacagtgtggaggttggaggagtttggtcggtttgcctcttttgaggcccagggggcactggccaacatcgccgtggacaaagccaaccttgagatcatgaccaaacggtctaactatacccccataactaacgataagtttacccctccagttgttaacgtgacctggctgagaaatggcaagcccgtgaccaccggggtcagcgagacggtgtttctgccaagagaggaccacctttttaggaagttccactacttgccttttcttccgagcacagaagacgtgtacgactgcagagtggaacactggggcttggatgagcctctgctgaagcattgggagttcgatgccccgtccccattgcccgagactaccgaaaacgtggtatgtgctctcggcctgactgttggtctagtgggtattattatcggtactattttcatcattaaagggcttagaaagtctaatgccgccgagcgccgaggcccattgtag

SEQ ID NO: 201639 - DNA, 765 bp, Artificial Sequence
  derived and/or modified sequence
atggccatcagtggcgtgcccgttttaggattttttataatagcagtgctgatgtcagcccaagaatcttgggccatcaaagaggagcacgtgatcatccaagctgaattttatctcaacccagaccagtccggtgagttcatgtttgatttcgatggcgatgaaatctttcacgtggacatggcaaagaaggaaacagtgtggcggcttgaggagtttggaagattcgcctctttcgaagcccagggcgctttggctaatattgccgtagataaggcaaacctggaaataatgactaagcgctccaactataccccaatcaccaacgttcctccagaggtgacggtgctcaccaattcaccggtggaactgcgagaacccaatgtgctgatttgttttatcgataaattcacaccccctgtggtgaatgtgacctggttacgtaatggaaagcctgtcactactggcgtgagtgaaaccgtgttcctgcctcgtgaggaccacctgttccggaagtttcactacttgcctttcctgccaagcacggaggacgtttacgactgccgcgtggagcactgggggcttgatgagcccttgctcaaacactgggagtttgacgcacctagtcccctcccagaaacaactgaaaatgtggtttgtgccctgggactaactgtagggctcgttggcataatcatcggcacaatttttatcatcaaaggcctcagaaaaagtaatgctgccgaaaggcgcggccctctttag

SEQ ID NO: 201640 - DNA, 690 bp, Artificial Sequence
  derived and/or modified sequence
atggcgatcagcggagtcccagtgctcggatttttcatcattgccgtgttgatgagtgctcaggaaagttgggcgatcaaggaagagcacgtcataatccaggctgagttctatctgaacccagatcagagcggggaattcatgtttgactttgatggcgatgagatctttcatgtggatatggccaagaaagagaccgtgtggcgcctggaggagtttggccgatttgccagcttcgaagctcagggagcattggcaaacatcgccgtggacaaggccaacctggagatcatgactaaaagatctaactatacacctattaccaacgacaagtttacacctcccgtcgtgaacgtgacatggctgcgcaacggaaaacctgtgacgaccggggtgtccgagacagtgtttctcccaagagaggatcacctctttagaaagttccactacctgcctttccttccatctaccgaggacgtttacgattgccgggtagagcactgggggctggatgagccgctattgaaacactgggagttcgacgctccgagccccctgccagagaccaccgagaatgtggtttgtgccctcgggctgaccgttggcctggtggggatcataatcggcaccatcttcattattaagggcgttaggaaaagcaatgcggccgagcggagaggtccattgtag

SEQ ID NO: 201641 - DNA, 765 bp, Artificial Sequence
  derived and/or modified sequence
atggcgatttcaggagtcccagtgctcggctttttcataatcgctgtattgatgtctgcccaggagtcatgggctatcaaggaagagcatgtcattatccaggccgaattttatcttaaccccgaccagtccggcgagttcatgtttgactttgacggagacgaaatatttcatgttgacatggctaagaaggagactgtttggcgactcgaagagttcggtaggttcgccagctttgaagcccaaggagccttggcaaacatcgcagtggacaaggctaacctggagatcatgaccaagcgctcaaattacacgcccattactaacgtgcctccggaagttacagtacttactaattcacctgtggaattacgtgagcctaacgtgctgatctgctttatagacaagtttacaccaccagtggtgaacgtgacctggctgagaaatgggaagcccgtcaccaccggagtgagcgagacggtgttcctgccccgcgaggaccacctctttcgtaaatttcactacctgcctttcttaccaagcacggaggacgtgtacgattgccgcgtggagcattggggactggatgagccgctgctgaagcattgggaatttgacgctccttcgcccttgccggaaaccacggagaacgtcgtctgcgccctggggctgacagtcggcctggtgggcattatcattggcaccatattcattatcaaaggcgttagaaagtccaatgctgctgaacgccgtggacccctgtag

SEQ ID NO: 201642 - DNA, 765 bp, Artificial Sequence
  derived and/or modified sequence
atggctatcagcggagtgcccgtcctcggatttttcatcatagctgttctgatgtcggcacaagagtcttgggcaattaaggaggaacatgtcattattcaggcagaattttacttaaaccccgaccagtccggggagttcatgttcgatttcgacggagacgaaatcttccatgtagacatggcgaagaaggaaacagtgtggcgcctagaagaatttggtcgcttcgctagcttcgaggcccagggtgcactggcaaacatcgcggtcgacaaagcgaacctggagattatgacgaagcgaagtaactacacccccataactaacgtgcctcccgaggttactgtcctcaccaattccccagtggagttacgtgaaccaaacgtcctgatatgcttcatcgacaaatttacaccaccagtggtcaatgttacatggctccgaaacggcaagcccgtgactaccggagtttctgagacggtgtttttaccaagagaggatcacttattccgcaaatttcactacctgccctttcttccgagcactgaggatgtgtacgactgtagagttgaacactgggggctggatgagccacttctaaagcattgggagttcgatgctccttcgcccctccccgagaccacggaaaacgtagtgtgtgccctggggttgactgtagggctggtgggtatcattattggaaccatttttatcatcaaagggctgagaaagtctaacgcagcagagcgccggggtcccctatag

SEQ ID NO: 201643 - DNA, 690 bp, Artificial Sequence
  derived and/or modified sequence
atggcaatctctggtgttccagtgctgggtttttttatcattgccgtgctgatgtccgcgcaggaaagctgggccatcaaagaagaacatgtgattattcaagccgaattttatctgaaccccgaccagtccggggagttcatgttcgattttgacggcgacgagatcttccatgtcgatatggcaaagaaggagaccgtctggcgcctcgaagagtttggacgatttgcgagcttcgaggcccagggcgctcttgctaacatcgccgtcgacaaagcaaacctcgagattatgactaaaagaagtaactacacacctatcaccaatgataagttcactccacctgtggtcaacgtgacatggctgcggaacggcaaacctgttacaactggtgtgagtgaaactgtgttcttacctagggaggaccacttatttcggaaattccactacctgccttttcttccctccaccgaggatgtttatgactgcagggtcgaacattgggggctcgacgagcctttgctgaaacattgggagttcgacgcacctagccccctccccgaaaccactgaaaatgtcgtttgtgcccttgggctcactgttgggctcgtggggattattattggtaccatcttcatcataaaaggcgtaaggaagtccaacgcagcagagagacggggacctctgtag

SEQ ID NO: 201644 - DNA, 765 bp, Artificial Sequence
  derived and/or modified sequence
atggccatctctggggtcccagtccttggctttttcatcattgccgtcttgatgagcgctcaggagagctgggccatcaaagaggaacacgtcatcatccaggctgaattttatcttaacccagaccagtccggagagtttatgttcgattttgatggagatgaaatcttccatgtggatatggctaaaaaagagacagtctggagacttgaggagttcggccgttttgcatctttcgaagcgcagggcgcactggccaatatcgcagtagataaggcgaacctggagataatgacgaaaagaagcaactatactcccattacaaacgtgccccctgaggtgaccgtcctaactaattcaccagtggagctgcgggaacctaacgtcctcatatgcttcattgacaaattcaccccaccagttgtgaacgtgacctggctccggaatgggaaacccgtcactaccggcgtgtcagagacagtcttcttacctcgggaagatcacctgttccgcaagttccattatctgcctttcctgccatctactgaggacgtctacgactgcagggtggaacactggggactggacgagccattgctaaaacactgggaattcgacgccccgagccctctccctgaaacaacggagaatgtcgtgtgcgctctcgggctaaccgtgggtctcgtgggaatcattattggaacgatctttatcatcaaaggtgtgcggaagtctaacgccgctgagaggcgagggcccctgtag

SEQ ID NO: 201645 - DNA, 765 bp, Artificial Sequence
  derived and/or modified sequence
atggctatctctggcgttccagtgttgggctttttcattattgcggtgctgatgtcagcccaggaatcatgggccataaaggaagaacatgtcatcatccaagcagaattttacctgaacccagaccagtcgggagagtttatgtttgacttcgatggggatgagatttttcatgtggatatggctaagaaggaaacagtctggcgcctggaagagttcggacggttcgcctcatttgaggctcaaggtgccctggctaatattgcagtagataaagctaatttggaaattatgactaagagaagcaactacactcccattaccaacgtccccccagaggtcaccgtgctcactaacagccccgtcgagctgagggaacccaacgtgcttatttgttttatcgataagtttacacctccggtggtgaatgtcacatggcttagaaatggcaagcccgttactaccggcgtatccgaaaccgtgtttttgcctcgtgaggatcacctctttaggaaatttcactacctgccttttcttcccagcaccgaggatgtatatgactgccgcgtggaacattggggcttagacgagcctctattaaagcactgggagttcgacgccccgtcccccttgccggagactactgagaatgtggtgtgtgccctgggactcacagtcgggctggtgggtatcattataggcactatctttattatcaagggagttcgcaagtcaaacgccgctgagagaagggggcctctctag

SEQ ID NO: 201646 - DNA, 690 bp, Artificial Sequence
  derived and/or modified sequence
atggccatcagcggtgtacccgtgctgggtttttttattatcgccgtgctcatgtctgctcaggagtcttgggcgatcaaagaagaacacgtgattatccaggccgagttttatctcaatccagaccagtccggggaatttatgttcgactttgatggagatgagattttccacgttgatatggcaaaaaaagagactgtgtggcgactcgaggaattcggtaggttcgctagcttcgaggcccagggggctttggccaacattgcagtggataaagcaaacctggagattatgactaagcgctctaattacactccaattacaaacgacaaattcacaccaccagtggtcaatgtaacctggctccgcaacggtaaacctgtaaccacgggtgtcagtgaaacagtttttctgccccgtgaagatcatctgttccggaagttccactatctcccctttctgccctccaccgaagatgtgtatgactgccgagtggagcattggggattagacgaacccctgctaaagcactgggagtttgatgcgccctcccccctgcccgagacgaccgagaacgtggtttgtgcccttggtttgactgtgggtctagtgggtataattatagggactattttcatcattaagggtgttaggaaatctaacgcggccgagcgccggggccccctgtag

SEQ ID NO: 201647 - DNA, 765 bp, Artificial Sequence
  derived and/or modified sequence
atggccatctcaggtgtgccagtgcttgggttcttcatcattgcagtgttaatgtcagctcaggaatcctgggcaattaaagaggaacacgtgatcatccaggcagaattttatctcaatccagaccagagtggtgaattcatgtttgacttcgacggtgatgaaatcttccatgtggatatggccaagaaagagacagtctggaggcttgaagaattcgggaggtttgcatccttcgaggctcagggcgccctagccaacattgccgtggataaggcaaatctggaaataatgaccaagcggtctaattacacccccatcaccaacgtcccacctgaggttacagtgctcaccaactcacctgttgagttacgagaaccgaatgtcctcatatgctttatcgacaagtttactccccccgtggtcaacgttacctggctcagaaatggcaagccagtgactaccggcgtgtccgagactgtgtttctcccccgagaggaccacttgttcagaaagtttcattatctccccttcctccctagtacggaggacgtctatgactgcagggttgagcactgggggctggatgaacctctcttaaaacactgggaattcgacgcaccttcgccactacccgaaacaacggaaaatgtcgtctgtgctttaggtttgaccgtgggactggtgggcattataatagggacaatctttatcattaaaggagttagaaagagtaacgcggccgaacgaaggggcccactctag

SEQ ID NO: 201648 - DNA, 690 bp, Artificial Sequence
  derived and/or modified sequence
atggccatctccggagtgcctgtattgggcttcttcatcatcgccgtcctcatgagcgctcaggaatcctgggctattaaggaggaacacgtgatcatccaggctgagttctacttgaaccctgaccagagtggggaattcatgttcgatttcgacggtgatgagatatttcacgtcgatatggctaagaaagagaccgtctggcggttggaggaatttggcagatttgctagtttcgaggcacagggggcacttgccaatattgcggtggacaaagcgaacctggagattatgacaaagcgcagcaattatacccctatcactaacgataagttcacgccgcccgttgttaatgtgacctggctgaggaatggcaagccagttacaaccggcgtatctgaaacagtgtttcttcctagagaggatcatctgttccggaaatttcattacctgcctttcctgccttctaccgaggatgtgtacgattgtcgagttgagcactgggggttggacgaacccctcttgaagcactgggagtttgacgctccgtcccctcttcccgagactactgaaaatgtcgtctgcgcactcggtctgacagtgggcttagtgggcataatcatcggcaccattttcatcatcaaaggtgtgaggaagtccaacgcagcagagcgccgtgggcccctctag

SEQ ID NO: 201649 - DNA, 690 bp, Artificial Sequence
  derived and/or modified sequence
atggccatcagtggtgtgcctgttctggggttcttcattattgcagtgctgatgtcagcacaggagagttgggccattaaggaggagcacgtaattatccaggctgagttttacctgaaccctgatcagagtggtgaattcatgttcgattttgatggcgacgagatatttcatgttgacatggcgaagaaggaaaccgtttggcgcctggaggagtttgggcgctttgccagtttcgaagcccaaggagctttagccaacatagcagtagacaaagcaaatctggagatcatgactaaacgcagcaattatacgccaattacaaatgacaagttcaccccaccggtggtcaatgtcacctggcttcgaaatggcaagcccgtgacaactggggtctcagaaacagtattcctgccccgcgaggatcacctattcaggaagttccactatttacctttcttacccagcaccgaggatgtgtacgattgccgggtagagcactgggggttagacgaaccactcctgaagcattgggaattcgatgcacccagccccctgccagagaccacagaaaatgtcgtgtgtgcccttggcctcactgtcggacttgtgggcattataattggcactatcttcattatcaaaggcgttcgtaagtcgaacgctgcggaacgaagaggccccctgtag

SEQ ID NO: 201650 - DNA, 690 bp, Artificial Sequence
  derived and/or modified sequence
atggctatatccggagtgcctgtcctggggtttttcattattgccgttctgatgtctgcccaagaatcctgggcaatcaaagaggagcacgtaattattcaggctgaattctatttaaaccctgaccagtctggagaattcatgttcgacttcgatggcgatgaaattttccacgtcgatatggctaagaaggagactgtgtggcgactcgaggagtttggtcggttcgcaagttttgaagcgcaaggcgccctcgcgaacattgccgtcgacaaagccaatctggaaatcatgacgaaaagaagcaattatacacctatcacaaacgacaagtttactccaccggtcgttaacgtgacctggctccgcaatggcaaaccggtgacaactggtgtgtccgaaaccgtgtttctgccaagagaagatcacctgtttaggaagttccattatttgcctttcctgcctagcactgaagacgtctacgactgcagggtcgagcactggggcctcgacgaaccacttttgaagcactgggagttcgatgctccatctcctctccctgaaactaccgaaaatgtcgtgtgcgcccttggcctaacggtgggccttgtcggtataataatcggcactatctttattatcaaggggttgaggaagtctaacgccgcggaaagaagaggccccttgtag

SEQ ID NO: 201651 - DNA, 765 bp, Artificial Sequence
  derived and/or modified sequence
atggcgatcagtggcgtgcccgtgctgggattttttatcattgctgtcctcatgagcgcacaggagtcctgggctattaaggaggagcacgtcatcatccaggccgaattttatctgaaccccgaccagtctggagaattcatgtttgacttcgatggggatgaaatcttccatgtcgatatggcgaagaaggaaaccgtttggcgactggaggagtttgggagattcgcatccttcgaggcccagggggcactggccaatatcgctgtggataaagccaatttggaaatcatgaccaaaagatccaactacacaccgatcaccaatgtgccaccagaggtgactgtcctaaccaattctcctgtggaactgagagaacccaatgtgcttatctgcttcatcgacaagttcaccccccctgttgtcaatgtgacatggttgcggaacggcaaacccgtgactacaggggtttccgaaacagtgtttctgccgcgcgaggaccatcttttcaggaaattccattacctgccattcctgccgagcacagaagatgtgtacgattgtagggtcgaacactgggggttggacgagccattactgaagcactgggaattcgatgctccgagtcccctaccagaaacaacagaaaacgttgtatgcgcactcggtctgaccgttggccttgtgggcattataattggaactatcttcatcatcaaaggagtaagaaaatccaacgcggcggagcgacgggggccactttag

SEQ ID NO: 201652 - DNA, 543 bp, Artificial Sequence
  derived and/or modified sequence
atggcaatttcgggtgtccccgtcctgggtttttttattattgcagtgctgatgtctgcacaggaatcatgggccattaaggaagaacatgtgataatccaagctgaattttatctaaacccagatcagagtggtgagttcatgtttgactttgacggcgacgagatttttcacgtcgatatggcaaaaaaggagacggtgtggcgcttggaggagttcgggcggtttgcttcatttgaggcccagggcgccctagctaatatagcagtggataaggctaaccttgagattatgacgaagcgcagtaaaccaagtcccagagactatcgggagagaggagtttgccccggcccagactgtggtagtggcgggcatcattattgggatcatctgcaccaccagggaatagctcaaaagcagtgctctcgcactcaaggggccagtgtccgccacatggaggttatggtgttcctgcgtgagaaaattacagaggagacaagtgcccttatggcactgcagagttggcagtattataacccatag

SEQ ID NO: 201653 - DNA, 714 bp, Artificial Sequence
  derived and/or modified sequence
atgtccgcccaggagtcctgggccatcaaagaggagcacgtgattatccaggcggaattttacctcaacccagatcaaagcggcgaattcatgttcgatttcgatggggacgagatctttcacgtggacatggcaaaaaaggagaccgtgtggcgactggaagaattcggacgcttcgcctccttcgaagcccaaggtgccctggcaaacatagccgtggataaggcaaacttggagatcatgacaaaacgatcaaactacacacctatcacaaacgtgccccccgaggttacagtgttaaccaactcccctgtggaattgcgcgaacctaacgtcctcatttgtttcatagacaagttcaccccccccgttgtaaacgtgacctggctgcggaacggaaagcccgtcaccactggcgtgagcgagactgtttttctgccaagggaggatcatctctttagaaagtttcactatttaccattcctccccagcactgaggatgtgtacgactgtcgcgtggagcactggggtctggacgagccacttctgaagcactgggagttcgatgcgcctagccccctccctgagaccaccgaaaatgtcgtgtgtgcccttggcctgactgtgggtctggttgggattatcatcggcaccattttcattataaaaggtgtacggaagtcaaacgccgccgaaagacggggccccctgtag

SEQ ID NO: 201654 - DNA, 498 bp, Artificial Sequence
  derived and/or modified sequence
atggccaagaaagaaacagtgtggcgcttggaagaattcggcagattcgcttcctttgaagcgcaaggcgcactcgcgaacattgcagtggacaaagctaatctggaaattatgaccaagcgttccaactacactcccatcacaaacgttcccccagaagtcacagtgttaactaacagccccgtggagttgagagaacccaatgtgctaatttgttttatcgataagtttacacctccggtggtcaatgtgacctggctccgtaacgggaagccggtgactacaggtgtgagcgagacagtgtttctgagcatcgccttctcttgtatctatttcccgttattccccataatcctcctgtcaccttgtaatgcctcagggatcaagcataccggcgtatgtctctgttatgggatgcctcacggcgcctctctggtttacctactgtttaaggtgagcagtaattgtgattttagcgaacacaataaactgttctag

SEQ ID NO: 201655 - DNA, 453 bp, Artificial Sequence
  derived and/or modified sequence
atggccatctccggagtccccgtgctcggcttcttcattattgctgttctcatgagcgctcaggagagctgggctatcaaagaagaacacgtgattatacaggccgagttttatcttaatccagaccaatccggagagtttatgttcgatttcgatggggacgaaatcttccatgtggatatggctaaaaaagagaccgtttggaggctcgaagagtttggcaggttcgccagcttcgaggcgcagggtgcgttggctaatatagctgtcgataaagctaatttggaaatcatgaccaaacgcagtaactacacccccattactaatgtccctcccgaagtcactgtactgacaaattccccagtcgaattaagagagccgaatgttctgatttgtttcatcataaaaggtgtgcggaagtccaacgcggccgaacgccgtggtccgctctag

SEQ ID NO: 201656 - DNA, 543 bp, Artificial Sequence
  derived and/or modified sequence
atggctatatcaggggtccctgtgctgggcttttttattatcgccgtcctgatgtccgcccaggaatcttgggccatcaaagaagagcatgtcatcatccaggctgaattctacctgaatcctgatcagagcggcgagtttatgttcgattttgatggagatgagattttccacgtagacatggcaaagaaggagaccgtctggagactggaagagttcggcaggttcgctagttttgaagcacagggggcactcgccaacattgcagtggacaaggccaatttggaaattatgaccaaaaggagtaaaccttctcctcgagattatcgcgaacgaggagtatgtcccggtcccgattgtgggtccggggggcatcactattgggatcacctccaccatcaaggatcggcccagaaacagtgcagcaggactcagggagctagtgtccggcatatggaggtcatggtgtttcttcgggagaaaatcacagaagaaacttccgccctgatgactctgcagtcttggcagtattataatccgtag

SEQ ID NO: 201657 - DNA, 543 bp, Artificial Sequence
  derived and/or modified sequence
atggctatcagcggagtccccgtgctaggattttttattatagccgtcctaatgtcagcccaggaatcttgggcaatcaaggaggaacatgtaattatccaggctgaattctaccttaacccagatcagagcggggagtttatgtttgactttgacggggacgagattttccacgttgacatggcaaaaaaggaaacagtctggagactggaagagttcggccgcttcgcctcctttgaagcccagggagccctggcgaatatcgcggtggacaaagccaacttagagatcatgaccaaacgcagcaagccttctcccagggattatagagagcggggcgtctgtcccggtcccgattgcgggtccggtggccaccactattgggaccatctgcaccatcagggctctgctcaaaagcagtgtagccgaacccaaggagcatccgttcgacatatggaggtgatggtttttctgcgcgaaaagatcacagaggaaacaagcgccctaatgacactgcagagctggcagtactataacccctag

SEQ ID NO: 201658 - DNA, 498 bp, Artificial Sequence
  derived and/or modified sequence
atggcaaaaaaggaaactgtttggaggctcgaagagttcggtcgctttgcatcgttcgaggcacaaggggccctggccaacatcgcagtcgacaaggcaaatctggagataatgactaagcggagtaactatacgccaatcacgaatgttccccctgaagttactgtgctcactaatagccccgtagaactgcgcgagccaaacgtccttatttgcttcatagataagtttacccctcctgtggtcaatgtaacatggttgagaaatggtaagcctgttaccaccggagtctccgaaacagtgttcctcagcattgcctttagctgtatatattttcccctgtttcccataatcctgctctccccttgcaatgcgtcaggaatcaaacatacaggtgtttgtttgtgctacgggatgccgcacggggccagcctcgtgtacctgctgttcaaggtaagctcaaattgtgatttctccgaacacaacaaactgttttag

SEQ ID NO: 201659 - DNA, 543 bp, Artificial Sequence
  derived and/or modified sequence
atggcgatcagcggcgtgcccgtgttggggttttttatcattgccgtgttaatgagtgcccaggagtcctgggcaatcaaggaagagcatgttatcatccaggccgagttctatctgaatcccgaccagagcggagagtttatgtttgacttcgacggggacgagatcttccacgtggacatggctaagaaagaaaccgtttggcggcttgaagagttcggccgctttgcttccttcgaagcccagggcgcactcgccaatatcgccgtagataaggcaaatcttgaaattatgacgaaacgctcaaagccgtcgcctagagactatcgagagcgtggcgtatgccccggtcccgactgcggctccggaggacatcattattgggatcacctgcaccaccagggaagcgcacaaaaacagtgttcaaggacccagggagcttctgtgcggcacatggaggtaatggtcttccttagggagaagatcaccgaggaaaccagcgcactgatgacgctccagagctggcaatactataatccttag

SEQ ID NO: 201660 - DNA, 498 bp, Artificial Sequence
  derived and/or modified sequence
atggcaaagaaggagactgtatggcgactcgaggagtttgggagattcgcaagtttcgaagctcagggggctctcgctaatatagccgtggacaaggcaaacctggagataatgacaaaacgcagtaattatacacccatcacgaacgtgccacctgaggtcaccgtattaacaaactctccggtggagctcagggaaccaaacgtcctgatctgctttatagacaaattcaccccccccgtagtgaatgtgacgtggctgcgcaatgggaaaccagtgacaaccggcgtaagcgagacggtgttcttatcaatcgcttttagctgcatttacttcccgctctttcctatcatcctgctgagcccctgcaacgctagcgggattaagcacactggggtctgcttgtgctatggaatgccgcacggggcctccttggtgtatctactcttcaaagtgagctcaaattgcgacttttcagagcataacaagctgttctag

SEQ ID NO: 201661 - DNA, 714 bp, Artificial Sequence
  derived and/or modified sequence
atgagcgcccaggagtcatgggcaatcaaggaagagcacgttatcatccaagcagaattctacctcaatcccgaccagagtggagagttcatgttcgacttcgatggagacgaaattttccacgtggatatggctaagaaggagactgtctggcgtctcgaagaatttggaaggttcgcctcctttgaggcccagggagcactggcaaacatcgctgttgacaaggccaatctcgaaatcatgactaaacgctccaattacaccccaatcacaaatgtgcctcccgaggtgaccgtgctgacaaatagtccagtggaactcagggagccaaatgttttaatttgcttcatcgacaagttcacaccccccgtcgtgaatgttacctggctccgtaacggcaagcctgtgaccaccggggtgtccgaaaccgtgttcctgccaagggaagatcacctgttccgcaaattccattatctgccatttctccccagcaccgaggacgtctatgattgcagggtggaacactggggcttggacgagcccctgcttaaacactgggaatttgacgctccgtcccctctccccgagacaacagagaacgttgtttgtgccctcggacttaccgtcggtctcgtaggcattataattggtaccattttcatcattaagggcgttcggaaatcaaatgccgctgagcggcgaggaccgctctag

SEQ ID NO: 201662 - DNA, 543 bp, Artificial Sequence
  derived and/or modified sequence
atggcgatttccggcgttcccgtactgggttttttcatcatcgcggtattgatgtccgctcaagagagttgggccatcaaggaagagcacgtgattatccaggctgagttctacttgaaccccgatcagtctggagagttcatgtttgattttgacggtgatgaaatctttcatgtggacatggccaagaaggaaactgtttggaggctggaagagttcggcagatttgctagttttgaggcacagggagctttggcaaatattgcggtggacaaggcgaatctcgagattatgactaaacgctcgaaaccttctccccgggattacagagagcggggcgtgtgtccagggcctgattgcgggtctgggggacaccactattgggatcaccttcaccaccaggggagtgcacagaagcagtgttctcgcacacagggcgcttctgtgcggcacatggaagtgatggtcttcttgcgagagaaaataacagaggagacctctgcgctgatgaccctgcagtcatggcaatattacaacccatag

SEQ ID NO: 201663 - DNA, 498 bp, Artificial Sequence
  derived and/or modified sequence
atggctaaaaaggagacagtgtggcgactagaagagttcgggagatttgccagctttgaagcccaaggcgccctggccaacattgccgtggataaggccaacctggagataatgaccaagagatcaaactacacaccgataacgaatgtgccaccggaggtcaccgtgttgaccaactctccggtggagctgagagagcccaacgtactgatttgttttattgacaaattcacaccccccgtggtcaatgttacctggctgcgaaacggtaagcccgttaccaccggggtgagcgaaacggtttttctgtcgattgccttttcatgcatctactttcccttgttccctatcatcctcttatcaccatgcaacgcctctggtattaagcatacaggcgtttgcctttgttatgggatgcctcacggtgcttccctggtctatctgctgtttaaggtcagttcaaattgcgattttagtgaacacaataagttgttctag

SEQ ID NO: 201664 - DNA, 498 bp, Artificial Sequence
  derived and/or modified sequence
atggctaaaaaagagacagtctggaggttggaggagttcggccggtttgcatcattcgaagcccaaggagctctcgcaaatatcgctgttgataaggcgaatctggaaatcatgacgaaacggtctaactacacgccaatcactaacgttccaccggaagttaccgtcctgacaaacagccccgtggagctgcgagaaccaaacgttctgatctgcttcattgacaaattcaccccgcctgtggtcaacgtgacatggctccggaacgggaaaccagtgactactggggtgtccgaaacagtttttctgagcatagctttctcctgcatctacttcccattgtttcccatcattctcctatctccatgtaacgcaagtggcatcaagcatacaggtgtttgtctctgttacggcatgcctcacggggcttccctcgtgtacctgcttttcaaagtatcatctaactgcgattttagcgaacacaacaagctattttag

SEQ ID NO: 201665 - DNA, 714 bp, Artificial Sequence
  derived and/or modified sequence
atgagcgcccaagaatcctgggccatcaaagaggaacacgtcattattcaggccgagttctatttaaatccagaccagtctggcgaattcatgttcgacttcgatggagacgagatcttccacgtggacatggctaagaaggagacggtgtggagactcgaagaattcggtcgctttgcgagtttcgaggcccagggtgcactagctaacattgccgtagacaaagctaacctggagatcatgaccaaacgaagcaactacactccaattaccaatgttccgccagaggtgacggtcctgacgaactcccccgtggagctccgcgagccaaatgtgttgatttgcttcattgacaagttcactcccccggtcgtgaatgtcacttggctgcgtaacgggaaacccgtcacaaccggagtatccgaaactgtgttcttaccgcgcgaggatcacctcttcagaaaattccattacctgccatttttacccagcacggaggatgtgtatgattgtcgtgtcgagcattggggattggatgagcctctcctgaaacattgggagtttgacgctccatctccccttcctgagaccacggaaaatgtggtgtgtgcgctggggctgaccgtaggactggtcggaattataattggaaccatttttataatcaagggggtacggaagtccaacgccgcggaacgcaggggtcccctttag

SEQ ID NO: 201666 - DNA, 543 bp, Artificial Sequence
  derived and/or modified sequence
atggccatcagtggtgtgcctgtcctcggtttctttatcattgcggttctgatgtctgcacaagaatcatgggctatcaaagaggaacacgtgatcatccaggctgaattctacttgaaccccgaccagtccggagagttcatgtttgactttgatggcgatgagattttccatgtggacatggctaagaaggaaacagtgtggaggctcgaggagtttggcaggttcgctagcttcgaagcgcagggcgccctcgccaacatcgcagtggacaaggcaaaccttgagattatgacaaaaaggtcaaaaccttctccaagagattatagggaatgtggggtctgtcctggccctgactgcggttctggcggacaccattattgggaccacctgcatcaccaggggtctgcacagaaacagtgttctcgcactcagggtgcttccgtgcggcacatggaggtaatgatgttcctgcgggaaaaaatcactgaagaaacaagcgccctcatgacactccaatcctggcagtattacaacccttag

SEQ ID NO: 201667 - DNA, 498 bp, Artificial Sequence
  derived and/or modified sequence
atggccaagaaggaaacagtttggaggttggaggagtttggccgcttcgcttctttcgaggcccagggtgccctcgcaaacattgccgtggataaggccaatttggaaattatgaccaaaaggtctaactataccccaattactaacgtacctcccgaagtcacagtccttacaaacagtcccgtcgaactgagggaaccaaacgtcctaatctgctttatcgataaatttactccacccgtggtgaacgttacttggcttaggaatggtaaaccagttaccaccggagtgtcggagactgtgttcctgtccatagccttctcctgtatctactttccactctttcccatcattctgttatctccgtgtaacgctagcggaattaaacacaccggtgtctgcctgtgctacggcatgccacacggggcctctctggtatatcttctctttaaggtttccagcaattgcgatttctctgaacataacaagctgttttag

SEQ ID NO: 201668 - DNA, 714 bp, Artificial Sequence
  derived and/or modified sequence
atgagcgctcaagagtcctgggcgattaaggaagagcacgtgattattcaggccgagttttatctgaatccagatcagagtggagagttcatgtttgatttcgacggggatgaaatttttcacgtcgacatggccaaaaaagagacagtgtggagacttgaagaattcggccgatttgcttcctttgaggctcagggagctctggccaatattgcggtggacaaggctaacctggagattatgacaaaacgatcaaactacacccccatcacaaacgtccctcctgaggttacggttctgacaaactcccccgtggagctgagagagccaaacgtgctgatctgcttcatagacaaatttacgccaccggtggtgaacgttacctggctaagaaatggaaagcccgtgaccacaggggtgagcgagacggttttcttgccccgggaggaccacctgttcaggaaatttcattacctacctttcttacccagtacagaggacgtgtacgactgtcgggtcgagcattggggactggatgaaccgcttcttaaacactgggaatttgatgctccctcccccttgcctgagacaacagagaatgtcgtatgcgcgcttggcctcaccgtagggctcgtcggaataatcatagggaccatctttatcatcaagggcgtacggaagagtaacgcagcggagcgtagaggtcctctctag

SEQ ID NO: 201669 - DNA, 690 bp, Artificial Sequence
  derived and/or modified sequence
atggccatcagcggcgtgcctgtgctgggcttcttcatcatcgctgtgctgatgtctgcccaggagagctgggccatcaaggaggagcacgtgatcatccaggccgagttctacctgaacccagaccagagcggggagttcatgtttgattttgatggagatgagatcttccacgtggacatggccaagaaggagaccgtgtggaggctggaggagtttggccgctttgccagctttgaggcccagggcgccctggccaacattgctgtggacaaggccaacctggagatcatgaccaagaggagcaactacacccccatcaccaatgacaagttcaccccacctgtggtgaatgtgacctggctgagaaatggcaagcctgtgaccaccggggtgtctgaaacagtgttcctgccccgggaggaccacctgttcaggaagttccactacctgcccttcctgcccagcacagaagatgtgtatgactgccgggtggagcactggggcctggatgagcccctgctgaagcactgggagtttgatgcccccagccccctgcctgagaccacagaaaatgtggtgtgtgccctgggcctgactgtgggcctggtgggcatcatcatcggcaccatcttcatcatcaagggcctgaggaagagcaatgctgctgagcggcggggccccctgtag

SEQ ID NO: 201670 - DNA, 765 bp, Artificial Sequence
  derived and/or modified sequence
atggccatcagcggcgtgcctgtgctgggcttcttcatcatcgctgtgctgatgtctgcccaggagagctgggccatcaaggaggagcacgtgatcatccaggccgagttctacctgaacccagaccagagcggggagttcatgtttgattttgatggagatgagatcttccacgtggacatggccaagaaggagaccgtgtggaggctggaggagtttggccgctttgccagctttgaggcccagggcgccctggccaacattgctgtggacaaggccaacctggagatcatgaccaagaggagcaactacacccccatcaccaacgtgcccccagaggtgacagtgctgaccaacagccctgtggagctgcgggagcccaacgtgctgatctgcttcatcgacaagttcaccccacctgtggtgaatgtgacctggctgagaaatggcaagcctgtgaccactggagtgtctgagaccgtcttcctgccccgggaggaccacctgttcaggaagttccactacctgcccttcctgcccagcacagaagatgtgtatgactgccgggtggagcactggggcctggatgagcccctgctgaagcactgggagtttgatgcccccagccccctgcctgagaccacagaaaatgtggtgtgtgccctgggcctgactgtgggcctggtgggcatcatcatcggcaccatcttcatcatcaagggcctgaggaagagcaatgctgctgagcggcggggccccctgtag

SEQ ID NO: 201671 - DNA, 690 bp, Artificial Sequence
  derived and/or modified sequence
atggccatcagcggcgtgcctgtgctgggcttcttcatcatcgctgtgctgatgtctgcccaggagagctgggccatcaaggaggagcacgtgatcatccaggccgagttctacctgaacccagaccagagcggggagttcatgtttgattttgatggagatgagatcttccacgtggacatggccaagaaggagaccgtgtggaggctggaggagtttggccgctttgccagctttgaggcccagggcgccctggccaacattgctgtggacaaggccaacctggagatcatgaccaagaggagcaactacacccccatcaccaatgacaagttcaccccacctgtggtgaatgtgacctggctgagaaatggcaagcctgtgaccaccggggtgtctgaaacagtgttcctgccccgggaggaccacctgttcaggaagttccactacctgcccttcctgcccagcacagaagatgtgtatgactgccgggtggagcactggggcctggatgagcccctgctgaagcactgggagtttgatgcccccagccccctgcctgagaccacagaaaatgtggtgtgtgccctgggcctgactgtgggcctggtgggcatcatcatcggcaccatcttcatcatcaagggcgtgaggaagagcaatgctgctgagcggcggggccccctgtag

SEQ ID NO: 201672 - DNA, 765 bp, Artificial Sequence
  derived and/or modified sequence
atggccatcagcggcgtgcctgtgctgggcttcttcatcatcgctgtgctgatgtctgcccaggagagctgggccatcaaggaggagcacgtgatcatccaggccgagttctacctgaacccagaccagagcggggagttcatgtttgattttgatggagatgagatcttccacgtggacatggccaagaaggagaccgtgtggaggctggaggagtttggccgctttgccagctttgaggcccagggcgccctggccaacattgctgtggacaaggccaacctggagatcatgaccaagaggagcaactacacccccatcaccaacgtgcccccagaggtgacagtgctgaccaacagccctgtggagctgcgggagcccaacgtgctgatctgcttcatcgacaagttcaccccacctgtggtgaatgtgacctggctgagaaatggcaagcctgtgaccactggagtgtctgagaccgtcttcctgccccgggaggaccacctgttcaggaagttccactacctgcccttcctgcccagcacagaagatgtgtatgactgccgggtggagcactggggcctggatgagcccctgctgaagcactgggagtttgatgcccccagccccctgcctgagaccacagaaaatgtggtgtgtgccctgggcctgactgtgggcctggtgggcatcatcatcggcaccatcttcatcatcaagggcgtgaggaagagcaatgctgctgagcggcggggccccctgtag

SEQ ID NO: 201673 - DNA, 543 bp, Artificial Sequence
  derived and/or modified sequence
atggccatcagcggcgtgcctgtgctgggcttcttcatcatcgctgtgctgatgtctgcccaggagagctgggccatcaaggaggagcacgtgatcatccaggccgagttctacctgaacccagaccagagcggggagttcatgtttgattttgatggagatgagatcttccacgtggacatggccaagaaggagaccgtgtggaggctggaggagtttggccgctttgccagctttgaggcccagggcgccctggccaacattgctgtggacaaggccaacctggagatcatgaccaagaggagcaagcccagcccccgggactaccgggagcggggcgtgtgccccggccctgactgtggcagcggcggccaccactactgggaccacctgcaccaccagggcatcgcccagaagcagtgcagcaggacccagggcgcctctgtgcgccacatggaggtgatggtgttcctgcgggagaagatcacagaggagaccagcgccctgatggccctgcagagctggcagtactacaacccctag

SEQ ID NO: 201674 - DNA, 714 bp, Artificial Sequence
  derived and/or modified sequence
atgtctgcccaggagagctgggccatcaaggaggagcacgtgatcatccaggccgagttctacctgaacccagaccagagcggggagttcatgtttgattttgatggagatgagatcttccacgtggacatggccaagaaggagaccgtgtggaggctggaggagtttggccgctttgccagctttgaggcccagggcgccctggccaacattgctgtggacaaggccaacctggagatcatgaccaagaggagcaactacacccccatcaccaacgtgcccccagaggtgacagtgctgaccaacagccctgtggagctgcgggagcccaacgtgctgatctgcttcatcgacaagttcaccccacctgtggtgaatgtgacctggctgagaaatggcaagcctgtgaccaccggggtgtctgaaacagtgttcctgccccgggaggaccacctgttcaggaagttccactacctgcccttcctgcccagcacagaagatgtgtatgactgccgggtggagcactggggcctggatgagcccctgctgaagcactgggagtttgatgcccccagccccctgcctgagaccacagaaaatgtggtgtgtgccctgggcctgactgtgggcctggtgggcatcatcatcggcaccatcttcatcatcaagggcgtgaggaagagcaatgctgctgagcggcggggccccctgtag

SEQ ID NO: 201675 - DNA, 498 bp, Artificial Sequence
  derived and/or modified sequence
atggccaagaaggagaccgtgtggaggctggaggagtttggccgctttgccagctttgaggcccagggcgccctggccaacattgctgtggacaaggccaacctggagatcatgaccaagaggagcaactacacccccatcaccaacgtgcccccagaggtgacagtgctgaccaacagccctgtggagctgcgggagcccaacgtgctgatctgcttcatcgacaagttcaccccacctgtggtgaatgtgacctggctgagaaatggcaagcctgtgaccactggagtgtctgagaccgtcttcctgagcatcgccttcagctgcatctacttccccctcttccccatcatcctgctgagcccctgcaatgccagcggcatcaagcacactggagtgtgcctgtgctacggcatgcctcatggagccagcctggtgtacctgctcttcaaggtgagcagcaactgtgacttcagcgagcacaacaagctgttctag

SEQ ID NO: 201676 - DNA, 453 bp, Artificial Sequence
  derived and/or modified sequence
atggccatcagcggcgtgcctgtgctgggcttcttcatcatcgctgtgctgatgtctgcccaggagagctgggccatcaaggaggagcacgtgatcatccaggccgagttctacctgaacccagaccagagcggggagttcatgtttgattttgatggagatgagatcttccacgtggacatggccaagaaggagaccgtgtggaggctggaggagtttggccgctttgccagctttgaggcccagggcgccctggccaacattgctgtggacaaggccaacctggagatcatgaccaagaggagcaactacacccccatcaccaacgtgcccccagaggtgacagtgctgaccaacagccctgtggagctgcgggagcccaacgtgctgatctgcttcatcatcaagggcgtgaggaagagcaatgctgctgagcggcggggccccctgtag

SEQ ID NO: 201677 - DNA, 543 bp, Artificial Sequence
  derived and/or modified sequence
atggccatcagcggcgtgcctgtgctgggcttcttcatcatcgctgtgctgatgtctgcccaggagagctgggccatcaaggaggagcacgtgatcatccaggccgagttctacctgaacccagaccagagcggggagttcatgtttgattttgatggagatgagatcttccacgtggacatggccaagaaggagaccgtgtggaggctggaggagtttggccgctttgccagctttgaggcccagggcgccctggccaacattgctgtggacaaggccaacctggagatcatgaccaagaggagcaagcccagcccccgggactaccgggagcggggcgtgtgccccggccctgactgtggcagcggcggccaccactactgggaccacctgcaccaccagggcagcgcccagaagcagtgcagcaggacccagggcgcctctgtgcgccacatggaggtgatggtgttcctgcgggagaagatcacagaggagaccagcgccctgatgaccctgcagagctggcagtactacaacccctag

SEQ ID NO: 201678 - DNA, 543 bp, Artificial Sequence
  derived and/or modified sequence
atggccatcagcggcgtgcctgtgctgggcttcttcatcatcgctgtgctgatgtctgcccaggagagctgggccatcaaggaggagcacgtgatcatccaggccgagttctacctgaacccagaccagagcggggagttcatgtttgattttgatggagatgagatcttccacgtggacatggccaagaaggagaccgtgtggaggctggaggagtttggccgctttgccagctttgaggcccagggcgccctggccaacattgctgtggacaaggccaacctggagatcatgaccaagaggagcaagcccagcccccgggactacagagaatgtggggtgtgccccggccctgactgtggcagcggcggccaccactactgggaccacctgcaccaccagggcagcgcccagaagcagtgcagcaggacccagggcgcctctgtgcgccacatggaggtgatgatgttcctgcgggagaagatcacagaggagaccagcgccctgatgaccctgcagagctggcagtactacaacccctag

SEQ ID NO: 201679 - DNA, 1169 bp, Artificial Sequence
  derived and/or modified sequence
ttttcttttattcttgtctgttctgcctcactcccgagctctactgactcccaacagagcgcccaagaagaaaatggccataagtggagtccctgtgctaggatttttcatcatagctgtgctgatgagcgctcaggaatcatgggctatcaaagaagaacatgtgatcatccaggccgagttctatctgaatcctgaccaatcaggcgagtttatgtttgactttgatggtgatgagattttccatgtggatatggcaaagaaggagacggtctggcggcttgaagaatttggacgatttgccagctttgaggctcaaggtgcattggccaacatagctgtggacaaagccaacctggaaatcatgacaaagcgctccaactatactccgatcaccaatgacaagttcaccccaccagtggtcaatgtcacgtggcttcgaaatggaaaacctgtcaccacaggagtgtcagagacagtcttcctgcccagggaagaccaccttttccgcaagttccactatctccccttcctgccctcaactgaggacgtttacgactgcagggtggagcactggggcttggatgagcctcttctcaagcactgggagtttgatgctccaagccctctcccagagactacagagaacgtggtgtgtgccctgggcctgactgtgggtctggtgggcatcattattgggaccatcttcatcatcaagggattgcgcaaaagcaatgcagcagaacgcagggggcctctgtaaggcacatggaggtgatggtgtttcttagagagaagatcactgaagaaacttctgctttaatggctttacaaagctggcaatattacaatccttgacctcagtgaaagcagtcatcttcagcattttccagccctatagccaccccaagtgtggatatgcctcttcgattgctccgtactctaacatctagctggcttccctgtctattgccttttcctgtatctattttcctctatttcctatcattttattatcaccatgcaatgcctctggaataaaacatacaggagtctgtctctgctatggaatgccccatggggcatctcttgtgtacttattgtttaaggtttcctcaaactgtgatttttctgaacacaataaactattttgatgatcttgggtggaa

SEQ ID NO: 201680 - DNA, 1280 bp, Artificial Sequence
  derived and/or modified sequence
ttttaatggtcagactctattacaccccacattctcttttcttttattcttgtctgttctgcctcactcccgagctctactgactcccaacagagcgcccaagaagaaaatggccataagtggagtccctgtgctaggatttttcatcatagctgtgctgatgagcgctcaggaatcatgggctatcaaagaagaacatgtgatcatccaggccgagttctatctgaatcctgaccaatcaggcgagtttatgtttgactttgatggtgatgagattttccatgtggatatggcaaagaaggagacggtctggcggcttgaagaatttggacgatttgccagctttgaggctcaaggtgcattggccaacatagctgtggacaaagccaacctggaaatcatgacaaagcgctccaactatactccgatcaccaatgtacctccagaggtaactgtgctcacgaacagccctgtggaactgagagagcccaacgtcctcatctgtttcatagacaagttcaccccaccagtggtcaatgtcacgtggcttcgaaatggaaaacctgtcaccacaggagtgtcagagacagtcttcctgcccagggaagaccaccttttccgcaagttccactatctccccttcctgccctcaactgaggacgtttacgactgcagggtggagcactggggcttggatgagcctcttctcaagcactgggagtttgatgctccaagccctctcccagagactacagagaacgtggtgtgtgccctgggcctgactgtgggtctggtgggcatcattattgggaccatcttcatcatcaagggattgcgcaaaagcaatgcagcagaacgcagggggcctctgtaaggcacatggaggtgatggtgtttcttagagagaagatcactgaagaaacttctgctttaatggctttacaaagctggcaatattacaatccttgacctcagtgaaagcagtcatcttcagcattttccagccctatagccaccccaagagtggttatgcctcctcgattgctccatactctaacatctagctggcttccctgtctattgccttttcctgtatctattttcctctatttcctatcattttattatcaccatgcaatgcctctggaataaaacatacaggagtctgtctctgctatggaatgccccatggggcatctcttgtgtacttattgtttaaggtttcctcaaactgtgatttttctgaacacaataaactattttgaagatcttgggtggaa

SEQ ID NO: 201681 - DNA, 1123 bp, Artificial Sequence
  derived and/or modified sequence
actcccaaaagagcgcccaagaagaaaatggccataagtggagtccctgtgctaggatttttcatcatagctgtgctgatgagcgctcaggaatcatgggctatcaaagaagaacatgtgatcatccaggccgagttctatctgaatcctgaccaatcaggcgagtttatgtttgactttgatggtgatgagattttccatgtggatatggcaaagaaggagacggtctggcggcttgaagaatttggacgatttgccagctttgaggctcaaggtgcattggccaacatagctgtggacaaagccaacctggaaatcatgacaaagcgctccaactatactccgatcaccaatgacaagttcaccccaccagtggtcaatgtcacgtggcttcgaaatggaaaacctgtcaccacaggagtgtcagagacagtcttcctgcccagggaagaccaccttttccgcaagttccactatctccccttcctgccctcaactgaggacgtttacgactgcagggtggagcactggggcttggatgagcctcttctcaagcactgggagtttgatgctccaagccctctcccagagactacagagaacgtggtgtgtgccctgggcctgactgtgggtctggtgggcatcattattgggaccatcttcatcatcaagggagtgcgcaaaagcaatgcagcagaacgcagggggcctctgtaaggcacatggaggtgatggtgtttcttagagagaagatcactgaagaaacttctgctttaatgactttacaaagctggcaatattacaatccttgacctcagtgaaagcagtcatcttcagcgttttccagccctatagccaccccaagtgtggttatgcctcctcgattgctccgtactctaacatctagctggcttccctgtctattgccttttcctgtatctattttcctctatttcctatcattttattatcaccatgcaatgcctctggaataaaacatacaggagtctgtctctgctatggaatgccccatggggcatctcttgtgtacttattgtttaaggtttcctcaaactgtgatttttctgaacacaataaactattttgatgatcttgggtggaa

SEQ ID NO: 201682 - DNA, 1280 bp, Artificial Sequence
  derived and/or modified sequence
ttttaatggtcagactctattacaccccacattctcttttcttttattcttgtctgttctgcctcactcccgagctctactgactcccaaaagagcgcccaagaagaaaatggccataagtggagtccctgtgctaggatttttcatcatagctgtgctgatgagcgctcaggaatcatgggctatcaaagaagaacatgtgatcatccaggccgagttctatctgaatcctgaccaatcaggcgagtttatgtttgactttgatggtgatgagattttccatgtggatatggcaaagaaggagacggtctggcggcttgaagaatttggacgatttgccagctttgaggctcaaggtgcattggccaacatagctgtggacaaagccaacctggaaatcatgacaaagcgctccaactatactccgatcaccaatgtacctccagaggtaactgtgctcacgaacagccctgtggaactgagagagcccaacgtcctcatctgtttcatcgacaagttcaccccaccagtggtcaatgtcacgtggcttcgaaatggaaaacctgtcaccacaggagtgtcagagacagtcttcctgcccagggaagaccaccttttccgcaagttccactatctccccttcctgccctcaactgaggacgtttacgactgcagggtggagcactggggcttggatgagcctcttctcaagcactgggagtttgatgctccaagccctctcccagagactacagagaacgtggtgtgtgccctgggcctgactgtgggtctggtgggcatcattattgggaccatcttcatcatcaagggagtgcgcaaaagcaatgcagcagaacgcagggggcctctgtaaggcacatggaggtgatggtgtttcttagagagaagatcactgaagaaacttctgctttaatgactttacaaagctggcaatattacaatccttgacctcagtgaaagcagtcatcttcagcgttttccagccctatagccaccccaagtgtggttatgcctcctcgattgctccgtactctaacatctagctggcttccctgtctattgccttttcctgtatctattttcctctatttcctatcattttattatcaccatgcaatgcctctggaataaaacatacaggagtctgtctctgctatggaatgccccatggggcatctcttgtgtacttattgtttaaggtttcctcaaactgtgatttttctgaacacaataaactattttgatgatcttgggtggaa

SEQ ID NO: 201683 - DNA, 1280 bp, Artificial Sequence
  derived and/or modified sequence
ttttaatggtcagactctattacaccccacattctcttttcttttattcttgtctgttctgcctcactcccgagctctactgactcccaacagagcgcccaagaagaaaatggccataagtggagtccctgtgctaggatttttcatcatagctgtgctgatgagcgctcaggaatcatgggctatcaaagaagaacatgtgatcatccaggccgagttctatctgaatcctgaccaatcaggcgagtttatgtttgactttgatggtgatgagattttccatgtggatatggcaaagaaggagacggtctggcggcttgaagaatttggacgatttgccagctttgaggctcaaggtgcattggccaacatagctgtggacaaagccaacctggaaatcatgacaaagcgctccaactatactccgatcaccaatgtacctccagaggtaactgtgctcacaaacagccctgtggaactgagagagcccaacgtcctcatctgtttcatagacaagttcaccccaccagtggtcaatgtcacgtggcttcgaaatggaaaacctgtcaccacaggagtgtcagagacagtcttcctgcccagggaagaccaccttttccgcaagttccactatctccccttcctgccctcaactgaggacgtttacgactgcagggtggagcactggggcttggatgagcctcttctcaagcactgggagtttgatgctccaagccctctcccagagactacagagaacgtggtgtgtgccctgggcctgactgtgggtctggtgggcatcattattgggaccatcttcatcatcaagggattgcgcaaaagcaatgcagcagaacgcagggggcctctgtaaggcacatggaggtgatggtgtttcttagagagaagatcactgaagaaacttctgctttaatggctttacaaagctggcaatattacaatccttgacctcagtgaaagcagtcatcttcagcattttccagccctatagccaccccaagtgtggatatgcctcttcgattgctccgtactctaacatctagctggcttccctgtctattgccttttcctgtatctattttcctctatttcctatcattttattatcaccatgcaatgcctctggaataaaacatacaggagtctgtctctgctatggaatgccccatggggcatctcttgtgtacttattgtttaaggtttcctcaaactgtgatttttctgaacacaataaactattttgatgatcttgggtggaa

SEQ ID NO: 201684 - DNA, 1123 bp, Artificial Sequence
  derived and/or modified sequence
actcccaacagagcgcccaagaagaaaatggccataagtggagtccctgtgctaggatttttcatcatagctgtgctgatgagcgctcaggaatcatgggctatcaaagaagaacatgtgatcatccaggccgagttctatctgaatcctgaccaatcaggcgagtttatgtttgactttgatggtgatgagattttccatgtggatatggcaaagaaggagacggtctggcggcttgaagaatttggacgatttgccagctttgaggctcaaggtgcattggccaacatagctgtggacaaagccaacctggaaatcatgacaaagcgctccaactatactccgatcaccaatgacaagttcaccccaccagtggtcaatgtcacgtggcttcgaaatggaaaacctgtcaccacaggagtgtcagagacagtcttcctgcccagggaagaccaccttttccgcaagttccactatctccccttcctgccctcaactgaggacgtttacgactgcagggtggagcactggggcttggatgagcctcttctcaagcactgggagtttgatgctccaagccctctcccagagactacagagaatgtggtgtgtgccctgggcctgactgtgggtctggtgggcatcattattgggaccatcttcatcatcaagggagtgcgcaaaagcaatgcagcagaacgcagggggcctctgtaaggcacatggaggtgatgatgtttcttagagagaagatcactgaagaaacttctgctttaatgactttacaaagctggcaatattacaatccttgacctcagtgaaagcagtcatcttcagcgttttccagccctatagccaccccaagtgtggttatgcctcctcgattgctccgtactctaacatctagctggcttccctgtctattgccttttcctgtatctattttcctctatttcctatcattttattatcaccatgcaatgcctctggaataaaacatacaggagtctgtctctgctatggaatgccccatggggcatctcttgtgtacttattgtttaaggtttcctcaaactgtgatttttctgaacacaataaactattttgatgatcttgggtggaa

SEQ ID NO: 201685 - DNA, 1123 bp, Artificial Sequence
  derived and/or modified sequence
actcccaacagagcgcccaagaagaaaatggccataagtggagtccctgtgctaggatttttcatcatagctgtgctgatgagcgctcaggaatcatgggctatcaaagaagaacatgtgatcatccaggccgagttctatctgaatcctgaccaatcaggcgagtttatgtttgactttgatggtgatgagattttccatgtggatatggcaaagaaggagacggtctggcggcttgaagaatttggacgatttgccagctttgaggctcaaggtgcattggccaacatagctgtggacaaagccaacctggaaatcatgacaaagcgctccaactatactccgatcaccaatgacaagttcaccccaccagtggtcaatgtcacgtggcttcgaaatggaaaacctgtcaccacaggagtgtcagagacagtcttcctgcccagggaagaccaccttttccgcaagttccactatctccccttcctgccctcaactgaggacgtttacgactgcagggtggagcactggggcttggatgagcctcttctcaagcactgggagtttgatgctccaagccctctcccagagactacagagaacgtggtgtgtgccctgggcctgactgtgggtctggtgggcatcattattgggaccatcttcatcatcaagggagtgcgcaaaagcaatgcagcagaacgcagggggcctctgtaaggcacatggaggtgatggtgtttcttagagagaagatcactgaagaaacttctgctttaatgactttacaaagctggcaatattacaatccttgacctcagtgaaagcagtcatcttcagcgttttccagccctatagccaccccaagtgtggttatgcctcctcgattgctccgtactctaacatctagctggcttccctgtctattgccttttcctgtatctattttcctctatttcctatcattttattatcaccatgcaatgcctctggaataaaacatacaggagtctgtctctgctatggaatgccccatggggcatctcttgtgtacttattgtttaaggtttcctcaaactgtgatttttctgaacacaataaactattttgatgatcttgggtggaa

SEQ ID NO: 201686 - DNA, 1280 bp, Artificial Sequence
  derived and/or modified sequence
ttttaatggtcagactctattacaccccacattctcttttcttttattcttgtctgttctgcctcactcccgagctctactgactcccaacagagcgcccaagaagaaaatggccataagtggagtccctgtgctaggatttttcatcatagctgtgctgatgagcgctcaggaatcatgggctatcaaagaagaacatgtgatcatccaggccgagttctatctgaatcctgaccaatcaggcgagtttatgtttgactttgatggtgatgagattttccatgtggatatggcaaagaaggagacggtctggcggcttgaagaatttggacgatttgccagctttgaggctcaaggtgcattggccaacatagctgtggacaaagccaacctggaaatcatgacaaagcgctccaactatactccgatcaccaatgtacctccagaggtaactgtgctcacgaacagccctgtggaactgagagagcccaacgtcctcatctgtttcatagacaagttcaccccaccagtggtcaatgtcacgtggcttcgaaatggaaaacctgtcaccacaggagtgtcagagacagtcttcctgcccagggaagaccaccttttccgcaagttccactatctccccttcctgccctcaactgaggacgtttacgactgcagggtggagcactggggcttggatgagcctcttctcaagcactgggagtttgatgctccaagccctctcccagagactacagagaatgtggtgtgtgccctgggcctgactgtgggtctggtgggcatcattattgggaccatcttcatcatcaagggagtgcgcaaaagcaatgcagcagaacgcagggggcctctgtaaggcacatggaggtgatgatgtttcttagagagaagatcactgaagaaacttctgctttaatgactttacaaagctggcaatattacaatccttgacctcagtgaaagcagtcatcttcagcgttttccagccctatagccaccccaagtgtggttatgcctcctcgattgctccgtactctaacatctagctggcttccctgtctattgccttttcctgtatctattttcctctatttcctatcattttattatcaccatgcaatgcctctggaataaaacatacaggagtctgtctctgctatggaatgccccatggggcatctcttgtgtacttattgtttaaggtttcctcaaactgtgatttttctgaacacaataaactattttgatgatcttgggtggaa

SEQ ID NO: 201687 - DNA, 1123 bp, Artificial Sequence
  derived and/or modified sequence
actcccaacagagcgcccaagaagaaaatggccataagtggagtccctgtgctaggatttttcatcatagctgtgctgatgagcgctcaggaatcatgggctatcaaagaagaacatgtgatcatccaggccgagttctatctgaatcctgaccaatcaggcgagtttatgtttgactttgatggtgatgagattttccatgtggatatggcaaagaaggagacggtctggcggcttgaagaatttggacgatttgccagctttgaggctcaaggtgcattggccaacatagctgtggacaaagccaacctggaaatcatgacaaagcgctccaactatactccgatcaccaatgacaagttcaccccaccagtggtcaatgtcacgtggcttcgaaatggaaaacctgtcaccacaggagtgtcagagacagtcttcctgcccagggaagaccaccttttccgcaagttccactatctccccttcctgccctcaactgaggacgtttacgactgcagggtggagcactggggcttggatgagcctcttctcaagcactgggagtttgatgctccaagccctctcccagagactacagagaacgtggtgtgtgccctgggcctgactgtgggtctggtgggcatcattattgggaccatcttcatcatcaagggattgcgcaaaagcaatgcagcagaacgcagggggcctctgtaaggcacatggaggtgatggtgtttcttagagagaagatcactgaagaaacttctgctttaatggctttacaaagctggcaatattacaatccttgacctcagtgaaagcagtcatcttcagcattttccagccctatagccaccccaagagtggttatgcctcctcgattgctccatactctaacatctagctggcttccctgtctattgccttttcctgtatctattttcctctatttcctatcattttattatcaccatgcaatgcctctggaataaaacatacaggagtctgtctctgctatggaatgccccatggggcatctcttgtgtacttattgtttaaggtttcctcaaactgtgatttttctgaacacaataaactattttgaagatcttgggtggaa

SEQ ID NO: 201688 - DNA, 1280 bp, Artificial Sequence
  derived and/or modified sequence
ttttaatggtcagactctattacaccccacattctcttttcttttattcttgtctgttctgcctcactcccgagctctactgactcccaacagagcgcccaagaagaaaatggccataagtggagtccctgtgctaggatttttcatcatagctgtgctgatgagcgctcaggaatcatgggctatcaaagaagaacatgtgatcatccaggccgagttctatctgaatcctgaccaatcaggcgagtttatgtttgactttgatggtgatgagattttccatgtggatatggcaaagaaggagacggtctggcggcttgaagaatttggacgatttgccagctttgaggctcaaggtgcattggccaacatagctgtggacaaagccaacctggaaatcatgacaaagcgctccaactatactccgatcaccaatgtacctccagaggtaactgtgctcacgaacagccctgtggaactgagagagcccaacgtcctcatctgtttcatcgacaagttcaccccaccagtggtcaatgtcacgtggcttcgaaatggaaaacctgtcaccacaggagtgtcagagacagtcttcctgcccagggaagaccaccttttccgcaagttccactatctccccttcctgccctcaactgaggacgtttacgactgcagggtggagcactggggcttggatgagcctcttctcaagcactgggagtttgatgctccaagccctctcccagagactacagagaacgtggtgtgtgccctgggcctgactgtgggtctggtgggcatcattattgggaccatcttcatcatcaagggagtgcgcaaaagcaatgcagcagaacgcagggggcctctgtaaggcacatggaggtgatggtgtttcttagagagaagatcactgaagaaacttctgctttaatgactttacaaagctggcaatattacaatccttgacctcagtgaaagcagtcatcttcagcgttttccagccctatagccaccccaagtgtggttatgcctcctcgattgctccgtactctaacatctagctggcttccctgtctattgccttttcctgtatctattttcctctatttcctatcattttattatcaccatgcaatgcctctggaataaaacatacaggagtctgtctctgctatggaatgccccatggggcatctcttgtgtacttattgtttaaggtttcctcaaactgtgatttttctgaacacaataaactattttgatgatcttgggtggaa

SEQ ID NO: 201689 - DNA, 919 bp, Artificial Sequence
  derived and/or modified sequence
tttattcttgtctgttctgcctcactcccgagctctactgactcccaacagagcgcccaagaagaaaatggccataagtggagtccctgtgctaggatttttcatcatagctgtgctgatgagcgctcaggaatcatgggctatcaaagaagaacatgtgatcatccaggccgagttctatctgaatcctgaccaatcaggcgagtttatgtttgactttgatggtgatgagattttccatgtggatatggcaaagaaggagacggtctggcggcttgaagaatttggacgatttgccagctttgaggctcaaggtgcattggccaacatagctgtggacaaagccaacctggaaatcatgacaaagcgctccaagccctctcccagagactacagagaacgtggtgtgtgccctgggcctgactgtgggtctggtgggcatcattattgggaccatcttcatcatcaagggattgcgcaaaagcaatgcagcagaacgcagggggcctctgtaaggcacatggaggtgatggtgtttcttagagagaagatcactgaagaaacttctgctttaatggctttacaaagctggcaatattacaatccttgacctcagtgaaagcagtcatcttcagcattttccagccctatagccaccccaagagtggttatgcctcctcgattgctccatactctaacatctagctggcttccctgtctattgccttttcctgtatctattttcctctatttcctatcattttattatcaccatgcaatgcctctggaataaaacatacaggagtctgtctctgctatggaatgccccatggggcatctcttgtgtacttattgtttaaggtttcctcaaactgtgatttttctgaacacaataaactattttgaagatcttgggtgg

SEQ ID NO: 201690 - DNA, 1250 bp, Artificial Sequence
  derived and/or modified sequence
acattctcttttcttttattcttgtctgttctgcctcactcccgagctctactgactcccaaaagagcgcccaagaagaaaatggccataagtggagtccctgtgctaggatttttcatcatagctgtgctgatgagcgctcaggaatcatgggctatcaaagaagaacatgtgatcatccaggccgagttctatctgaatcctgaccaatcaggcgagtttatgtttgactttgatggtgatgagattttccatgtggatatggcaaagaaggagacggtctggcggcttgaagaatttggacgatttgccagctttgaggctcaaggtgcattggccaacatagctgtggacaaagccaacctggaaatcatgacaaagcgctccaactatactccgatcaccaatgtacctccagaggtaactgtgctcacgaacagccctgtggaactgagagagcccaacgtcctcatctgtttcatcgacaagttcaccccaccagtggtcaatgtcacgtggcttcgaaatggaaaacctgtcaccacaggagtgtcagagacagtcttcctgcccagggaagaccaccttttccgcaagttccactatctccccttcctgccctcaactgaggacgtttacgactgcagggtggagcactggggcttggatgagcctcttctcaagcactgggagtttgatgctccaagccctctcccagagactacagagaacgtggtgtgtgccctgggcctgactgtgggtctggtgggcatcattattgggaccatcttcatcatcaagggagtgcgcaaaagcaatgcagcagaacgcagggggcctctgtaaggcacatggaggtgatggtgtttcttagagagaagatcactgaagaaacttctgctttaatgactttacaaagctggcaatattacaatccttgacctcagtgaaagcagtcatcttcagcgttttccagccctatagccaccccaagtgtggttatgcctcctcgattgctccgtactctaacatctagctggcttccctgtctattgccttttcctgtatctattttcctctatttcctatcattttattatcaccatgcaatgcctctggaataaaacatacaggagtctgtctctgctatggaatgccccatggggcatctcttgtgtacttattgtttaaggtttcctcaaactgtgatttttctgaacacaataaactattttgatgatcttgggtgg

SEQ ID NO: 201691 - DNA, 646 bp, Artificial Sequence
  derived and/or modified sequence
attcttgtctgttctgcctcactcccgagctctactgactcccaaaagagcgcccaagaagaaaatggccataagtggagtccctgtgctaggatttttcatcatagctgtgctgatgagattttccatgtggatatggcaaagaaggagacggtctggcggcttgaagaatttggacgatttgccagctttgaggctcaaggtgcattggccaacatagctgtggacaaagccaacctggaaatcatgacaaagcgctccaactatactccgatcaccaatgtacctccagaggtaactgtgctcacgaacagccctgtggaactgagagagcccaacgtcctcatctgtttcatcgacaagttcaccccaccagtggtcaatgtcacgtggcttcgaaatggaaaacctgtcaccacaggagtgtcagagacagtcttcctgtctattgccttttcctgtatctattttcctctatttcctatcattttattatcaccatgcaatgcctctggaataaaacatacaggagtctgtctctgctatggaatgccccatggggcatctcttgtgtacttattgtttaaggtttcctcaaactgtgatttttctgaacacaataaactattttgatgatcttgggtgg

SEQ ID NO: 201692 - DNA, 922 bp, Artificial Sequence
  derived and/or modified sequence
ttcttttattcttgtctgttctgcctcactcccgagctctactgactcccaacagagcgcccaagaagaaaatggccataagtggagtccctgtgctaggatttttcatcatagctgtgctgatgagcgctcaggaatcatgggctatcaaagaagaacatgtgatcatccaggccgagttctatctgaatcctgaccaatcaggcgagtttatgtttgactttgatggtgatgagattttccatgtggatatggcaaagaaggagacggtctggcggcttgaagaatttggacgatttgccagctttgaggctcaaggtgcattggccaacatagctgtggacaaagccaacctggaaatcatgacaaagcgctccaactatactccgatcaccaatgtacctccagaggtaactgtgctcacgaacagccctgtggaactgagagagcccaacgtcctcatctgcttcatcatcaagggagtgcgcaaaagcaatgcagcagaacgcagggggcctctgtaaggcacatggaggtgatgatgtttcttagagagaagatcactgaagaaacttctgctttaatgactttacaaagctggcaatattacaatccttgacctcagtgaaagcagtcatcttcagcgttttccagccctatagccaccccaagtgtggttatgcctcctcgattgctccgtactctaacatctagctggcttccctgtctattgccttttcctgtatctattttcctctatttcctatcattttattatcaccatgcaatgcctctggaataaaacatacaggagtctgtctctgctatggaatgccccatggggcatctcttgtgtacttattgtttaaggtttcctcaaactgtgatttttctgaacacaataaactattttgatgatctt

SEQ ID NO: 201693 - DNA, 919 bp, Artificial Sequence
  derived and/or modified sequence
tttattcttgtctgttctgcctcactcccgagctctactgactcccaaaagagcgcccaagaagaaaatggccataagtggagtccctgtgctaggatttttcatcatagctgtgctgatgagcgctcaggaatcatgggctatcaaagaagaacatgtgatcatccaggccgagttctatctgaatcctgaccaatcaggcgagtttatgtttgactttgatggtgatgagattttccatgtggatatggcaaagaaggagacggtctggcggcttgaagaatttggacgatttgccagctttgaggctcaaggtgcattggccaacatagctgtggacaaagccaacctggaaatcatgacaaagcgctccaagccctctcccagagactacagagaacgtggtgtgtgccctgggcctgactgtgggtctggtgggcatcattattgggaccatcttcatcatcaagggagtgcgcaaaagcaatgcagcagaacgcagggggcctctgtaaggcacatggaggtgatggtgtttcttagagagaagatcactgaagaaacttctgctttaatgactttacaaagctggcaatattacaatccttgacctcagtgaaagcagtcatcttcagcgttttccagccctatagccaccccaagtgtggttatgcctcctcgattgctccgtactctaacatctagctggcttccctgtctattgccttttcctgtatctattttcctctatttcctatcattttattatcaccatgcaatgcctctggaataaaacatacaggagtctgtctctgctatggaatgccccatggggcatctcttgtgtacttattgtttaaggtttcctcaaactgtgatttttctgaacacaataaactattttgatgatcttgggtgg

SEQ ID NO: 201694 - DNA, 919 bp, Artificial Sequence
  derived and/or modified sequence
tttattcttgtctgttctgcctcactcccgagctctactgactcccaacagagcgcccaagaagaaaatggccataagtggagtccctgtgctaggatttttcatcatagctgtgctgatgagcgctcaggaatcatgggctatcaaagaagaacatgtgatcatccaggccgagttctatctgaatcctgaccaatcaggcgagtttatgtttgactttgatggtgatgagattttccatgtggatatggcaaagaaggagacggtctggcggcttgaagaatttggacgatttgccagctttgaggctcaaggtgcattggccaacatagctgtggacaaagccaacctggaaatcatgacaaagcgctccaagccctctcccagagactacagagaacgtggtgtgtgccctgggcctgactgtgggtctggtgggcatcattattgggaccatcttcatcatcaagggagtgcgcaaaagcaatgcagcagaacgcagggggcctctgtaaggcacatggaggtgatggtgtttcttagagagaagatcactgaagaaacttctgctttaatgactttacaaagctggcaatattacaatccttgacctcagtgaaagcagtcatcttcagcgttttccagccctatagccaccccaagtgtggttatgcctcctcgattgctccgtactctaacatctagctggcttccctgtctattgccttttcctgtatctattttcctctatttcctatcattttattatcaccatgcaatgcctctggaataaaacatacaggagtctgtctctgctatggaatgccccatggggcatctcttgtgtacttattgtttaaggtttcctcaaactgtgatttttctgaacacaataaactattttgatgatcttgggtgg

SEQ ID NO: 201695 - DNA, 1250 bp, Artificial Sequence
  derived and/or modified sequence
acattctcttttcttttattcttgtctgttctgcctcactcccgagctctactgactcccaacagagcgcccaagaagaaaatggccataagtggagtccctgtgctaggatttttcatcatagctgtgctgatgagcgctcaggaatcatgggctatcaaagaagaacatgtgatcatccaggccgagttctatctgaatcctgaccaatcaggcgagtttatgtttgactttgatggtgatgagattttccatgtggatatggcaaagaaggagacggtctggcggcttgaagaatttggacgatttgccagctttgaggctcaaggtgcattggccaacatagctgtggacaaagccaacctggaaatcatgacaaagcgctccaactatactccgatcaccaatgtacctccagaggtaactgtgctcacgaacagccctgtggaactgagagagcccaacgtcctcatctgtttcatcgacaagttcaccccaccagtggtcaatgtcacgtggcttcgaaatggaaaacctgtcaccacaggagtgtcagagacagtcttcctgcccagggaagaccaccttttccgcaagttccactatctccccttcctgccctcaactgaggacgtttacgactgcagggtggagcactggggcttggatgagcctcttctcaagcactgggagtttgatgctccaagccctctcccagagactacagagaacgtggtgtgtgccctgggcctgactgtgggtctggtgggcatcattattgggaccatcttcatcatcaagggagtgcgcaaaagcaatgcagcagaacgcagggggcctctgtaaggcacatggaggtgatggtgtttcttagagagaagatcactgaagaaacttctgctttaatgactttacaaagctggcaatattacaatccttgacctcagtgaaagcagtcatcttcagcgttttccagccctatagccaccccaagtgtggttatgcctcctcgattgctccgtactctaacatctagctggcttccctgtctattgccttttcctgtatctattttcctctatttcctatcattttattatcaccatgcaatgcctctggaataaaacatacaggagtctgtctctgctatggaatgccccatggggcatctcttgtgtacttattgtttaaggtttcctcaaactgtgatttttctgaacacaataaactattttgatgatcttgggtgg

SEQ ID NO: 201696 - DNA, 646 bp, Artificial Sequence
  derived and/or modified sequence
attcttgtctgttctgcctcactcccgagctctactgactcccaacagagcgcccaagaagaaaatggccataagtggagtccctgtgctaggatttttcatcatagctgtgctgatgagattttccatgtggatatggcaaagaaggagacggtctggcggcttgaagaatttggacgatttgccagctttgaggctcaaggtgcattggccaacatagctgtggacaaagccaacctggaaatcatgacaaagcgctccaactatactccgatcaccaatgtacctccagaggtaactgtgctcacgaacagccctgtggaactgagagagcccaacgtcctcatctgtttcatcgacaagttcaccccaccagtggtcaatgtcacgtggcttcgaaatggaaaacctgtcaccacaggagtgtcagagacagtcttcctgtctattgccttttcctgtatctattttcctctatttcctatcattttattatcaccatgcaatgcctctggaataaaacatacaggagtctgtctctgctatggaatgccccatggggcatctcttgtgtacttattgtttaaggtttcctcaaactgtgatttttctgaacacaataaactattttgatgatcttgggtgg

SEQ ID NO: 201697 - DNA, 646 bp, Artificial Sequence
  derived and/or modified sequence
attcttgtctgttctgcctcactcccgagctctactgactcccaacagagcgcccaagaagaaaatggccataagtggagtccctgtgctaggatttttcatcatagctgtgctgatgagattttccatgtggatatggcaaagaaggagacggtctggcggcttgaagaatttggacgatttgccagctttgaggctcaaggtgcattggccaacatagctgtggacaaagccaacctggaaatcatgacaaagcgctccaactatactccgatcaccaatgtacctccagaggtaactgtgctcacgaacagccctgtggaactgagagagcccaacgtcctcatctgtttcatagacaagttcaccccaccagtggtcaatgtcacgtggcttcgaaatggaaaacctgtcaccacaggagtgtcagagacagtcttcctgtctattgccttttcctgtatctattttcctctatttcctatcattttattatcaccatgcaatgcctctggaataaaacatacaggagtctgtctctgctatggaatgccccatggggcatctcttgtgtacttattgtttaaggtttcctcaaactgtgatttttctgaacacaataaactattttgatgatcttgggtgg

SEQ ID NO: 201698 - DNA, 919 bp, Artificial Sequence
  derived and/or modified sequence
tttattcttgtctgttctgcctcactcccgagctctactgactcccaacagagcgcccaagaagaaaatggccataagtggagtccctgtgctaggatttttcatcatagctgtgctgatgagcgctcaggaatcatgggctatcaaagaagaacatgtgatcatccaggccgagttctatctgaatcctgaccaatcaggcgagtttatgtttgactttgatggtgatgagattttccatgtggatatggcaaagaaggagacggtctggcggcttgaagaatttggacgatttgccagctttgaggctcaaggtgcattggccaacatagctgtggacaaagccaacctggaaatcatgacaaagcgctccaagccctctcccagagactacagagaatgtggtgtgtgccctgggcctgactgtgggtctggtgggcatcattattgggaccatcttcatcatcaagggagtgcgcaaaagcaatgcagcagaacgcagggggcctctgtaaggcacatggaggtgatgatgtttcttagagagaagatcactgaagaaacttctgctttaatgactttacaaagctggcaatattacaatccttgacctcagtgaaagcagtcatcttcagcgttttccagccctatagccaccccaagtgtggttatgcctcctcgattgctccgtactctaacatctagctggcttccctgtctattgccttttcctgtatctattttcctctatttcctatcattttattatcaccatgcaatgcctctggaataaaacatacaggagtctgtctctgctatggaatgccccatggggcatctcttgtgtacttattgtttaaggtttcctcaaactgtgatttttctgaacacaataaactattttgatgatcttgggtgg

SEQ ID NO: 201699 - DNA, 646 bp, Artificial Sequence
  derived and/or modified sequence
attcttgtctgttctgcctcactcccgagctctactgactcccaacagagcgcccaagaagaaaatggccataagtggagtccctgtgctaggatttttcatcatagctgtgctgatgagattttccatgtggatatggcaaagaaggagacggtctggcggcttgaagaatttggacgatttgccagctttgaggctcaaggtgcattggccaacatagctgtggacaaagccaacctggaaatcatgacaaagcgctccaactatactccgatcaccaatgtacctccagaggtaactgtgctcacgaacagccctgtggaactgagagagcccaacgtcctcatctgtttcatagacaagttcaccccaccagtggtcaatgtcacgtggcttcgaaatggaaaacctgtcaccacaggagtgtcagagacagtcttcctgtctattgccttttcctgtatctattttcctctatttcctatcattttattatcaccatgcaatgcctctggaataaaacatacaggagtctgtctctgctatggaatgccccatggggcatctcttgtgtacttattgtttaaggtttcctcaaactgtgatttttctgaacacaataaactattttgaagatcttgggtgg

SEQ ID NO: 201700 - DNA, 690 bp, Artificial Sequence
  derived and/or modified sequence
atggccatcagcggcgtgcccgtgctgggcttcttcatcatcgccgttcttatgtcagcccaggaatcttgggccataaaagaagaacatgtgattattcaggccgagttctacctgaatcctgaccagtcaggagagttcatgtttgacttcgacggcgacgaaatttttcatgtggatatggccaagaaagagaccgtgtggaggctggaggagtttggcaggtttgcctcttttgaggcccagggtgcattggccaacatcgccgtggacaaggcaaatctagaaattatgaccaagagatcaaactataccccgatcactaatgacaaatttacacctccagttgtaaatgttacctggctgcgcaatggcaagccggtcacaaccggagtctcggaaacagtcttcctcccccgcgaggaccaccttttccgcaagtttcactatctcccctttctgcctagcactgaggacgtttatgattgcagagtggagcattggggccttgacgagccactgctaaagcactgggagttcgacgctcctagccctcttcccgaaaccacagagaatgtggtgtgtgctctgggtctcacagtggggctggtcggcatcattataggcactattttcattatcaaagggctgaggaaaagtaatgccgctgaacgccggggtcccctttag

SEQ ID NO: 201701 - DNA, 765 bp, Artificial Sequence
  derived and/or modified sequence
atggccatcagcggcgtgcccgtgctgggcttcttcatcatcgccgtactgatgtctgcccaggagtcgtgggcaatcaaagaagagcacgtcattatccaggctgagttttacttaaaccctgatcagtcaggcgaattcatgttcgatttcgatggtgacgagatcttccacgtggatatggccaagaaggaaaccgtgtggcggcttgaagagttcggaagattcgcatccttcgaagcgcaaggtgcgttggctaatattgcagttgacaaggctaacctggagatcatgacgaaaaggtcgaactatactcccatcacgaacgtgccacccgaagtgacagtgctgactaatagcccggtcgaattacgggagccgaatgtgttgatctgcttcatcgataagttcacaccaccagtggtgaatgtcacatggctgcgcaatgggaagccagtgaccaccggcgtatcggagacggtgttcctgcctcgcgaggatcatctgttccggaagttccattacctgccattcctgccctctaccgaagacgtttatgactgtcgggtcgaacactggggtttggatgagcccctgctgaagcactgggaatttgacgctccttctccccttcccgaaaccacagaaaatgtggtctgcgctcttggcttgaccgttgggcttgtgggtattattatcggaaccattttcatcatcaagggcctgcggaagagtaatgccgccgaacggcgaggaccgttatag

SEQ ID NO: 201702 - DNA, 690 bp, Artificial Sequence
  derived and/or modified sequence
atggccatcagcggcgtgcccgtgctgggcttcttcatcatcgccgttctgatgtcggctcaggaatcctgggcaattaaggaagagcacgttattatccaagcagagttttacctgaaccctgatcagagcggggagtttatgtttgacttcgacggtgacgagatttttcatgtggatatggcaaaaaaggagactgtgtggaggttggaagagttcggtcggtttgcgagcttcgaggcacaaggagccctggccaatatagctgttgacaaagccaacctggagattatgaccaaacgctccaattacacaccaatcacaaacgataaatttactccacccgtggtgaacgtgacttggctcagaaacggaaagccggtgactaccggagtatcagaaaccgtatttctcccaagagaagatcacctgttcagaaaatttcattatctaccctttttgcccagcacagaggacgtatatgactgtagagttgagcattggggcttggacgaacctttgctgaaacactgggagttcgacgcaccctcgccgttgccagaaactacagaaaacgtcgtctgcgcacttggactgactgtgggactcgtgggtattatcatcggcaccatctttatcatcaagggggtacgcaagagcaacgcagctgaacggagaggccccttgtag

SEQ ID NO: 201703 - DNA, 765 bp, Artificial Sequence
  derived and/or modified sequence
atggccatcagcggcgtgcccgtgctgggcttcttcatcatcgccgtgctcatgtctgcacaagaatcctgggccataaaagaggagcacgtcattatacaagccgagttttatctgaaccccgatcaatcgggagagtttatgtttgactttgatggagatgaaattttccatgtggacatggcaaagaaggaaactgtgtggcggctggaggagtttgggagatttgcgagtttcgaggcacaaggtgcactggccaacattgcagttgataaggcaaatctagagattatgacaaagcgaagcaactatacccctatcactaatgtgcctcccgaggttactgttctgacaaactcccccgtagaactccgtgagcctaatgttttaatctgtttcatcgacaagttcactccacctgtagtaaatgtgacatggctccgcaatgggaaacctgtgacgactggggtttcggaaacagttttcctaccccgcgaggaccacctgttccgaaaattccattacctgccattcctgccctccactgaagacgtgtacgactgtagagtggagcattggggccttgatgaaccattattgaaacactgggagttcgacgccccatcacctctccccgagaccactgagaacgtcgtctgcgccctcgggcttaccgtaggcttggtggggatcattataggcacaattttcatcattaaaggggtgcgcaagtccaacgctgctgagagacgagggcctttgtag

SEQ ID NO: 201704 - DNA, 765 bp, Artificial Sequence
  derived and/or modified sequence
atggccatcagcggcgtgcccgtgctgggcttcttcatcatcgccgtcctgatgagcgcgcaagagtcttgggcgattaaagaggaacacgtgatcatccaggccgaattctacctgaatccggatcaaagcggagagttcatgttcgactttgatggagacgagatctttcacgtcgacatggctaaaaaggagacagtctggcgccttgaagagttcggaaggttcgccagttttgaggcacagggagccctagccaacatagccgtggataaggcaaacctggaaatcatgacgaagagatcaaattatacaccaatcaccaatgtgcccccggaggtgactgtgctgacaaacagtccggtggagttgcgagagccaaatgtcctgatttgtttcatagacaagttcactccgcctgtcgtgaacgtgacatggctacgtaacggcaagcccgtgactacaggggtcagcgagaccgtctttttacccagggaagaccatctgtttaggaaatttcactacctgccgttcctgccatcgacagaagacgtctatgattgtcgagtggagcattggggcctggatgaaccactgctgaaacactgggaatttgatgcccccagcccactcccagagactaccgagaacgtggtatgcgccctggggttgactgtgggtctggtgggcatcattatcggcacaatctttatcatcaaaggattaagaaaatccaacgctgccgagagaaggggacctttgtag

SEQ ID NO: 201705 - DNA, 690 bp, Artificial Sequence
  derived and/or modified sequence
atggccatcagcggcgtgcccgtgctgggcttcttcatcatcgccgtgctgatgagtgctcaggaatcctgggccatcaaagaggaacatgtaattatacaggccgaattttacttgaaccctgaccaatcaggagaatttatgttcgacttcgatggggacgaaatctttcacgtcgacatggccaagaaagagaccgtgtggcggctcgaagagttcggacgcttcgcatccttcgaggcccagggggcattggcaaatattgccgtggacaaggctaatctcgagatcatgaccaagaggtcaaactacactcccattacgaacgataaattcacgcccccagtggtgaacgtaacttggcttagaaacggcaaaccggttaccaccggcgtcagcgagacagtgtttctgccaagggaagaccatcttttccgcaagtttcactatctgccctttctcccctcaaccgaggacgtctatgactgcagagtggaacattggggactcgacgagccactcctgaagcactgggaatttgatgctccctctccactccctgaaaccacggagaatgttgtgtgtgctttaggcctcaccgttggactggtgggaattattataggaacaatttttattattaagggagtccgcaagagtaacgctgcagagaggcgtggccctctttag

SEQ ID NO: 201706 - DNA, 765 bp, Artificial Sequence
  derived and/or modified sequence
atggccatcagcggcgtgcccgtgctgggcttcttcatcatcgccgttttgatgagcgcccaggagagctgggcgattaaggaggagcatgtgattatccaggctgagttctatctgaaccccgaccagtccggcgaattcatgtttgacttcgatggagacgagatattccatgtagacatggcaaagaaggagaccgtgtggcgtctcgaagagtttggcagattcgctagctttgaggcccagggtgccctggccaatatcgccgtcgacaaggcgaacctggaaataatgaccaagaggagtaactatactccaatcaccaatgtccctcctgaggtgacagttctcacgaactcacctgtggagctacgagagcctaacgtcttaatctgttttattgataagtttacaccacctgtggtcaacgtcacctggctccggaacggaaagccggtgacaactggcgtgtccgaaactgtcttcctcccacgggaagaccatctgtttcgaaagttccattacttgccgttccttccaagtactgaagatgtctacgactgcagggtagagcactggggcctcgatgaacctctgctgaagcactgggagttcgatgcaccgagccctctgcctgagaccactgagaacgtagtctgcgccctcggacttacagtgggtctcgtcggcatcatcatcgggaccatcttcatcattaagggcgtacgcaagtcaaatgctgccgaacgacgggggccactctag

SEQ ID NO: 201707 - DNA, 765 bp, Artificial Sequence
  derived and/or modified sequence
atggccatcagcggcgtgcccgtgctgggcttcttcatcatcgccgttttaatgtcagcacaggagtcctgggcaatcaaggaggaacatgtcatcatacaagctgagttctatcttaaccctgatcagagcggcgaattcatgttcgattttgatggggatgaaatttttcacgtggacatggccaaaaaagagactgtctggagactggaggaatttggcaggttcgcttccttcgaagcacagggcgccctggccaatatcgcggtcgataaggctaacctggaaatcatgaccaagaggagtaattatacccctatcaccaacgtccctcctgaagtgactgtcctgacaaactcacctgtggagttgcgagagccaaacgttctcatttgcttcatagataagtttacccctcctgtcgttaatgtcacctggttgcgaaatggtaagcctgtcaccacgggcgtctcagaaacagttttcctgccccgggaggatcacctgtttcggaagtttcattacctgccgtttctgcctagtaccgaggacgtctacgattgcagggtggagcattgggggttagacgaacccctgctgaaacactgggagtttgacgcaccgtcccccctccctgagaccaccgagaacgtggtgtgcgctcttgggctcacagtgggactcgtcggtattataatcggcactattttcattattaaaggggtgcgcaaatcaaatgctgccgagagacggggccctttgtag

SEQ ID NO: 201708 - DNA, 690 bp, Artificial Sequence
  derived and/or modified sequence
atggccatcagcggcgtgcccgtgctgggcttcttcatcatcgccgtccttatgtcagcacaggaatcctgggccatcaaagaggagcacgtgattatccaggccgaattttatctgaatccagaccagagcggagaatttatgtttgatttcgatggtgatgagatcttccatgtggacatggctaagaaagagaccgtctggagactggaagaatttggccgctttgcctcgttcgaagctcagggtgccttagccaatattgcggtcgataaagcgaatctggaaataatgactaaaaggagcaactatacccctataaccaacgataaatttaccccacctgttgtgaatgtcacttggctgcgcaacggtaaacccgtgacgacaggagtgtctgaaaccgtttttctccctcgtgaagaccatttattccggaaatttcactatctcccttttttaccttctaccgaagacgtatacgattgtagagttgagcattggggcttggacgaacctctgctgaagcactgggagttcgatgccccaagtcccctgccagagaccaccgagaatgtggtttgcgccctggggctgactgtgggattggtcggtatcatcatcgggacaatcttcataataaagggagttcggaagtccaacgccgcagagcgaagaggtccgttgtag

SEQ ID NO: 201709 - DNA, 765 bp, Artificial Sequence
  derived and/or modified sequence
atggccatcagcggcgtgcccgtgctgggcttcttcatcatcgccgtacttatgagtgctcaggagagctgggccatcaaagaagagcatgttattatacaggctgaattttacctcaacccagatcagagcggtgagttcatgttcgattttgacggagatgagatttttcatgttgatatggcaaaaaaggaaacagtgtggaggctggaagaatttgggcgctttgccagcttcgaggcacagggtgcgctggctaacatagccgtggataaggcgaacttggaaatcatgacaaaacggtcaaactatacgcccattaccaatgtaccccccgaggtgacagtacttaccaattcgccggtggaacttcgggaacccaacgtgctgatctgctttatcgataaattcactcctccagtggtgaacgttacctggctgcgaaatgggaagccagttaccacaggggtgtccgagacggtgtttcttccccgagaagatcacctgtttagaaaattccactatctgccctttctgccatccaccgaggatgtctatgactgcagagtggaacactgggggctcgacgaacctctgctcaagcactgggaattcgatgctccctctcctctaccagaaactactgaaaacgttgtgtgcgcccttggccttacagttggactggtgggcataatcattggaactatcttcatcatcaagggagtgagaaagtccaacgccgctgagagacgcggccccctgtag

SEQ ID NO: 201710 - DNA, 690 bp, Artificial Sequence
  derived and/or modified sequence
atggccatcagcggcgtgcccgtgctgggcttcttcatcatcgccgtactcatgagtgctcaggaatcctgggccattaaggaggaacacgtcataatccaggctgagttctaccttaatcccgaccagagtggcgaattcatgtttgattttgatggcgatgaaatttttcatgtggatatggctaaaaaggaaaccgtttggcgactcgaggagtttggtagattcgcatccttcgaggcgcaaggtgcgttagcaaacatcgccgtggataaggcgaatcttgaaattatgactaagcgttcaaattacacaccaattaccaatgacaagtttaccccccccgtggtgaacgtgacttggcttaggaatggcaaacccgtgaccacaggcgtttcagaaacagtgttcctcccccgggaggaccatctgtttagaaaatttcactatttaccattcctcccatctaccgaggatgtgtacgactgccgtgtcgagcactggggtcttgatgaaccacttctcaagcattgggaattcgatgccccctcaccactgcctgagacaactgagaacgtagtgtgtgccctaggacttaccgtaggtttggtgggtattattatcggaactattttcatcattaaaggggtacgcaagtctaacgccgcagagcgtagaggtccactgtag

SEQ ID NO: 201711 - DNA, 690 bp, Artificial Sequence
  derived and/or modified sequence
atggccatcagcggcgtgcccgtgctgggcttcttcatcatcgccgtcctgatgagcgcccaagaatcttgggctataaaagaagagcacgtgattatccaggccgaattttacctgaatcccgatcagagcggtgaatttatgtttgacttcgatggagacgagatattccatgtggacatggccaaaaaagagacagtgtggcgcctcgaagagtttgggcggtttgctagcttcgaagcccagggggcgctggccaatattgccgttgacaaggctaacctggaaatcatgacgaagcgctcaaattacacgcccattaccaatgacaaattcacaccccccgttgtaaacgtgacttggctaagaaatggcaaacctgtcacaacgggagttagcgagactgtgtttttgccacgcgaggatcacctgttccggaagttccactacctccccttcttacccagcacagaggatgtgtatgattgccgggtggagcattggggcttagatgaacctcttttaaaacattgggagttcgatgctccttcaccactccctgaaactaccgagaacgtcgtctgtgcactcgggctcaccgtgggactggtcggcatcatcatcggcacaatctttatcattaagggcgtgaggaagtcaaatgccgcagaaagaagaggaccactttag

SEQ ID NO: 201712 - DNA, 690 bp, Artificial Sequence
  derived and/or modified sequence
atggccatcagcggcgtgcccgtgctgggcttcttcatcatcgccgtattgatgagtgcacaagagtcatgggccataaaggaggagcacgtgatcattcaggctgaattttacctgaaccctgaccagtctggtgagtttatgttcgatttcgacggtgacgagatttttcacgtggatatggccaagaaagagacagtctggagactcgaagaatttggccgattcgccagctttgaggctcagggagctcttgctaacattgccgtggataaggcgaatctggagatcatgactaagagatccaactatacgcctataacaaacgacaagtttacaccacctgtcgtgaatgtcacttggctgaggaatgggaagcccgtcaccacaggcgttagtgagacagtgtttcttcccagggaagaccacctgttccgaaagttccattacctgccttttctgccaagtactgaagacgtatatgattgcagagtcgaacactgggggctcgatgaacccttgctgaagcactgggagtttgatgccccaagcccgctacccgagacaactgagaatgtggtctgcgctctgggcctgaccgttggactcgtgggaatcattattggcacgattttcatcattaagggtcttaggaagtccaatgccgctgagagacggggcccgctttag

SEQ ID NO: 201713 - DNA, 765 bp, Artificial Sequence
  derived and/or modified sequence
atggccatcagcggcgtgcccgtgctgggcttcttcatcatcgccgtgttgatgtctgctcaggagagttgggccattaaagaggagcacgttatcatacaggcagagttctacttaaaccccgatcaaagcggggagtttatgtttgactttgacggggatgagattttccatgtggatatggccaagaaagagactgtgtggagactggaggaatttggccggtttgcctcattcgaagcccagggtgccctggccaacatagcagtcgataaagctaatctcgagattatgaccaagagaagcaattatacccccatcactaatgttccccccgaggtgacagtgctcaccaactcccccgtggagttaagggagccaaatgtcctgatctgttttattgacaaatttacaccacccgtcgtaaacgttacatggctgagaaatggcaagccagttacgacgggcgtatccgaaactgtctttctgcctagggaggatcatctgtttcggaagtttcattacctaccattcctcccttccaccgaagacgtctatgattgccgcgtggaacactggggacttgacgagcctctcttgaaacattgggaatttgacgcgccttcaccactccctgagaccaccgagaacgtggtctgcgctttggggctaaccgtaggcctcgtcggaatcattatcggaactatatttattataaaaggcgtacggaagagcaacgctgccgagagacgaggccctctgtag

SEQ ID NO: 201714 - DNA, 543 bp, Artificial Sequence
  derived and/or modified sequence
atggccatcagcggcgtgcccgtgctgggcttcttcatcatcgccgtactgatgtctgctcaggagtcatgggcaataaaggaagaacacgtgatcattcaggccgagttttacctgaaccctgaccagtcaggcgagttcatgtttgattttgatggcgacgaaatattccacgttgacatggctaagaaagagactgtttggcggttggaagaattcggaaggttcgcttcatttgaagctcaaggcgccctggccaacatcgcagtagataaggccaacctagaaataatgactaagcgctccaagcctagtccacgggattaccgcgaacggggcgtgtgcccagggccagactgcgggagcggcgggcaccattattgggatcacctacaccatcaaggtatcgctcagaaacagtgttcacggacccagggcgcgagtgtgaggcatatggaagtcatggtgttcctgagagagaagattacggaggaaacaagcgctttaatggctctgcaaagctggcagtactacaatccatag

SEQ ID NO: 201715 - DNA, 714 bp, Artificial Sequence
  derived and/or modified sequence
atgagcgcccaggagagctgggccatcaaggaggagcacgtgatcatccaagcggaattctaccttaaccctgatcagtcaggagagttcatgtttgactttgacggcgatgagatcttccatgtggacatggcaaaaaaggagaccgtctggagactggaagagtttgggcggtttgctagctttgaagcacagggcgcactggctaacattgcggtcgacaaggccaatctggagattatgacaaagcgcagtaattacacgccaattactaatgtgccaccagaagtgaccgtgttgaccaattcacctgttgagcttcgcgagccgaacgtactgatctgctttattgataaattcaccccgcccgtggtgaacgtaacgtggctgagaaacggaaagcctgtgacaacaggcgtgtcggagactgtctttctcccacgggaagatcacctgtttcggaaatttcactatctgccctttctgccttccactgaagatgtgtatgactgcagggtggagcactggggtctcgacgagcctctgctcaaacattgggagtttgacgcaccttcccctctgcccgagacgacagagaacgttgtgtgtgccctagggctgactgttggccttgtcggcattatcatagggaccattttcatcattaagggtgttcggaagtccaacgctgctgaaaggcgaggcccactttag

SEQ ID NO: 201716 - DNA, 498 bp, Artificial Sequence
  derived and/or modified sequence
atggccaagaaggagaccgtgtggcggctggaggagttcggccggttcgcttcgttcgaggcccagggcgccctcgctaacattgccgtcgacaaggcaaacctggagattatgacgaagcggagcaactatacacccatcacaaatgtgcctcctgaggttactgttctgaccaatagcccagtagaactgcgggaaccaaatgttctcatttgtttcatagacaaatttactcccccagttgtgaatgtgacgtggttacggaatggaaaaccagtcaccaccggagtttcggagactgtttttctctcgatcgcctttagctgtatctactttccattattccccattatccttctgtcaccatgcaatgcctcggggatcaaacacacaggcgtctgtctctgctacggaatgcctcacggcgcgagtctggtgtacctgctattcaaagtgtcatcaaactgcgactttagcgagcataataaactgttttag

SEQ ID NO: 201717 - DNA, 453 bp, Artificial Sequence
  derived and/or modified sequence
atggccatcagcggcgtgcccgtgctgggcttcttcatcatcgccgtgctaatgtccgcacaggaatcatgggccattaaagaagagcatgtgatcattcaggctgagttctacttgaacccagatcagtccggagagttcatgtttgactttgacggggacgagatcttccacgtggatatggcaaaaaaggaaactgtctggcgtctggaggaattcggtagattcgctagcttcgaagctcagggggccctggctaacattgccgtcgacaaggccaatctcgagattatgaccaagcgatcaaattatacacccattaccaatgtgcctcccgaagtcaccgtcctcaccaattcccccgtggagcttagagagcctaacgtgttgatttgctttatcatcaagggggtgaggaagagcaacgccgccgagcgaagagggccactgtag

SEQ ID NO: 201718 - DNA, 543 bp, Artificial Sequence
  derived and/or modified sequence
atggccatcagcggcgtgcccgtgctgggcttcttcatcatcgccgtgctgatgagcgcgcaggagagttgggccataaaggaggaacatgtgattatccaggccgagttctacctgaatccagaccagtccggagaatttatgttcgattttgacggagatgaaatctttcatgttgacatggccaaaaaagagacggtttggcgcctggaggagttcgggaggtttgcaagctttgaggcccaaggagccttagccaatatagctgtagataaagctaacttagagataatgaccaagcggagtaagcccagccctagagactatcgggaaagaggggtctgtccgggcccggattgcggaagtgggggccaccactactgggaccacctgcatcatcagggatcagcccagaaacagtgttccaggacacagggggcctccgtccggcatatggaggtgatggtgttcctccgtgagaagataacagaagagacctctgccctcatgactttgcagtcctggcaatactacaacccttag

SEQ ID NO: 201719 - DNA, 543 bp, Artificial Sequence
  derived and/or modified sequence
atggccatcagcggcgtgcccgtgctgggcttcttcatcatcgccgttctcatgagcgcccaggagtcctgggccattaaagaggaacatgtgataatccaggccgagttttacctgaacccggatcagtcgggggagttcatgttcgatttcgatggtgacgagatttttcatgttgacatggcaaagaaagaaacggtctggcgtctagaagaattcggcaggttcgcctctttcgaagcccagggggcactggctaatatcgccgttgacaaggccaacctcgaaattatgactaagcgcagtaagccgtcccctagagactaccgcgaaaggggcgtctgccctggccccgactgcgggagtggcggccaccattattgggatcacctccaccatcaaggttcggcccagaaacagtgctctcgtacccagggtgctagcgtgagacatatggaggtgatggtattcctgagagagaagatcacagaggagacaagcgctttgatgaccctccagagctggcagtattataatccgtag

SEQ ID NO: 201720 - DNA, 498 bp, Artificial Sequence
  derived and/or modified sequence
atggccaagaaggagaccgtgtggcggctggaggagttcggccggtttgcttcattcgaggcccagggggccctggctaatattgcagtcgacaaagccaatttggaaataatgacaaagagaagcaactatacgcccatcaccaatgtaccaccagaggtgacagttctaaccaatagtcctgttgagcttagggagccaaacgtgctgatatgttttatcgacaagtttaccccccccgttgtgaacgttacttggctgaggaacggaaaacctgttaccaccggggtctcagagacagtttttctgtccatcgcattttcatgcatctattttccattgttccccatcatcctgttaagcccttgtaacgcttcgggtatcaagcataccggggtgtgtctgtgctacggtatgccgcacggtgctagtctagtgtatctgctgtttaaggtgtcgagtaattgcgacttctctgaacacaacaaattgttttag

SEQ ID NO: 201721 - DNA, 543 bp, Artificial Sequence
  derived and/or modified sequence
atggccatcagcggcgtgcccgtgctgggcttcttcatcatcgccgtacttatgagcgcgcaggagtcctgggccattaaagaggagcatgtcattatccaggcagaattctaccttaaccctgaccaatcaggcgagtttatgtttgatttcgatggcgacgagatctttcacgtggatatggccaaaaaggaaaccgtgtggagactcgaagaatttggacgcttcgcgagtttcgaagcgcagggagccctggcgaacattgccgtggataaggctaacctcgagataatgactaagcggtctaaaccttcgcccagggactaccgcgagagaggagtttgccctggtcccgactgcggaagtggcggacatcactactgggaccatctgcaccatcagggatcagcgcagaaacagtgctcccgcactcagggggccagcgtgcgccatatggaggtgatggtgtttttgcgtgaaaagataactgaggagacatcagccctgatgacgctgcagtcctggcagtactacaacccttag

SEQ ID NO: 201722 - DNA, 498 bp, Artificial Sequence
  derived and/or modified sequence
atggccaagaaggagaccgtgtggcggctggaggagttcggccggttcgcttcattcgaggcgcagggtgctctggccaatattgccgtggataaggccaacttggaaattatgaccaaacgaagtaattatacaccaattacaaatgtgcctcctgaggtgaccgtccttactaatagcccagtggaattgagggagcccaacgtgctaatttgtttcattgacaaatttactcctccagttgtgaatgtgacatggctgcgcaacggcaaacccgtgactacaggggttagcgaaaccgtgtttctgagcattgcttttagttgcatttactttcccctattccctattatcctgctgtcgccttgcaacgcctctggtattaagcatacaggggtatgtctctgctacgggatgccccatggagccagcctggtatacttactgtttaaagtatcctctaactgcgattttagcgaacacaataaactgttctag

SEQ ID NO: 201723 - DNA, 714 bp, Artificial Sequence
  derived and/or modified sequence
atgagcgcccaggagagctgggccatcaaggaggagcacgtgatcatccaggccgagttctacctgaaccccgatcagagcggtgagtttatgttcgattttgacggagatgaaattttccacgtggatatggctaaaaaggaaacggtatggcggctggaagaattcgggaggttcgcttcgttcgaggcacagggagcgctcgcaaacatcgctgtagacaaagctaatcttgagatcatgactaaacgctccaactacacccccatcacaaacgttccaccagaggtcacagtcctcactaatagtccagtggagctgagagaacctaacgtgctgatctgctttattgacaagtttacacctccggtggttaatgtaacttggctccggaatggtaagcctgtcactactggcgtctccgagaccgtttttttaccacgcgaggatcatctgtttcgaaagtttcattatctcccattcctgcccagcaccgaggacgtgtatgactgccgggtggaacattgggggctggacgagcctctgttaaagcattgggaatttgatgccccttcccccttacccgagacaacagagaacgtcgtgtgcgctctcggacttacagtcggactagttggcataattatcggcactatcttcataattaagggggtgcggaagtctaatgccgcagagagacgagggcccctgtag

SEQ ID NO: 201724 - DNA, 543 bp, Artificial Sequence
  derived and/or modified sequence
atggccatcagcggcgtgcccgtgctgggcttcttcatcatcgccgtgctaatgagcgcacaggaatcctgggcaattaaggaggagcatgtgattatccaggccgagttttacctgaacccagaccagtccggtgagttcatgtttgattttgacggtgatgagatttttcatgtagatatggccaaaaaggaaacagtctggaggctcgaagagttcggccgctttgcttccttcgaggcgcagggcgcccttgccaatattgccgtagacaaggcgaacctcgaaatcatgacgaaacggtctaaaccaagcccaagagattaccgcgagagaggcgtgtgtcctgggcccgattgtggctctggggggcatcactattgggatcatctgcaccaccaagggagtgcccaaaagcagtgttcccggacccagggagcaagcgtgcgccacatggaggtgatggtgttccttcgggaaaagattaccgaggagacaagcgccctgatgacactgcagtcctggcagtattataacccttag

SEQ ID NO: 201725 - DNA, 498 bp, Artificial Sequence
  derived and/or modified sequence
atggccaagaaggagaccgtgtggcggctggaggagttcggccggtttgccagcttcgaggcgcagggggctctggccaatattgccgtagataaagccaatcttgaaatcatgactaaaaggagtaattacacgcctatcactaatgtcccgccggaggtcacagttctcaccaattctcccgtcgaattacgcgagcctaacgttcttatatgctttatcgataaattcactccaccagtcgttaatgtgacctggctgcggaatgggaaaccggttaccactggggttagtgaaacagtgtttttgagcatcgccttttcatgtatctacttccctttatttccaataatactgttgtccccctgcaacgcatctggaatcaaacatacaggggtttgtctgtgttacggtatgccgcacggagcttcactcgtctatttgttattcaaggtttcctcaaactgcgacttctctgagcacaacaagctgttttag

SEQ ID NO: 201726 - DNA, 498 bp, Artificial Sequence
  derived and/or modified sequence
atggccaagaaggagaccgtgtggcggctggaggagttcggccggtttgcctccttcgaggcacagggagccctggctaacatcgctgtcgataaggctaacctagaaatcatgactaaacgtagcaattatacacccattactaacgttccacccgaagtgacagtgttgactaatagccccgtcgagctccgcgaaccaaacgtcctgatatgctttattgacaagtttaccccaccagtggtgaatgtaacctggctgagaaatggcaagcccgtgaccacaggagtgagcgaaactgtgtttctctccatcgcctttagctgcatatactttcctttatttcccattattctgctttcaccatgtaacgcctcagggattaaacacacaggggtgtgcctgtgctacggaatgcctcatggggctagtctggtgtacctgttgttcaaggtgtcatcgaactgcgacttcagcgagcataataaattgttctag

SEQ ID NO: 201727 - DNA, 714 bp, Artificial Sequence
  derived and/or modified sequence
atgagcgcccaggagagctgggccatcaaggaggagcacgtgatcattcaggctgagttttacctgaaccctgaccagtccggagaatttatgtttgatttcgatggcgacgagatttttcacgtagacatggcgaaaaaggagaccgtgtggagacttgaggagtttggccgtttcgcaagctttgaagcgcagggagctcttgcaaacattgccgtggacaaagcaaacctggaaataatgacaaagcgcagtaactacacccccatcactaacgtgcctcccgaggtaacggtccttactaatagccccgttgagcttcgggaacccaatgttctgatttgcttcatcgacaaattcactcctccggtcgtgaatgtcacctggctgcgtaatggcaaaccagtcactacaggggtcagcgaaaccgtgtttttaccacgcgaggatcatttgttcaggaaatttcattacctcccttttttgccttccacagaagacgtatatgattgtcgggtggagcactgggggcttgatgagcccctcttgaagcattgggaatttgatgccccctctcccctgcctgagaccacagagaatgtggtgtgtgcactaggactgactgtggggctcgtgggcatcataatcgggaccatcttcatcatcaaaggcgtaaggaaatctaatgcagcggagcgccgggggcccctatag

SEQ ID NO: 201728 - DNA, 543 bp, Artificial Sequence
  derived and/or modified sequence
atggccatcagcggcgtgcccgtgctgggcttcttcatcatcgccgtcttaatgtctgcccaagagagctgggccatcaaggaggaacacgtgatcattcaggcggagttttacctgaaccctgaccaatccggagaattcatgttcgattttgatggtgacgaaatcttccacgtggatatggcaaagaaggagacagtttggagactggaagaattcggcaggtttgcctcctttgaagcacagggtgctctggcgaatatagcagttgataaagccaacctggagatcatgacaaaaagaagcaaacctagcccccgtgactaccgggaatgtggtgtctgccccggccccgattgcggttccggaggacaccattattgggatcacctccaccatcaggggtcggctcaaaaacagtgttcacgtacccagggagcttctgttcggcacatggaggtaatgatgttcctccgggaaaaaattacagaggagacgtctgctcttatgacactacagagttggcagtactacaacccttag

SEQ ID NO: 201729 - DNA, 498 bp, Artificial Sequence
  derived and/or modified sequence
atggccaagaaggagaccgtgtggcggctggaggagttcggccggttcgcatcattcgaggctcagggggcactcgccaacattgctgtagacaaggctaatctggagatcatgaccaagcgctctaattatacacccattacaaacgtgccacctgaggtcaccgtgcttacaaactcacccgtcgagctgcgagagcctaacgtgctcatttgcttcattgataagtttacaccgcctgtagttaacgtcacctggttgaggaatggtaagccagtgactactggtgtcagcgaaaccgtcttcctgagtattgcatttagctgcatctactttcccctgttcccgatcatacttctcagcccctgcaatgcttcaggcattaagcatactggcgtgtgcctctgctacggtatgccccacggagccagcctggtgtaccttcttttcaaagtgagctctaattgcgacttctcagaacataataagctgttctag

SEQ ID NO: 201730 - DNA, 714 bp, Artificial Sequence
  derived and/or modified sequence
atgagcgcccaggagagctgggccatcaaggaggagcacgtgatcatacaagctgaattctatctgaatccggaccagagtggtgaatttatgttcgactttgacggggacgaaatttttcacgtggacatggctaagaaggagacagtttggcgcctggaagagtttggaagatttgcatccttcgaggctcagggtgcactggcaaacattgccgttgacaaggcaaatctggagatcatgactaagcgctcaaattatacccctattacaaacgtcccaccagaggtcacagttcttactaattcaccagtggaattgcgagagccaaatgtgctgatctgttttattgataaattcaccccacctgtggtgaacgtcacatggttgagaaacggtaagcccgtaacgactggggtatctgagaccgttttcctcccacgcgaagatcacctttttcggaagttccactacctgcctttcctaccaagtacggaggatgtttacgactgtcgggtggaacattgggggttggacgaaccgctgctcaaacattgggagtttgatgcgccgagcccgctgcctgaaactaccgagaatgtcgtttgtgccctaggtctgacggtggggctcgtggggattattattgggaccattttcattatcaaaggtgtgcgcaagagcaatgcagcggaacgtcgcggccccttatag

SEQ ID NO: 201731 - DNA, 690 bp, Artificial Sequence
  derived and/or modified sequence
atggccatcagtggcgtgccggtgttaggcttctttattattgctgtgttgatgtctgctcaggaaagctgggctattaaggaggaacatgtgataatccaggcagagttctatcttaaccccgatcaaagcggagaatttatgttcgattttgatggggatgaaatatttcacgttgacatggctaagaaggagactgtctggcgcctagaagaattcggcaggttcgcatccttcgaggctcagggggctctggcgaacattgctgtcgataaagccaatctagagattatgaccaaacgcagcaactacacacccattacgaacgataagtttactcccccagttgtcaatgtgacttggctccggaacggcaagccagtcactactggggtctcagagactgtgttcctgccccgtgaggatcacctgtttaggaaattccactatctccccttcctccctagcactgaagacgtttatgattgcagagtggagcactgggggcttgatgaacccttactgaaacactgggaattcgacgctccttcgcccctgccagagacaactgagaatgttgtctgcgcactcggtctgaccgtcgggctcgtcggtatcataataggtacgatttttattattaaaggtttgaggaaatccaacgccgctgaaagacgtggtcctctttag

SEQ ID NO: 201732 - DNA, 765 bp, Artificial Sequence
  derived and/or modified sequence
atggcaattagcggagttcctgtactgggtttctttattatcgcagtattgatgtcggcccaggaatcttgggccatcaaggaggaacatgtcattattcaggccgagttctatctgaaccctgatcaaagtggcgaattcatgtttgattttgacggtgacgaaatattccatgtggacatggctaaaaaggagactgtgtggagattggaagaattcggacggttcgcttccttcgaggcccagggcgcacttgccaatattgccgtggataaagcaaatctggagattatgaccaaacgaagtaactatacacctattaccaatgttcccccagaagttacagtgctgaccaacagccccgtcgagctgcgggagcccaacgtactcatttgctttattgacaagtttacgcctccggtcgtgaatgtgacttggttacggaatggcaagcctgtgaccactggcgtgagcgaaaccgtgtttctgcctagggaggatcacctgttccggaaattccattatctgccctttctcccaagcaccgaggacgtctatgattgcagggttgaacactggggcctggacgaaccccttctgaaacactgggaatttgatgctccttcacccctcccagagaccacagagaatgtggtatgtgctctgggtttgaccgtagggctggtcggtattataatcggaactattttcatcatcaagggtctgaggaagtctaacgccgcagagcggaggggcccactgtag

SEQ ID NO: 201733 - DNA, 690 bp, Artificial Sequence
  derived and/or modified sequence
atggccatttctggcgtgcccgtcctggggttcttcatcattgcagttttgatgagtgcacaggagtcttgggctattaaggaggagcatgttattatccaggcagagttctacctgaacccagaccagtctggagagttcatgttcgacttcgatggtgatgaaattttccatgtggatatggccaagaaagaaaccgtttggagactggaggagttcggcaggttcgcctcatttgaggctcagggagccctggcaaatatcgccgtcgacaaggctaaccttgagattatgacaaagcgttcaaactacacacctataacaaacgataagttcaccccgccagtggtgaatgtgacctggttaaggaacgggaagccagtgactacaggagtcagtgagacggtgtttctgcctcgagaggatcacttgttcagaaagttccattacctgccttttctcccttctacagaagatgtgtatgactgccgggtcgagcattggggccttgacgaacctctgttgaagcactgggagttcgatgctccgtctcctctaccagagactaccgaaaatgtagtgtgtgccctaggtctgaccgtggggctagtcggcattatcatcggaacgatcttcatcatcaagggcgtgcgcaagagcaacgcagctgaacggcgaggccctttatag

SEQ ID NO: 201734 - DNA, 765 bp, Artificial Sequence
  derived and/or modified sequence
atggccatctcaggcgtgcccgtcctggggttcttcattattgccgtcctcatgtccgcccaggagtcctgggccatcaaggaggaacatgttataatccaggccgaattctacctgaacccagaccaaagtggcgagtttatgttcgacttcgacggggacgagatcttccacgtagacatggccaaaaaggagaccgtgtggagattggaagagtttggacgcttcgcctccttcgaagcccagggcgctctcgccaacatcgctgtcgataaggccaatctggagatcatgacaaaacgcagcaattatacccccataactaatgtacctccagaggtaactgtcctcacaaacagcccagtggagctgcgcgagcccaacgtgctgatatgctttattgacaaatttacccctccagtcgtgaatgtgacatggcttcggaacgggaagccagtcactacgggggtctctgagacagtgttcctgcccagagaagatcatttgttcaggaagtttcactacctcccctttcttccatctaccgaagatgtgtacgactgtcgagtggagcattggggattagatgaacccctgttgaaacactgggaatttgacgcaccaagcccactgcctgaaaccacagagaatgtagtgtgtgcactcggactcactgtggggctggtagggatcataatcgggacaatttttatcatcaagggtgtacggaaaagcaacgctgccgaaaggcgtggaccattgtag

SEQ ID NO: 201735 - DNA, 765 bp, Artificial Sequence
  derived and/or modified sequence
atggctatttctggagtacctgtgctgggattcttcatcatcgcggtgctaatgtccgcccaggaatcatgggcgattaaagaggagcacgtgatcattcaggcggagttctatctgaatcctgaccaatctggcgagttcatgtttgatttcgatggcgacgagatcttccacgttgacatggccaaaaaagagactgtgtggcgactcgaggagttcggacggttcgccagcttcgaagctcaaggagccctcgccaacatcgctgtggataaggccaatctcgagatcatgaccaaacgatcaaactacacccccatcaccaatgtgcctcccgaagtgactgtattgactaattctccggtggaattgcgcgagccaaacgttctgatatgtttcattgataagttcactcctccagttgtaaatgtcacatggctgcgaaatggaaaacccgtgaccaccggggttagtgagaccgtgtttctacctcgagaagaccacctgttccgtaagtttcactacttgcctttcctgccttcgaccgaggatgtttatgactgtagggtggaacactggggactggatgaacccctcctcaaacactgggagttcgacgccccttcaccactgcctgaaaccacagagaatgtggtgtgcgcccttggactgaccgtgggcctcgtcggcattattatcggaaccatctttatcataaaggggctgcgaaaaagtaacgcggctgagcgtcgagggccattatag

SEQ ID NO: 201736 - DNA, 690 bp, Artificial Sequence
  derived and/or modified sequence
atggccatctctggcgtacccgtgctgggcttctttattatcgcagtcctgatgtctgcccaggaaagctgggccatcaaggaagagcatgtgatcatccaagccgagttttacctgaacccagatcagagtggagagtttatgttcgatttcgacggcgacgagatttttcacgtggacatggcaaaaaaagagacagtttggcgcctggaggagttcggacgtttcgcctcctttgaggcccagggagctctggcgaacattgccgtggacaaagcaaatctggagattatgacaaaaagatccaactatacgcccattaccaatgacaagttcacaccccctgtagttaatgttacttggcttcggaacggcaagcccgtgactacaggggttagtgaaactgtctttctgcctcgagaggaccacctctttcggaaattccactatctaccttttctgcctagcactgaagacgtgtacgactgcagggtcgaacattggggcttggacgaaccactactcaaacactgggagttcgacgccccaagccctctgccagagaccactgagaatgtcgtgtgcgcactgggcctgaccgttgggcttgtcggaataattatcgggactattttcatcatcaaaggtgtccgcaagagcaacgctgcagaaagacgcggaccgctctag

SEQ ID NO: 201737 - DNA, 765 bp, Artificial Sequence
  derived and/or modified sequence
atggccatcagtggggtgccagtcttgggttttttcatcattgcagtcttaatgagcgctcaggagtcttgggctatcaaggaggagcacgttatcatccaggctgagttttacctgaaccctgatcagagtggcgagtttatgttcgacttcgatggagacgagatcttccatgttgatatggctaagaaggaaactgtatggcggttagaagaatttgggcgattcgccagttttgaggcccagggagccttggctaatatagctgttgataaagcaaacctggaaatcatgacaaagaggtccaattatactccaattactaatgtccccccagaggtcaccgttctgactaacagtcccgtggagctgagagaacccaatgtactgatatgcttcattgacaagttcacacctcccgtggtcaacgtgacatggctgcgtaatggcaagccagtaaccactggggtgtctgagaccgtcttcctccctcgcgaagatcatctgttcaggaaattccactacctcccgttcctcccttccactgaagacgtatatgattgccgggtagaacactggggactcgatgaacccctacttaaacattgggagttcgacgccccaagtcctctcccagaaacaaccgaaaacgtggtctgcgcactgggtctgacagtcgggctggtaggtataatcatcggtaccatttttatcatcaagggcgtacgcaaatccaatgcagctgagaggcgaggacctctttag

SEQ ID NO: 201738 - DNA, 765 bp, Artificial Sequence
  derived and/or modified sequence
atggccattagtggagtgcctgtcttaggttttttcatcattgcagtgctgatgtctgcccaagagtcctgggctatcaaagaagagcacgtaatcatacaggccgaattctacctgaaccccgatcaaagcggcgaatttatgttcgacttcgacggggatgagatctttcacgtcgatatggcgaagaaagagactgtgtggagattggaagagttcggtcggttcgcaagctttgaagcgcagggagcccttgcgaacattgccgtagacaaagccaatttggaaatcatgaccaaaaggagtaattacacccctattactaatgtccctccagaagtgacagtgctaacaaattcgcctgttgaacttagggaacctaatgtgctcatctgcttcatcgataaatttactccacccgtggttaacgttacatggttgaggaacggcaaaccagttacgaccggagttagcgaaacagtgttcctgccacgagaggaccacctttttagaaagtttcactaccttccctttcttccgagtaccgaggacgtttatgactgtagggtcgaacattggggtctggacgaacccctgttgaagcactgggaattcgatgcaccgagtcccctgcctgagacaaccgaaaatgtagtgtgcgcactcggcctgacggtcggactggttggaattatcattggcacaatctttatcattaaaggggtcagaaagtcaaacgctgccgagcgccgagggccactgtag

SEQ ID NO: 201739 - DNA, 690 bp, Artificial Sequence
  derived and/or modified sequence
atggctatcagcggcgtcccagtgctgggttttttcattatcgccgttttgatgagcgctcaggaaagctgggcgataaaagaagagcatgtgatcatccaagcagaattttacctgaacccagaccaatcaggagagtttatgttcgattttgatggcgacgagatctttcatgtggacatggcaaagaaggaaaccgtgtggagattggaggagttcggcaggtttgccagtttcgaggcccaaggggctctggcaaatatcgccgtcgacaaagctaacctagagatcatgactaaacgcagtaattacacccccatcacaaatgataagtttacccccccagttgtgaacgtgacatggctacggaacgggaagcctgttaccaccggcgtgagcgaaaccgtcttcctcccccgagaagaccacttatttagaaaatttcattatctgccatttctgccttcaaccgaggacgtctatgactgtagggttgagcattggggtctcgatgagccactgctcaagcattgggagtttgacgcaccctctcctttaccagagaccaccgagaatgtggtgtgcgcactaggcttgacggtagggcttgttggcattattataggtaccatatttatcattaagggtgtacgcaagagtaacgccgcagagaggcgcggtccattgtag

SEQ ID NO: 201740 - DNA, 765 bp, Artificial Sequence
  derived and/or modified sequence
atggcaatctccggtgtccccgtgctcggattttttataatcgcagtcctcatgtctgctcaggagagttgggccataaaagaagaacacgtgattatacaagcagagttttacctgaatcctgatcaatccggcgagttcatgttcgacttcgacggtgatgagatattccacgtggacatggccaagaaagagaccgtctggcgcctggaagagtttggccgtttcgcttccttcgaagctcagggagcgttggccaacatagccgttgataaagcaaacctggaaatcatgacaaagaggagtaattatacacctatcaccaatgtgcccccagaggtcactgtgctaacaaatagcccagtcgaattaagggagcctaacgtgcttatttgcttcatcgataaatttaccccacctgtcgtgaacgtcacctggctgaggaacgggaagccagtgacgaccggtgtttctgagacggtctttctacccagagaggaccacctgttccgaaagtttcactatctaccattcctgccatcgactgaggacgtgtatgattgcagggttgaacactggggcctagatgagcccctgctcaagcattgggaattcgatgccccaagtcccctgccagaaaccaccgaaaacgtcgtgtgcgcactcggcttgactgtcggactggtgggcattattataggaacaatctttatcattaaaggggtccgaaagtcaaacgctgctgaaaggagaggacccttatag

SEQ ID NO: 201741 - DNA, 690 bp, Artificial Sequence
  derived and/or modified sequence
atggctatttctggggtcccagtgttgggtttctttatcattgctgttctcatgagtgcccaggagtcatgggccataaaggaagagcacgtaattatccaggctgagttctatctgaatccagatcagagcggcgagttcatgttcgatttcgatggagatgaaatctttcatgtggacatggccaagaaggaaaccgtttggcgactcgaggagttcgggcgattcgccagcttcgaggctcaaggtgcactcgctaacattgcagtggataaggcaaatctggagataatgaccaagcggagtaactacacacctatcacaaacgataagtttacacctcccgttgtgaatgtaacatggctcaggaatggcaaaccagtgacaactggcgtgtccgaaacggtgttccttcccagagaggatcacctgttcaggaaatttcactatttaccattcctgccaagtactgaagatgtgtatgattgtagagttgaacactggggcctcgacgagcccctgctgaagcactgggagttcgatgccccttctcccctcccggaaactactgagaacgtggtgtgcgcattaggactgacagtcggactcgtgggaattattatcggaacaatatttatcattaagggggtcagaaagtctaatgcggctgaaaggaggggaccgctttag

SEQ ID NO: 201742 - DNA, 690 bp, Artificial Sequence
  derived and/or modified sequence
atggctatctcgggggtccccgttctcgggttctttattatagccgtgctcatgtccgcacaagaaagctgggcaatcaaggaggagcacgtgatcattcaggctgaattttatctaaatcccgatcagagcggggaatttatgtttgatttcgacggcgatgagattttccatgtggacatggcgaagaaggaaaccgtgtggcggctggaggaatttggtagattcgcgagcttcgaagctcagggagctcttgctaacattgccgtagacaaagcaaacttggaaatcatgaccaagcggtccaattatacgcccatcaccaatgataagttcactccaccagtggtgaacgtgacctggctgcgaaatggcaaacctgtgacgacaggggtgagtgagacagtcttcctgccgagagaagatcatctctttagaaaatttcactacttgccctttctgcccagtactgaggacgtctacgactgccgtgtggaacactggggtctggatgaacccctcctgaaacactgggaattcgacgctccctctccactcccagagacaactgagaatgtggtgtgcgctctcggactgactgtgggcctcgtggggatcatcatcggaacgattttcatcattaagggggttagaaaaagcaatgccgcagagagacgtggacccctgtag

SEQ ID NO: 201743 - DNA, 690 bp, Artificial Sequence
  derived and/or modified sequence
atggccatctccggcgtgccggtcctcggattcttcattatcgccgttcttatgtcagcccaagaatcctgggcaataaaggaagaacacgtgatcatacaggcagagttctatttaaacccagatcagagtggcgagttcatgtttgactttgacggtgacgaaatttttcacgtcgacatggccaagaaggagacagtttggagattggaagaatttggtcggtttgctagctttgaggcccagggtgcgctcgcaaacattgcagtggacaaagccaatcttgagatcatgaccaagagatcaaattatactccaattacaaatgacaagttcaccccacccgtggtaaatgtgacatggctgcgcaatggcaagccagttaccactggggtctcggaaacggtgttcttgccacgggaggaccatttgtttagaaaattccactatctgccctttttgcccagcacagaggatgtgtacgattgtcgggtggagcactggggcctggacgagcctctgctcaaacactgggagttcgatgccccatcccctttgcctgaaactacagagaacgtcgtgtgtgctctcgggttgaccgtaggcctcgtgggcataataataggcaccattttcattatcaagggactgagaaaatccaatgcagccgaaagacgtggccctctgtag

SEQ ID NO: 201744 - DNA, 765 bp, Artificial Sequence
  derived and/or modified sequence
atggctataagcggagttcctgtgctcgggttctttataattgcagtgctgatgtcagctcaggaaagctgggccatcaaagaggaacatgtgatcattcaagccgaattctacctgaatccagaccaatcaggcgagtttatgtttgattttgacggcgatgagatatttcacgttgatatggccaagaaggagaccgtgtggcgcctcgaagaatttggaagatttgcttcatttgaggcccagggggcactggcaaatattgccgtggataaggcaaatctcgaaattatgaccaagcggtcaaactatacccccatcaccaatgtgcctcccgaagtgacagtgttgaccaattcccccgtcgaactgagggaacccaatgtcctcatctgctttatcgataagtttacacctcccgttgttaacgtcacatggctccggaatgggaagccggtcacaactggagtatctgaaacagtgtttctgccaagggaagaccatttgttcagaaaatttcactacttaccattcctgccctcaaccgaggacgtgtacgactgtagagtggaacactggggtctggacgagcccctgctgaaacactgggagtttgatgctcccagcccactgccagaaacaacggaaaacgttgtgtgcgccctcggcctgaccgtcggcttggtgggtatcattatcggcaccatctttatcattaaaggcgtgcgcaagtctaatgcggcagagcgtcgagggcctctgtag

SEQ ID NO: 201745 - DNA, 543 bp, Artificial Sequence
  derived and/or modified sequence
atggcaatatcaggcgtccccgtgttgggattctttataattgccgtcctgatgtcagcacaggaatcatgggcaatcaaagaggaacacgtgattattcaggccgaattttacctcaatcctgatcagtccggggagtttatgttcgatttcgacggtgatgaaatctttcatgtcgacatggcgaagaaggagaccgtgtggagactggaagagttcggccgattcgcgtcgtttgaggcccagggagcactggcgaacatcgctgttgacaaggctaatctggagatcatgaccaagaggtctaaaccgtccccacgggattaccgggaacgtggggtctgcccaggacccgactgtgggagcggcggtcatcactactgggatcaccttcatcatcagggaatagctcagaagcagtgctccagaactcaaggggcaagtgtcaggcacatggaggttatggtgttcttgagggagaagattaccgaagagacttccgctctgatggcacttcagagttggcagtattacaatccctag

SEQ ID NO: 201746 - DNA, 714 bp, Artificial Sequence
  derived and/or modified sequence
atgtcagcccaggagagttgggccatcaaggaagaacacgttataattcaggctgaattctacctaaacccggatcagtccggagagttcatgtttgactttgatggtgacgagatttttcatgtggatatggcaaaaaaggagaccgtttggcggttagaggagtttggacgcttcgcctctttcgaagcccagggggctctggccaacatagccgttgacaaagcgaatctggagatcatgactaaaagaagcaattataccccaatcaccaacgtaccccctgaagtgactgttctcactaactctcccgtcgaactgcgcgaacccaatgtgctgatatgttttatcgacaagttcacccctccagtcgtaaacgttacatggttgaggaacggcaagccagttaccacaggcgtgtctgaaaccgtgtttctcccgcgagaggaccacctttttaggaagtttcactatttgccattccttccttcgaccgaggacgtctatgactgtagggtcgagcattggggcctggacgaacccctgcttaagcattgggagttcgacgccccttccccgctgcctgagacaaccgagaatgtggtgtgcgctctgggcctgaccgtgggactcgtgggcattatcatcgggactattttcattatcaaaggggtgagaaagtcgaacgcagctgaacgccgaggcccactttag

SEQ ID NO: 201747 - DNA, 498 bp, Artificial Sequence
  derived and/or modified sequence
atggccaaaaaagagacagtctggagacttgaggagttcggaaggttcgcctcgttcgaagcacagggtgccctcgctaacattgcagtcgacaaggccaatctggagattatgaccaagagatccaactacactccaattacgaatgtaccccctgaggtgacggtgctcactaatagcccagtcgagctgcgggagcccaatgtgctgatatgttttatcgataagttcactcccccagtggttaacgttacttggctcagaaacggaaaaccggttacgactggcgtgtctgagaccgttttcctttccatcgcgttttcctgcatttacttccctctttttcctataatactactgtcaccttgtaatgcaagcggtatcaaacacaccggagtgtgcctttgctatggtatgccccacggcgcaagcctcgtgtatctgttgtttaaggtgtcaagcaactgtgacttctccgaacataataaattattctag

SEQ ID NO: 201748 - DNA, 453 bp, Artificial Sequence
  derived and/or modified sequence
atggccatcagcggtgttcctgtcctcgggtttttcatcatcgctgttctcatgtccgcccaggagagctgggccatcaaagaggagcatgtgattatccaagccgaattctaccttaatcctgaccaaagcggagagttcatgtttgatttcgatggagacgagatttttcatgtcgacatggccaaaaaggagacagtgtggagactagaagaattcggaagattcgcttcgtttgaagctcagggagcgcttgcgaatatcgcggtggataaagctaacttggagattatgacaaaacgaagtaactataccccgatcaccaatgtcccgcctgaagtgaccgttctcacaaattctcctgtggagctcagggaacctaatgtactcatttgctttatcattaagggagtcaggaaatcaaatgctgccgagcgccgaggcccactttag

SEQ ID NO: 201749 - DNA, 543 bp, Artificial Sequence
  derived and/or modified sequence
atggctatttctggcgtccccgtgctggggttttttattattgccgtactaatgtctgctcaggagtcttgggccatcaaggaagaacacgtgatcatccaggccgaattctatctcaatcccgaccagtctggcgagtttatgtttgactttgatggcgatgagatttttcatgtggatatggccaaaaaggagactgtgtggagactcgaggagtttgggcgtttcgcctcattcgaggcccagggggctctagcgaatattgccgtcgacaaagcaaacttggaaatcatgaccaagagatcgaagccttctcctagggattaccgggagagaggagtatgtccaggtccagactgcggctccggaggacaccactattgggaccaccttcatcaccagggcagcgcacagaaacaatgctctaggacacagggagcttctgtgaggcatatggaggtcatggttttccttagggagaagattactgaggagacatcggccctgatgacactgcagtcatggcagtactataatccgtag

SEQ ID NO: 201750 - DNA, 543 bp, Artificial Sequence
  derived and/or modified sequence
atggccatttcaggggtgcccgttctgggcttcttcataattgctgtgctcatgagcgcgcaggagagctgggctattaaggaggaacatgtgatcatccaggccgagttttacctcaatccggatcagtccggcgagttcatgttcgattttgatggtgatgagatttttcacgtggacatggctaagaaggagacggtctggagattggaggagttcgggaggtttgccagcttcgaggctcagggtgctctggccaatatcgctgttgacaaggccaacttagaaattatgacaaagcgttcaaagccaagtcccagggattatagagaacggggagtatgtccaggccctgattgtggatccgggggacatcactactgggaccacctccatcatcagggttctgcacagaaacagtgtagtagaactcaaggagcatccgtgcggcacatggaggtgatggtttttttacgcgaaaagatcactgaagagactagcgcactgatgaccctccaatcttggcaatactataacccctag

SEQ ID NO: 201751 - DNA, 498 bp, Artificial Sequence
  derived and/or modified sequence
atggccaaaaaggagaccgtttggagattggaggaattcgggagatttgctagctttgaggcacagggcgctctcgctaacattgctgtggacaaggccaacctcgaaattatgactaagcgatccaactatacccctatcaccaacgtgcccccagaggttaccgtgcttaccaactctcctgttgagctgagggagcccaatgtcctgatttgcttcatagataagttcacgccccctgttgtgaacgtgacgtggctcagaaacggcaagccagtaacaaccggtgtaagcgagacagtctttctgagcattgcctttagctgtatttatttccctctgttccctattattctcctgtctccatgtaatgcctccggaatcaagcataccggagtttgtctgtgctatggtatgcctcatggagccagcctggtgtatcttctcttcaaggtgtctagtaactgtgacttttctgagcataataagctgttttag

SEQ ID NO: 201752 - DNA, 543 bp, Artificial Sequence
  derived and/or modified sequence
atggcgatttccggggtgccggtgcttggctttttcattatcgctgttctgatgagcgctcaggagtcgtgggccatcaaagaagaacatgtgattatccaggccgagttttacctgaacccagaccagtccggcgagttcatgtttgacttcgacggagacgaaatattccatgtggacatggccaagaaggagaccgtgtggcggttggaggaattcggtcgttttgctagcttcgaggcccaaggagcgcttgcgaacatagccgtcgataaggctaacttagagatcatgacgaagcgctcaaagccttcacccagagactatcgcgaaaggggcgtgtgccctggtccggactgcggatcgggcggtcaccattactgggaccatcttcaccatcagggatccgctcaaaagcagtgtagccgtacacaaggggcttccgtaaggcatatggaagttatggttttcttgcgggagaaaataactgaggaaacgagcgcccttatgacactacagagctggcaatactacaatccttag

SEQ ID NO: 201753 - DNA, 498 bp, Artificial Sequence
  derived and/or modified sequence
atggcgaagaaagagactgtgtggcgtctggaagaattcggccgatttgccagctttgaggcccaaggcgcactggccaacatcgctgttgacaaggctaacctcgaaatcatgactaagcgttcaaactacacaccgattactaacgtccctcccgaggtgacggtccttaccaattcgccagtggagctccgtgagcccaacgttttgatctgtttcatcgacaaatttacgccaccggtggtcaacgtgacttggttgcgcaatggaaagcctgtgacaactggggtgtctgaaacagtgttcctgtcaatagcattttcctgcatctacttcccactgtttcctataatcctgttgagcccttgtaatgcgtctggaatcaaacatactggcgtgtgtctttgctacggaatgccccacggcgcatctctggtctatctgctgtttaaggtgtcctcaaactgcgacttttctgaacacaataagctgttctag

SEQ ID NO: 201754 - DNA, 714 bp, Artificial Sequence
  derived and/or modified sequence
atgtcggcccaggaaagctgggccatcaaagaggaacatgttattatccaggccgagttctacttaaaccctgatcaaagtggcgagtttatgttcgattttgatggcgatgagatcttccatgtggatatggccaagaaagaaactgtgtggaggctggaagaattcggaagattcgcgtcgttcgaggcacagggcgcactggccaatattgcagtcgataaggccaacttggagatcatgacgaagcggagtaattataccccaattaccaatgttcctcccgaggtgactgtgctcactaactcacccgtcgagctgcgagagccaaacgtgctgatttgcttcatcgataaatttacacctcccgtcgtgaacgtgacctggctgcggaatggaaagccagtgactacaggagtctctgagactgtctttctgcccagagaggaccacttattcaggaagttccattatctgcccttcctgccatctacagaagacgtttacgactgcagggttgagcattggggactcgacgagccactgctgaagcattgggaatttgacgccccaagtcccttgcccgaaactacagagaatgtcgtatgcgctctaggcctgacagtcgggttagtcggaatcatcattggaactattttcatcattaagggcgtccggaagtcaaatgctgctgaacgcagggggcctctctag

SEQ ID NO: 201755 - DNA, 543 bp, Artificial Sequence
  derived and/or modified sequence
atggccatatcaggcgtccctgtgttaggattttttatcatcgctgtccttatgtcagctcaggaatcttgggccattaaagaggagcacgtcataattcaggctgagttctatctgaacccggaccagagcggagagtttatgttcgactttgacggggacgaaatctttcacgtggatatggccaagaaggaaaccgtctggagactggaagagttcggtcgcttcgcaagctttgaagcccaaggcgcacttgctaatattgccgtcgacaaggccaatctcgaaatcatgaccaaacgttccaagccctcccctagagattatcgtgagaggggcgtttgtccgggacccgactgtggatctggtggtcatcattactgggatcatttgcatcatcaaggatccgcacagaaacagtgtagccgtacccagggtgcttcggtcagacatatggaagttatggtcttccttagggaaaagataacagaagagaccagcgccctcatgactctacaatcatggcagtattacaacccttag

SEQ ID NO: 201756 - DNA, 498 bp, Artificial Sequence
  derived and/or modified sequence
atggccaagaaggagacagtctggagattagaggaatttggtcgcttcgcctcattcgaagcccaaggggctcttgctaacatcgcggtggacaaggctaatctggagattatgacaaaaaggagcaactacaccccaatcacaaacgtgcctccagaggtcacagtcctgacaaactcccctgttgaactgcgtgagccaaacgtgctgatttgcttcatcgacaagttcacacctccagttgtgaatgtgacgtggcttcgaaacggcaaacctgtgacaacaggagtcagtgaaacggttttcctgtccattgccttctcgtgtatttactttcccctctttcctataatcttgctgtctccctgtaatgcttctggaatcaagcacactggcgtctgcctctgttacggaatgccccatggcgcttcactcgtctacctgctgtttaaggtgagcagtaattgcgatttctccgagcacaacaagctgttctag

SEQ ID NO: 201757 - DNA, 498 bp, Artificial Sequence
  derived and/or modified sequence
atggcgaagaaagagaccgtctggcgattagaggagttcgggcgtttcgcgtcttttgaagcccagggagccctggcaaacattgccgttgacaaggccaacctggagatcatgacaaaacgatcaaactacaccccaatcacaaatgtgccccctgaggtgacagtgctcacaaacagcccggttgagctgcgagaaccaaacgttctgatctgctttatcgacaagttcacacctcctgtcgtcaatgtcacctggctacggaatggaaagcctgtcacaacaggcgtgtctgagaccgtgtttctgagtatcgcgttcagttgcatttattttcctctgttccctattattctcctctcaccatgcaacgcctcaggcatcaagcatacaggtgtttgcctgtgctatggtatgccccatggggcttctctagtgtatctcttgttcaaggtgtccagcaactgtgatttcagcgaacacaataaactcttctag

SEQ ID NO: 201758 - DNA, 714 bp, Artificial Sequence
  derived and/or modified sequence
atgagtgctcaggagagttgggccatcaaagaggaacatgttattatccaggccgagttctacctcaatcctgatcagtccggcgagttcatgtttgatttcgatggcgacgagatctttcatgtcgacatggctaagaaggagaccgtatggcgccttgaagagttcgggagatttgcttcgtttgaagcacaaggtgcgctggccaacattgcagtggacaaagccaatctggaaattatgacaaaacggagtaattacactccaataaccaacgtccccccagaggtcacagtcttgactaattctcccgtggagttacgcgagcctaacgtcctgatctgctttattgacaaattcacccctcccgtcgttaacgtgacatggttaagaaacggaaaacctgtaactactggtgtgtcagagacagttttcttaccgcgagaagaccacctcttcaggaaatttcactatttaccattcttgccaagcaccgaggatgtttacgattgcagagttgaacattggggacttgacgagccccttctgaagcattgggaatttgacgctcccagccccctgccggaaaccacagagaacgttgtttgtgccctcggactcaccgtgggacttgtcggtatcatcatcggtacgattttcatcattaaaggggtgcgtaaatccaacgcagccgagcgcagaggcccattatag

SEQ ID NO: 201759 - DNA, 543 bp, Artificial Sequence
  derived and/or modified sequence
atggcgatctcaggagtgccagtgctggggttctttataatcgcggtcctgatgagtgctcaagagtcatgggcgatcaaggaagagcacgttatcattcaggccgaattctacctgaatccagatcagtccggggagttcatgtttgattttgatggggacgaaatattccatgtggatatggctaagaaggagactgtgtggagactggaggaattcgggcgtttcgccagcttcgaggcgcaaggagcacttgccaacattgctgtcgataaggccaacctggagattatgaccaagagaagcaagccctctcccagggactatcgggaatgcggggtctgccctggccctgattgcggtagtgggggacaccattactgggaccacctccaccatcagggtagcgcacagaaacagtgttccagaacccagggagcttcagttaggcatatggaggtcatgatgtttcttcgggagaaaataacagaagagacatctgctctcatgaccctgcagtcctggcagtattacaacccctag

SEQ ID NO: 201760 - DNA, 498 bp, Artificial Sequence
  derived and/or modified sequence
atggcaaaaaaggaaaccgtttggcggttagaagaattcgggcgattcgcgtcatttgaagcccagggcgctttagcaaatatagccgtagataaggcaaatctcgagatcatgacaaaaagatctaactacacacccatcacgaacgtgccaccagaagttacagttctgacaaatagtcccgtcgagttgcgggaacccaatgtactgatttgcttcatcgacaaattcactccaccagtagtcaatgtaacttggttgcgcaacggaaagccagtgacaaccggcgtctctgagactgtgttcctctccatagcattctcttgcatatatttccctctctttcccatcattctgctttcaccatgtaacgcctcaggcattaagcataccggcgtgtgtctatgttacggaatgccccacggcgcttctctcgtgtatctgcttttcaaagtgtcctctaattgtgacttctccgagcacaacaaactcttttag

SEQ ID NO: 201761 - DNA, 714 bp, Artificial Sequence
  derived and/or modified sequence
atgtcagcgcaagagagttgggctatcaaggaggagcatgtgataatccaggccgagttctacctcaaccccgaccagagcggggaattcatgttcgattttgatggtgacgaaatcttccatgtggacatggctaagaaagagaccgtgtggcgactcgaagaatttggaaggttcgcttcgtttgaagcacagggagctctcgcgaatatagccgtcgacaaggccaatctcgagatcatgactaagcgtagtaattacaccccaatcaccaatgtcccgccagaggtgaccgtcctgactaatagtccagtggaacttcgagaaccaaacgtgctcatttgctttatagacaagttcacccccccagtggtgaacgtgacctggttgcggaacggcaaacccgtgactaccggcgtttcagagacagtttttctcccacgagaagaccacctattcagaaaatttcactatctgcccttcctccctagtacagaggatgtttacgactgtcgtgtagagcactggggactggatgagccactgctcaaacactgggaatttgatgccccatccccactgcccgagactaccgaaaacgtagtctgtgctcttgggctcactgtaggccttgtgggcataatcattggcacgattttcattatcaaaggagtacgtaaaagcaacgctgccgagcgcaggggtcctctgtag

SEQ ID NO: 201762 - DNA, 1312 bp, Artificial Sequence
  derived and/or modified sequence
ttttaatggtcagactctattacaccccacattctcttttcttttattcttgtctgttctgcctcactcccgagctctactgactcccaacagagcgcccaagaagaaaatggccataagtggagtccctgtgctaggatttttcatcatagctgtgctgatgagcgctcaggaatcatgggctatcaaagaagaacatgtgatcatccaggccgagttctatctgaatcctgaccaatcaggcgagtttatgtttgactttgatggtgatgagattttccatgtggatatggcaaagaaggagacggtctggcggcttgaagaatttggacgatttgccagctttgaggctcaaggtgcattggccaacatagctgtggacaaagccaacctggaaatcatgacaaagcgctccaactatactccgatcaccaatgtacctccagaggtaactgtgctcacaaacagccctgtggaactgagagagcccaacgtcctcatctgtttcatagacaagttcaccccaccagtggtcaatgtcacgtggcttcgaaatggaaaacctgtcaccacaggagtgtcagagacagtcttcctgcccagggaagaccaccttttccgcaagttccactatctccccttcctgccctcaactgaggacgtttacgactgcagggtggagcactggggcttggatgagcctcttctcaagcactgggagtttgatgctccaagccctctcccagagactacagagaacgtggtgtgtgccctgggcctgactgtgggtctggtgggcatcattattgggaccatcttcatcatcaagggattgcgcaaaagcaatgcagcagaacgcagggggcctctgtaaggcacatggaggtgatggtgtttcttagagagaagatcactgaagaaacttctgctttaatggctttacaaagctggcaatattacaatccttgacctcagtgaaagcagtcatcttcagcattttccagccctatagccaccccaagtgtggatatgcctcttcgattgctccgtactctaacatctagctggcttccctgtctattgccttttcctgtatctattttcctctatttcctatcattttattatcaccatgcaatgcctctggaataaaacatacaggagtctgtctctgctatggaatgccccatggggcatctcttgtgtacttattgtttaaggtttcctcaaactgtgatttttctgaacacaataaactattttgatgatcttgggtggaaaaaaaaaaaaaaaaaaaaaaaaaaaaaaaaaa

SEQ ID NO: 201763 - protein, 2146 aa, Artificial Sequence
  derived and/or modified sequence
MAFWTQLMLLLWKNFMYRRRQPVQLLVELLWPLFLFFILVAVRHSHPPLEHHECHFPNKPLPSAGTVPWLQGLICNVNNTCFPQLTPGEEPGRLSNFNDSLVSRLLADARTVLGGASAHRTLAGLGKLIATLRAARSTAQPQPTKQSPLEPPMLDVAELLTSLLRTESLGLALGQAQEPLHSLLEAAEDLAQELLALRSLVELRALLQRPRGTSGPLELLSEALCSVRGPSSTVGPSLNWYEASDLMELVGQEPESALPDSSLSPACSELIGALDSHPLSRLLWRRLKPLILGKLLFAPDTPFTRKLMAQVNRTFEELTLLRDVREVWEMLGPRIFTFMNDSSNVAMLQRLLQMQDEGRRQPRPGGRDHMEALRSFLDPGSGGYSWQDAHADVGHLVGTLGRVTECLSLDKLEAAPSEAALVSRALQLLAEHRFWAGVVFLGPEDSSDPTEHPTPDLGPGHVRIKIRMDIDVVTRTNKIRDRFWDPGPAADPLTDLRYVWGGFVYLQDLVERAAVRVLSGANPRAGLYLQQMPYPCYVDDVFLRVLSRSLPLFLTLAWIYSVTLTVKAVVREKETRLRDTMRAMGLSRAVLWLGWFLSCLGPFLLSAALLVLVLKLGDILPYSHPGVVFLFLAAFAVATVTQSFLLSAFFSRANLAAACGGLAYFSLYLPYVLCVAWRDRLPAGGRVAASLLSPVAFGFGCESLALLEEQGEGAQWHNVGTRPTADVFSLAQVSGLLLLDAALYGLATWYLEAVCPGQYGIPEPWNFPFRRSYWCGPRPPKSPAPCPTPLDPKVLVEEAPPGLSPGVSVRSLEKRFPGSPQPALRGLSLDFYQGHITAFLGHNGAGKTTTLSILSGLFPPSGGSAFILGHDVRSSMAAIRPHLGVCPQYNVLFDMLTVDEHVWFYGRLKGLSAAVVGPEQDRLLQDVGLVSKQSVQTRHLSGGMQRKLSVAIAFVGGSQVVILDEPTAGVDPASRRGIWELLLKYREGRTLILSTHHLDEAELLGDRVAVVAGGRLCCCGSPLFLRRHLGSGYYLTLVKARLPLTTNEKADTDMEGSVDTRQEKKNGSQGSRVGTPQLLALVQHWVPGARLVEELPHELVLVLPYTGAHDGSFATLFRELDTRLAELRLTGYGISDTSLEEIFLKVVEECAADTDMEDGSCGQHLCTGIAGLDVTLRLKMPPQETALENGEPAGSAPETDQGSGPDAVGRVQGWALTRQQLQALLLKRFLLARRSRRGLFAQIVLPALFVGLALVFSLIVPPFGHYPALRLSPTMYGAQVSFFSEDAPGDPGRARLLEALLQEAGLEEPPVQHSSHRFSAPEVPAEVAKVLASGNWTPESPSPACQCSRPGARRLLPDCPAAAGGPPPPQAVTGSGEVVQNLTGRNLSDFLVKTYPRLVRQGLKTKKWVNEVRYGGFSLGGRDPGLPSGQELGRSVEELWALLSPLPGGALDRVLKNLTAWAHSLDAQDSLKIWFNNKGWHSMVAFVNRASNAILRAHLPPGPARHAHSITTLNHPLNLTKEQLSEGALMASSVDVLVSICVVFAMSFVPASFTLVLIEERVTRAKHLQLMGGLSPTLYWLGNFLWDMCNYLVPACIVVLIFLAFQQRAYVAPANLPALLLLLLLYGWSITPLMYPASFFFSVPSTAYVVLTCINLFIGINGSMATFVLELFSDQKLQEVSRILKQVFLIFPHFCLGRGLIDMVRNQAMADAFERLGDRQFQSPLRWEVVGKNLLAMVIQGPLFLLFTLLLQHRSQLLPQPRVRSLPLLGEEDEDVARERERVVQGATQGDVLVLRNLTKVYRGQRMPAVDRLCLGIPPGECFGLLGVNGAGKTSTFRMVTGDTLASRGEAVLAGHSVAREPSAAHLSMGYCPQSDAIFELLTGREHLELLARLRGVPEAQVAQTAGSGLARLGLSWYADRPAGTYSGGNKRKLATALALVGDPAVVFLDEPTTGMDPSARRFLWNSLLAVVREGRSVMLTSHSMEECEALCSRLAIMVNGRFRCLGSPQHLKGRFAAGHTLTLRVPAARSQPAAAFVAAEFPGAELREAHGGRLRFQLPPGGRCALARVFGELAVHGAEHGVEDFSVSQTMLEEVFLYFSKDQGKDEDTEEQKEAGVGVDPAPGLQHPKRVSQFLDDPSTAETVL

SEQ ID NO: 201764 - DNA, 6441 bp, Artificial Sequence
  derived and/or modified sequence
atggccttttggacccagctgatgttactgctgtggaaaaactttatgtaccgtcgcagacagccggtccaactgctggtggaattactgtggcccctctttctgttttttatcttggtcgccgtccggcactcccaccccccactggagcaccatgaatgccacttccccaacaagcctctgccaagcgccggaacggtgccttggctacaggggctgatatgtaacgttaacaacacgtgtttccctcagctcacaccaggggaagagccaggtagattgagtaattttaatgacagtctggtctcacgtctcctagctgacgccagaacggtcctgggtggtgcttccgcacataggaccctggcgggcttgggtaagctcatagccaccttacgggccgccaggtccaccgcccagccacagccgaccaagcagtcaccactggagcccccaatgctcgacgtggctgagctgctcacatccctcctgagaaccgaaagtctcggcctagccctgggacaggcccaggaacccctacacagcctcctggaagctgccgaggacctcgcccaagaattgctggctttaaggagtctcgtagaactcagggctctgcttcaacggcctaggggcacgtccggacctctggagttgctctcagaagcactttgcagcgttagagggccatcatcaaccgtgggcccctcgctgaactggtacgaggcttctgatctgatggaactggttggacaggagcctgagagcgccctcccagacagcagtctgtcacccgcgtgcagcgagttgataggtgccttggattcacatccactttccagactgctatggcggagactcaaacctctgattctcggtaagctccttttcgcacctgatacaccgtttacacggaagctcatggcccaggtcaaccgaactttcgaggagctgacactgctcagggacgtgcgtgaggtgtgggaaatgcttggccctaggatctttaccttcatgaatgacagctccaatgtggctatgttgcaacgccttctgcagatgcaagatgaaggcagacggcagccccgccccgggggccgagaccacatggaggcgcttagaagttttttggaccctggctccggaggatacagttggcaggatgcccatgctgatgtggggcatctggtgggcacgctcggccgagttaccgagtgcctatccctggacaaactggaggccgctccctcggaggcagcccttgtgtccagggccctacaactcctggccgaacaccggttctgggccggagttgtgttcctggggcctgaggacagttctgacccgactgaacacccgacccccgatctgggtccgggacatgtgcgaataaagatacggatggacatcgacgtggtgacaagaactaacaagatccgggaccgattctgggaccctggtccggctgccgacccgctcaccgacctccgctacgtctggggcgggttcgtttatctgcaggacttagtcgaacgtgctgctgtgagggttttgagcggcgctaatcctagggccggcttatacctgcaacagatgccatacccatgctacgtggatgatgtgtttttaagggtgttgtcgagaagtttgccattgttccttacactcgcctggatttacagtgttacactgactgtgaaggccgtggtgcgggagaaggaaaccagactgcgggataccatgcgcgcaatgggtctcagcagagcggtgttgtggttgggatggttcttgagctgtctggggccattcctcctgtctgctgcccttcttgtcctggtgctgaagctgggcgatattctgccatatagtcaccccggcgttgtcttcctgttcctagccgcttttgcagtggctactgtgacacagagctttctgctgtctgcctttttttcaagagccaacttagccgcagcgtgtgggggactggcctatttttccctatacctgccctacgttttgtgcgtggcctggcgagacagactaccagctggcggccgggtggcggcatcactcctctctcccgtggcattcggcttcggctgtgaatccctggcactgttagaggaacaaggcgaaggtgcacagtggcacaacgttggaacacgaccgactgccgatgttttctccttggcgcaagtgtctggcctccttttgctcgatgctgcattgtacgggctggcgacctggtacctggaggcggtttgtcccggacagtatggaatccctgagccctggaacttcccctttcgccgctcctattggtgcgggccacgtcccccgaagtcgccagccccttgccctacccccctggatcctaaagtgcttgtggaagaggcaccaccaggcctaagcccaggagtttcagtgcgtagtctcgagaagaggttccctgggtcaccccaaccagccctacgcggtctctcactcgacttttatcagggacacatcactgccttcttgggtcacaacggagccggtaagaccactacgttgagcattttgagtggactcttccctcccagtggaggaagtgcctttattctgggacacgacgtgagaagtagcatggcagccattcgcccgcacctgggagtatgcccacaatataacgtccttttcgacatgcttacagtagatgagcacgtgtggttctatgggcggttaaagggtctgagtgctgcagtggtgggaccggaacaggaccggctcctgcaggatgtaggcctcgtctccaagcaatctgttcagacacgccatctttctggtggcatgcagcggaagttaagcgtggcaatcgcatttgtcgggggctcacaggtggttattctggatgagcccaccgccggtgtcgacccggcatcccggagaggtatttgggagctgctcctcaaatacagggaaggacgaacacttatcctgtcaacacatcacctggacgaagccgagttgcttggcgaccgcgttgccgttgtggctggcggacgcctgtgctgttgcggatcaccgctcttccttcggcggcacctcggaagcgggtactacctcaccctggtcaaggcacggcttccattgacaacaaacgagaaagccgacaccgatatggaaggctcggtggacaccagacaggagaaaaagaacggctctcagggctcccgggtgggaacccctcaactgctggcactcgttcagcactgggtccccggggcacggctggtagaggagctaccccacgagctggtcctggtcttaccctatacaggcgcccacgacggttcatttgctacactgttcagggagctggatacgcggctggccgagctccggctgaccggctacggaatcagtgacacctccctggaagagatatttctgaaagtcgtggaagaatgtgctgcggatacggacatggaggacggcagttgcgggcaacacctgtgcaccgggatcgctggccttgacgtaacactcagactgaagatgcccccccaggaaacagcccttgagaatggcgagccggctggatctgcacccgagaccgatcagggcagcggtcccgatgccgtgggacgcgttcagggttgggccctaaccaggcagcagctccaggcattactgcttaagaggtttttgttggcccggagatctcggcgagggctcttcgctcagattgtgcttccagcccttttcgtcggcctcgccctggttttcagcctgatagtccccccctttggccactaccccgccctgcgactgtcccctacaatgtatggcgcacaggtgagcttcttcagtgaagatgccccgggggatcccgggagggcccggttgctagaagcactccttcaggaagctggtttagaggagcccccagtccagcattcatctcatcggttctccgcacccgaggttcccgcagaagtggccaaggtgctggcctctggaaactggactcccgaaagtccttcacctgcctgccagtgtagcagaccaggcgctagacgcctgctgccagattgtcctgcagctgcaggagggccccctcctccgcaggctgtcaccgggtccggtgaagtggtgcagaatttaacaggtagaaacctttccgatttcctggtcaagacttatcctaggctggtgcggcaaggcctgaaaacgaagaagtgggtcaacgaggttcggtacggcgggttctctttaggcggacgcgacccaggccttcccagtggacaggagctgggacgtagcgttgaagaactgtgggcattgttaagtcctctgccaggaggcgcactggaccgtgtcttgaagaacctaacagcttgggcccacagccttgacgcacaggattcgttgaaaatttggttcaataacaagggatggcacagcatggtcgcctttgttaaccgcgcatcaaacgctatcctgcgtgcccatcttcctcccggacctgctagacacgcacactctattaccacattaaatcatccactgaatcttacaaaggagcagcttagcgaaggcgctctcatggcgtcgagcgtcgatgtgctggtgagtatttgtgtggtgttcgcaatgagcttcgttccggcgtccttcacccttgtgctgatcgaggaaagagttacccgagccaagcatctgcagctgatgggcggactgagtccaactctgtactggctgggcaactttctttgggatatgtgcaattacttggtgccagcttgtattgtggtgctcattttcttggcgttccagcagagggcttatgtcgctcctgccaatctgccggcactgcttctgcttctgctactgtatggctggtctataacacccctgatgtaccccgcttcttttttcttctctgtgcctagcacagcgtacgtagtgttgacctgcatcaacctgttcattggcatcaacggctcaatggcaacgtttgtcctagaacttttcagtgaccaaaaactgcaggaggtctctcggatcttgaaacaggtgtttttaattttcccccacttctgtctgggacgagggctgatcgacatggtgaggaatcaagccatggccgacgccttcgagaggctcggtgatcggcagttccagtctcctcttcgatgggaggtggttggcaagaacctgcttgcaatggtgatacagggcccactcttcctgttgtttaccctgctgctccagcataggtcccagctgttaccgcagcctcgggtcagaagtctgccccttctgggggaggaggatgaggatgtcgctcgcgaacgtgaacgcgttgtgcaaggggccacacagggcgacgtactagtacttcgaaatcttaccaaagtgtacagaggtcagcggatgcccgccgtggaccgcctgtgccttggaatccccccaggtgagtgctttggcttacttggcgtgaacggcgctggaaagacatccaccttccgcatggtgaccggtgacaccttggcctctagaggtgaagccgtcctggcgggccactccgtggctagggagccttctgccgctcacctgtctatgggatactgcccacaaagcgatgctatcttcgagctgctgactggccgcgagcacctcgagcttctggcccggttgcgtggggtgcctgaggcgcaagttgcccagacggctggcagcggactggcccggctcggcctgagttggtacgccgatcgccctgccggtacctactcaggtggtaataagcgcaagctggccacggccctcgcactagtcggggacccagccgtggtttttttagatgaaccaaccactggcatggacccttccgcacggcgattcttgtggaattcactcctcgcggttgtccgggaaggcaggtctgtgatgctgaccagccatagcatggaggagtgcgaagccctctgctcccgcctagcaattatggttaatggaaggtttcgatgtttgggcagcccacagcacttaaagggtaggtttgctgccggccacaccctgactttgagggtacccgcagctcgtagccagcccgccgctgccttcgtggcagctgaatttcctggagccgaacttcgcgaggcacatgggggccgcttgagattccagttacctccagggggacgctgtgctctagccagagtattcggcgaactggcagtgcacggagctgaacacggagttgaggactttagtgtgagccaaaccatgctggaggaggtgttcctgtactttagcaaggatcagggcaaggatgaagacacggaggagcaaaaggaggcgggagtgggcgttgaccccgctcccggccttcaacatcccaaacgcgtgtctcagtttctcgacgacccatctacggcagaaacagtcctctag

SEQ ID NO: 201765 - DNA, 6441 bp, Artificial Sequence
  derived and/or modified sequence
atggccttttggactcagctgatgctcctgctgtggaaaaattttatgtatcgaaggaggcagccggtgcagctgctggtggaactgttatggcccctcttcctttttttcattctcgtggccgttagacatagccacccccctctcgaacatcatgaatgccactttccaaacaaacccctacctagtgctggcacggtgccctggctgcagggccttatctgtaatgtaaataatacatgtttccctcaactcacacctggagaagagccagggcgactgagtaacttcaacgattccttggtaagcaggctgctcgccgacgcccggaccgtcttaggcggggcctccgcccataggacactggctggcctgggcaaactaatcgcgacattaagagccgcaagatcaacagctcagccccagcctaccaaacagtcacccctcgaaccccccatgttggacgtggctgagctgctgacaagtcttttgagaaccgaaagcctagggttggccttaggccaggcacaggaacctttacacagccttctggaagccgctgaggatcttgcacaggaactgctcgctcttaggtccctggtggaactccgggctttactgcagcgcccgagaggcaccagcgggcctctggaactgctgtctgaggctctctgctcagtgcgcggccctagctcgacagtggggccaagcctaaattggtacgaagcgtctgatctgatggaattggttgggcaggagcccgagagcgctctccccgacagcagcttgtccccagcctgcagtgaactgatcggggcacttgactcacacccacttagtcgacttttatggcgtagactgaaacccctgatcttgggcaaactactgtttgcccccgatactccattcactagaaagctgatggcccaggtgaaccggacatttgaagagctcaccctattgagggacgtgagagaggtgtgggaaatgctgggaccgcggatctttaccttcatgaacgattcctcgaacgtggcgatgctccaacgcctcttacagatgcaggatgaagggcggcggcagccccgccctgggggccgcgatcatatggaagccctgaggtcctttctcgaccctggtagcggaggatactcctggcaagatgcgcatgctgacgtcgggcatctcgtcggaacactgggcagggtgacggaatgcctgtccctggataagctagaggccgccccttccgaggctgctttggttagcagggctctgcagctcctggcagagcatcgtttctgggccggagtggtttttctcgggcctgaggactccagcgaccccaccgagcaccctacacctgacttaggccccggccacgtccggattaaaatacggatggacattgatgttgtgacacggactaataagatccgagaccgtttctgggatcctggaccagccgcagacccactgaccgacctgcgatatgtctggggggggttcgtgtatctgcaggacctggtcgaaagggctgcagtgagagtcctgtccggcgcaaatcctagggccggactgtatcttcaacaaatgccatacccatgttacgtggatgacgtcttcctccgggtcctctcccggagcctccctctcttcctcacgcttgcctggatttatagcgtaaccttgaccgtgaaagcagtggtgcgggagaaggagaccagattacgggacaccatgagggcaatgggactttcgcgagccgtgctgtggctggggtggttccttagctgtctgggcccatttctgctgtctgccgctctgctggttctggtcctgaaactcggagacatcctgccatacagccacccgggcgttgtgtttttattcttggcagcctttgctgttgccacagtgacccagtcctttctgttgtcagctttcttcagtagagcaaatctggccgcagcctgtgggggcctggcctacttttcgctctacctgccatacgtgctctgcgtggcctggcgcgacaggctgcctgccgggggcagggtggccgcttctttgctatcaccggtcgcattcgggtttgggtgtgaatctctggctctcttagaggaacaaggtgagggcgcccagtggcacaatgttggaacccgacccactgctgatgtcttttctctggcccaggtctctggcctcctactcctggatgctgctctatatggactggccacctggtatctcgaagcggtgtgtccgggccagtacgggatcccagagccttggaatttccctttccgccggagttattggtgcggacctcgtcctcccaagagtccagcaccatgccccaccccactcgaccctaaggtgcttgtggaggaggcacctcccggactgagcccaggagtcagtgtgaggtctctggaaaagaggtttcccggcagcccccaacctgccctcagaggtctcagcctggacttttaccagggccacatcaccgctttcctcgggcataatggggccggcaagactacaaccttatccatactgagtggactcttccccccgtcgggcggcagtgctttcattctcggacatgacgtgcggtcctccatggctgcaatcaggccccacctcggagtttgcccacagtacaacgttttgtttgatatgctcacggtcgacgagcatgtctggttctacggacgcctgaaaggcttatctgccgcagtcgttggtcctgagcaagatcggctgctgcaggacgttgggctggtatctaagcagagtgtgcagactagacatttatccggtggaatgcaaagaaagctgagcgtggccattgcatttgttggaggaagccaggtcgtaatcctggacgagccaacagcaggcgtggatcctgcatctcgacgagggatatgggagctactgttgaagtacagggagggcagaactcttatactgtctacccatcatctggatgaggccgaacttctgggggatcgcgttgcagtggtggccggagggcgcctgtgctgttgcgggtctcctctgtttctgcgaagacatctgggtagcgggtactacctgacgcttgtgaaggctcggctgccattgacgacaaacgagaaagcggatacggatatggaggggagcgtggatactagacaggagaagaaaaatgggtctcaagggtctcgtgtgggaacgccccagcttcttgccctggtgcaacattgggttcctggcgcccgtcttgtcgaggaattgccccacgagctggtcttggtgctgccctatacaggtgctcatgatggatctttcgccacattatttagggagttggatacacgactggcggagctccggcttaccggatatggtatttcagatacttccctggaggaaatttttttaaaagtggtggaggaatgcgctgccgataccgacatggaagatgggagttgcgggcagcatctgtgtactggcatagcaggccttgacgtcacgctccgattgaaaatgccaccacaggagactgccctggagaatggagaacccgctggctcggcccccgaaacggaccagggcagcggacctgacgccgtgggacgggtacaaggatgggcccttacgagacaacagctccaggcattgctcctgaaacggtttttgctagcgcggaggtccaggagagggctattcgcacagatcgtcctgccagcgcttttcgtggggcttgcccttgtgttttccctcatcgtgcctccattcggtcattaccctgccctgaggctttccccgacaatgtacggcgcccaggtgtcctttttcagcgaggacgcaccaggcgatcccggccgcgcccgactgttagaagcattgctgcaagaggccggcctcgaggaacctcctgtgcaacacagcagccatcgcttcagtgctcctgaggtcccagccgaagtggccaaagtgttagccagtggcaattggacgcccgaatctccatcacccgcatgccagtgctctcgccctggagcccggcggctcctgcctgattgccccgccgcagcaggggggccacctcctcctcaagcagtaaccggctctggcgaagtggttcagaacctgaccgggcgcaaccttagcgacttcttggttaaaacctacccacgactcgtgagacaggggctgaaaacgaagaagtgggtgaacgaagtgagatacggaggcttctctctgggggggcgggatccagggctgcccagtggccaggagttgggacgcagtgtagaagagctttgggcactgctctctccactaccggggggtgccctggaccgggtcctgaagaatctgaccgcctgggcccactctctggatgctcaggactctttaaagatatggttcaataataaaggctggcacagtatggttgcttttgtgaatagggcgtccaacgccatcctgcgcgcccaccttcccccaggccctgcgcgccacgcccatagcattaccacgctgaaccatccgctgaacttgactaaagaacagctttccgaaggcgccttgatggcctcttcagtggatgtactggtgagcatttgtgtggtgttcgctatgagcttcgtgcccgcaagcttcactctcgtattaattgaggaaagagtaactagggccaagcacctgcagcttatgggcggactgtccccaaccctttattggctaggaaattttctgtgggatatgtgtaattatctcgtgcctgcttgtattgtcgtgctgatcttcctggcgttccagcaacgtgcctacgttgcccccgccaatctgccagcactgctgttactgctacttttgtacggatggtctatcacgcctctgatgtaccccgccagctttttcttctctgtgccctcgactgcttatgtggtgctgacctgtatcaacctgtttatcgggataaacggatctatggctacattcgttttggaactcttctccgaccaaaaattacaagaggtttccaggattctcaagcaggtgtttctgattttcccgcacttctgcctgggccggggccttatcgacatggttcgaaatcaggcgatggccgacgctttcgagagactcggcgacagacagtttcagtcccctttacggtgggaggtagttggaaagaatctgctggctatggtaatacagggccccttattcctcctgttcactctgctgcttcagcacagatctcagcttctaccacagcctcgcgtccggtctttgcctttattgggggaggaagatgaggatgttgcccgcgaaagggagagggtagtacagggagccacccagggggatgttttagtgctaaggaacctgactaaagtttatagagggcaaagaatgcctgcagtcgaccggttatgtctggggatcccgcctggagaatgttttgggctgttgggcgtaaacggagcggggaagacatccacatttagaatggtcactggcgacaccctcgcttctcgcggagaagcagttctagcgggccactctgtggcaagagaaccgtctgctgcacatctgagcatggggtactgcccacagtcagatgccatctttgagctgcttacaggacgggaacacctggaactcctggctcgcctgcgaggcgtgcccgaggctcaggttgcccagactgctggaagcgggctggcaaggctgggcctgagctggtatgccgacagacctgccggaacctattccggggggaacaaaaggaagctggccacagctctggcacttgtgggcgacccggccgtggtctttttggacgaacccaccaccggcatggatccgtccgcccggcggtttctgtggaacagcttactggccgtggtaagggaagggaggagtgtcatgctcacttctcactcaatggaggaatgtgaggctctgtgcagcaggctagccataatggtcaacgggcggtttcggtgtctgggatctccacagcaccttaaaggtagattcgctgcaggacacacactgacccttagggtgccggctgccaggtcacaacccgcagctgctttcgttgcagccgaatttccaggagccgagctccgagaggcacatgggggccgactgcgcttccaacttcctccaggcgggaggtgcgcgctggccagggttttcggagaactggcagtgcacggagccgagcacggcgttgaggatttctctgtcagccagaccatgcttgaggaagtattcctgtatttcagcaaggatcaggggaaagatgaggatacagaggagcaaaaagaagcaggggtgggtgtagaccccgctcccggtctgcagcatcctaaacgggtcagccaatttcttgatgatccctccactgccgaaaccgtcctatag

SEQ ID NO: 201766 - DNA, 6441 bp, Artificial Sequence
  derived and/or modified sequence
atggccttctggacccagctgatgctgctgctgtggaagaacttcatgtacagaagacggcagcctgtgcagctgctggtggagctgctgtggcccctcttcctgttcttcatcctggtggccgtgcgccacagccacccccccctggagcaccacgagtgccacttccccaacaagcccctgcccagcgctggcaccgtgccctggctgcagggcctcatctgcaatgtgaacaacacctgcttcccccagctgaccccaggagaggagcccggccgcctgagcaacttcaatgacagcctggtgtcccggctgctggctgatgccaggacagtgctgggcggggccagcgcccacaggaccctggccggcctgggcaagctgattgccaccctgcgggccgcccggagcacagcccagccccagcccaccaagcagagccccctggagccccccatgctggatgtggccgagctgctgaccagcctgctgaggacagagagcctgggcctggccctgggccaggcccaggagcccctgcacagcctgctggaggccgctgaggacctggcccaggagctgctggccctgcggagcctggtggagctgcgggccctgctgcagaggccccggggcaccagcggccccctggagctgctgtctgaggccctgtgcagcgtgcggggccccagcagcacagtgggccccagcctgaactggtatgaggccagtgacctgatggagctggtgggccaggagcctgagagcgccctgcctgacagcagcctgagccctgcctgcagcgagctgattggagccctggacagccaccccctgagccggctgctgtggaggcggctgaagcccctcatcctgggcaagctgctgtttgccccagacacccccttcaccaggaagctgatggcccaggtgaacagaacatttgaggagctgaccctgctgagagatgtgcgggaggtgtgggagatgctgggcccccgcatcttcaccttcatgaatgacagcagcaatgtggccatgctgcagaggctgctgcagatgcaggatgagggccggcggcagcccaggcctgggggccgggaccacatggaggccctgcgctccttcctggaccccggcagcggcggctacagctggcaggatgcccatgctgatgtgggccacctggtgggcaccctgggccgggtgacagaatgtctgagcctggacaagctggaggccgcccccagcgaggccgccctggtgtcccgggccctgcagctgctggccgagcaccgcttctgggccggcgtggtgttcctgggccctgaggacagcagtgaccccacagagcaccccaccccagacctgggccctggccacgtgcgcatcaagatccgcatggacattgatgtggtgaccaggaccaacaagatccgggaccgcttctgggaccccggccctgctgctgaccccctgacagacctgcgctacgtgtggggcggctttgtgtacctgcaggacctggtggagagagctgctgtgcgggtgctgagcggggccaaccccagggctggcctgtacctgcagcagatgccctacccctgctacgtggatgatgtgttcctgcgggtgctgagccgcagcctgcccctcttcctgaccctggcctggatctacagcgtgaccctgactgtgaaggctgtggtgcgggagaaggagacccggctgcgggacaccatgagggccatgggcctgagcagagctgtgctgtggctgggctggttcctgagctgcctgggccccttcctgctgtctgctgccctgctggtgctggtgctgaagctgggggacatcctgccctacagccaccctggggtggtgttcctgttcctggccgcctttgctgtggccaccgtgacccagagcttcctgctgagcgccttcttcagccgggccaacctggccgccgcctgtggcggcctggcctacttcagcctgtacctgccctacgtgctgtgtgtggcctggagggaccggctgcctgctgggggccgggtggccgccagcctgctgagccctgtggcctttggatttggctgtgagagcctggccctgctggaggagcagggcgagggcgcccagtggcacaacgtgggcacccggcccacagcagatgtgttcagcctggcccaggtgtctggcctgctgctgctggatgctgccctgtatggcctggccacctggtacctggaggccgtgtgccccggccagtatggcatccctgagccctggaacttccccttccgccgcagctactggtgtggccccaggcctcccaagagccctgccccctgccccacccccctggaccccaaggtgctggtggaggaggcccctcctggcctgagccctggggtgtctgtgcgcagcctggagaagcgcttccctggcagcccccagcctgccctgcggggcctgagcctggacttctaccagggccacatcacagccttcctgggccacaatggagctgggaagaccaccaccctgagcatcctgagcggcctcttccccccatctgggggcagcgccttcatcctgggccatgatgtgcgcagctccatggccgccatccggccccacctgggcgtgtgcccccagtacaacgtgctgtttgacatgctgactgtggatgaacatgtgtggttctacggccgcctgaagggcctgtctgctgctgtggtgggccctgagcaggaccggctgctgcaggatgtgggcctggtgtccaagcagagcgtgcagaccaggcacctgagcggcggcatgcagaggaagctgtctgtggccatcgcctttgtgggcggcagccaggtggtgatcctggatgagcccacagctggggtggaccctgccagcagaagaggcatctgggagctgctgctgaagtaccgggagggccgcaccctcatcctgagcacccaccacctggatgaagctgagctgctgggggacagagtggccgtggtggccggcggccgcctgtgctgctgcggcagccccctcttcctgcggcggcacctgggcagcggctactacctgaccctggtgaaggcccggctgcccctgaccaccaatgagaaggctgacacagacatggagggctctgtggacacccggcaggagaagaagaatggcagccagggcagccgggtgggcaccccccagctgctggccctggtgcagcactgggtgcctggggcccggctggtggaggagctgccccatgagctggtgctggtgctgccctacaccggggcccatgatggcagctttgccaccctcttccgggagctggacacccggctggccgagctgcggctgaccggctacggcatcagtgacaccagcctggaggagatcttcctgaaggtggtggaggagtgtgccgctgacacagacatggaggatggcagctgtggccagcacctgtgcacaggaattgctggcctggatgtgaccctgcggctgaagatgccaccccaggagacagccctggagaatggagagcctgctggcagcgcccctgagacagaccagggcagcggcccagatgctgtgggccgggtgcagggctgggccctgacccggcagcagctgcaggccctgctgctgaagcgcttcctgctggcccggcgcagccggcggggcctgtttgcccagatcgtgctgcctgccctgtttgtgggcctggccctggtgttcagcctgattgtgcccccatttggccactacccagccctgcggctgagccccaccatgtacggggcccaggtgtccttcttctctgaagatgcccctggggaccccggccgggcccggctgctggaggccctgctgcaggaggccggcctggaggagccccctgtgcagcacagcagccaccgcttcagcgcccctgaggtgcctgctgaggtggccaaggtgctggccagcggcaactggaccccagagagccccagccctgcctgccagtgcagcaggcctggggcccggcggctgctgcctgactgcccagctgctgctgggggccccccaccaccccaggccgtgactggaagtggagaggtggtgcagaacctgactggaagaaacctgagtgacttcctggtgaagacctacccccggctggtgcggcagggcctgaagaccaagaagtgggtgaatgaggtgcgctatggaggcttcagcctgggcggccgggaccccggcctgcccagcggccaggagctgggccgctctgtggaggagctgtgggccctgctgagccccctgcctggaggagccctggacagagtgctgaagaacctgacagcctgggcccacagcctggatgcccaggacagcctgaagatctggttcaacaacaagggctggcacagcatggtggcctttgtgaacagagccagcaatgccatcctgcgggcccacctgcccccaggccctgcccggcatgcccacagcatcaccaccctgaaccaccccctgaacctgaccaaggagcagctgtctgagggcgccctgatggccagctctgtggatgtgctggtgtccatctgtgtggtgtttgccatgagctttgtgcctgccagcttcaccctggtgctgattgaggagcgggtgacccgggccaagcacctgcagctgatgggcggcctgagccccaccctgtactggctgggcaacttcctgtgggacatgtgcaactacctggtgcctgcctgcatcgtggtgctgatcttcctggccttccagcagagggcctacgtggccccagccaacctgcctgccctgctgctgctgctgctgctgtatggctggagcatcacccccctgatgtacccagccagcttcttcttctctgtgcccagcacagcctacgtggtgctgacctgcatcaacctcttcatcggcatcaatggctccatggccacctttgtgctggagctgttcagtgaccagaagctgcaggaggtgagccgcatcctgaagcaggtgttcctgatcttcccccacttctgcctgggccggggcctgattgacatggtgaggaaccaggccatggctgatgcctttgagcggctgggggaccggcagttccagagccccctgcgctgggaggtggtgggcaagaacctgctggccatggtgatccagggccccctcttcctgctcttcaccctgctgctgcagcacaggagccagctgctgccccagccccgggtgcgcagcctgcccctgctgggggaggaggatgaagatgtggcccgggagcgggagcgggtggtgcagggcgccacccagggagatgtgctggtgctgaggaacctgaccaaggtgtaccggggccagaggatgcctgctgtggaccggctgtgcctgggcatccccccaggagaatgttttggcctgctgggcgtgaatggagctgggaagaccagcaccttcaggatggtgactggagacaccctggccagcagaggagaggccgtgctggccggccacagcgtggcccgggagcccagcgctgcccacctgtccatgggctactgcccccagagtgatgccatctttgagctgctgaccggccgggagcacctggagctgctggcccggctgcggggcgtgcctgaggcccaggtggcccagacagctggcagcggcctggcccggctgggcctgtcctggtatgctgacaggcctgctggcacctacagcggcggcaacaagaggaagctggccacagccctggccctggtgggggaccctgctgtggtgttcctggatgagcccaccaccggcatggaccccagcgcccggcgcttcctgtggaacagcctgctggccgtggtgcgggagggccgctctgtgatgctgaccagccacagcatggaggagtgtgaggccctgtgcagccggctggccatcatggtgaatggccgcttccgctgcctgggcagcccccagcacctgaagggccgctttgctgctggccacaccctgaccctgcgggtgcctgctgcccggagccagcctgctgctgcctttgtggccgctgagttccctggagctgagctgcgggaggcccatggaggccgcctgcgcttccagctgcccccaggcggccgctgtgccctggcccgggtgtttggagagctggccgtgcatggagctgagcacggcgtggaggacttctctgtgtcccagaccatgctggaggaggtgttcctgtacttcagcaaggaccagggcaaggatgaggacacagaggagcagaaggaggccggcgtgggcgtggaccctgcccctggcctgcagcaccccaagagggtgtcccagttcctggatgaccccagcacagctgagaccgtgctgtag

SEQ ID NO: 201767 - DNA, 6441 bp, Artificial Sequence
  derived and/or modified sequence
atggccttctggacccagctgatgctgctgctgtggaagaacttcatgtacaggcgccgccaacctgtgcaattgttggtggaactgttgtggcctctgttcctctttttcattcttgtggcagtgcgacatagccatcccccccttgaacatcacgagtgccactttcccaacaagccgctgccttcagctggaacagtgccatggctccaggggttgatctgcaacgtcaataatacatgctttccccaactgactccgggggaagagccaggtcggctttcaaatttcaatgattctcttgttagccggctgctggccgatgctagaaccgtgctcgggggggcttctgcccatcgcacacttgcgggactgggcaaactgattgcgaccctgagagcagcacggtcgactgcccagcctcagcctacaaagcagagtcctctggagcccccaatgctcgatgttgctgaactcctgacctccttactccgcaccgaatccctcgggctggctttgggacaggcgcaagagcctctccacagcctgttggaggccgctgaggaccttgcgcaagagctgttggccctgcggtctctcgtggagctgagggccctcttacagagaccacgggggacatctggccccctggagctcctgtcagaagctctgtgtagtgtgagagggccttccagcaccgttggcccttcccttaattggtatgaggcctcagaccttatggagctggtgggacaggaacccgagtccgctctaccagacagtagcctatcacccgcgtgctcagagctcatcggcgctttggacagtcatcctcttagcaggttgttatggaggaggctgaagcccttaatcttggggaagttactgttcgccccagacactccattcactcgtaaacttatggcccaggtgaatcgcacattcgaagagctgactctcctgcgggacgtccgagaggtgtgggagatgctcgggccacgtatctttacattcatgaacgacagctccaacgtggccatgctgcaaaggctactacaaatgcaggatgaaggcagaagacagccacggcctgggggccgcgatcatatggaagctctgaggagcttcctggaccccggcagcgggggctattcatggcaggatgcacatgctgacgttggtcacttagtcggtaccctggggagagtaacagagtgcctgtcccttgataagctcgaggctgcccctagcgaggccgcccttgttagcagagctctgcaacttctggcggagcacaggttttgggcaggcgtcgtttttttaggaccagaggactccagcgatcccactgaacacccgacaccagacctcgggccaggccacgtgcggatcaagatacgcatggacatagatgttgtgacccggacaaataaaatcagagatcgattctgggaccctgggcccgcagctgacccacttaccgacctcagatatgtctggggaggttttgtttacttgcaggacctggtggagagggccgcggtgagagtcttgagcggggctaatcccagggcaggcctgtacctccaacagatgccgtacccttgttatgtggatgatgtttttctcagagtgcttagccggtctttgccactgtttcttacactggcttggatatattccgtgaccttaacggttaaagctgttgtcagggagaaagagacccgactcagggacacgatgagagcaatgggtctctcccgcgcggtactgtggctcggatggtttctctcctgtctgggcccatttctgctgtctgcagcgctgcttgtgctagtgcttaaactgggcgatattctgccctacagccaccccggagtggtgtttctcttcttggccgcgttcgcggtggctactgttacacagagctttcttctaagcgcctttttttcccgggccaatttggccgccgcctgcggcgggttagcctacttctcgctctatctcccgtatgtcctatgtgtggcttggcgggacaggttgccggccggcggtcgggtcgctgctagcctgctgtcaccggtggcgtttgggttcgggtgtgagtcactggccttgctggaagagcagggagagggggcccagtggcataatgtagggacaagacctacagccgatgtgttcagcctggcccaggtgtcaggcctcttactgctggacgctgccctgtatggactcgccacatggtatttggaggctgtttgccctgggcaatacggaatacctgaaccatggaactttccgtttaggcgaagttattggtgtggaccacggcctcccaagtctcccgccccatgcccaactcctctcgatccaaaagtgttggttgaggaagcccccccaggcctgagccccggggttagcgtgagaagtctggagaaaaggttcccggggtctccgcaaccagcattgagggggctgagtctggacttttatcagggtcatatcacagccttcctgggtcataatggtgcagggaaaacaactacgctttccatcctctccggactgtttccgcccagcgggggaagcgccttcatcctgggtcatgatgtaaggtcatccatggccgccattaggcctcaccttggcgtgtgccctcaatacaacgtattattcgacatgctaacagtggacgagcatgtctggttttacggacgccttaaaggattaagcgccgcggttgtggggcctgaacaggatagactgttacaggatgtggggctcgtgtctaaacagtccgtgcaaacgagacacctgagcggtggcatgcagagaaagctgagtgtggcgatcgcattcgtcgggggatctcaggtcgtaattcttgatgagccaaccgccggcgtggaccctgcctccaggcgtggaatttgggaactgctgctgaagtacagggagggacgtacactgatcctgagtacccaccaccttgatgaagctgagctattgggagaccgagtcgcagtggtagccggcggccgcctttgctgttgcggcagcccactgtttttgagacgacacctgggttccggttactaccttaccctcgtgaaggccagactgccacttacaactaatgagaaagccgacacagacatggaaggctctgtggacacccgacaggagaaaaaaaatggatcgcagggcagtcgtgtgggtactccacagttattagctctggtgcagcactgggttccgggcgcccgactcgtggaggagttgccccacgaactggtactcgttctcccatacaccggggcacatgatgggagcttcgccacacttttccgtgaactcgacacccggcttgccgaactacggcttacaggatatgggatctcggatacgagcctggaagagatctttctgaaagtggttgaggaatgcgctgccgacacggatatggaagatggctcttgcggacagcatctgtgcaccgggatcgcagggctggatgtaacattgcgattgaaaatgccgccccaagagacagccttagagaacggggaacctgctgggtctgccccagagacagatcaaggcagcgggcctgatgctgtcggacgcgtgcaggggtgggctctgactaggcagcagttacaagccctgttgctcaaaagatttctcctggcgcgccgctcccggcggggcctgttcgcccagatcgtgctgccagccctgtttgtcggcctcgccctggtgttctctctgattgttcccccatttggccactatcccgctcttcgactcagcccaacaatgtacggcgcccaagttagctttttttcagaggatgcacctggggatcccggaagggcccgcttgctcgaagccttactccaagaagctgggctggaggaaccgcccgtccagcactctagtcaccggttcagcgcacctgaagtgcccgccgaggttgcaaaagtgctggcctcgggcaactggacacctgaatcaccgagccccgcatgtcaatgtagtaggccaggagccaggcggctgttgcccgactgcccagcagccgccggcggtccaccgccccctcaggctgtgacaggcagtggcgaggttgtgcagaacctgacaggtcggaatctaagcgattttttggtaaagacctatccacgactggtccggcagggactgaaaaccaaaaagtgggtgaatgaggtccgatacggggggttcagcctaggagggcgcgatcctggactgccttctggtcaggagctcggccggagcgtggaagagctgtgggctctgcttagccccctgcccggcggtgcactggatagagtacttaagaatctgacagcctgggctcacagtctggacgcccaagattccctgaaaatctggttcaataacaagggttggcattctatggtggccttcgtaaaccgggcatccaacgccatcctgagggcacacctgcctcctggtcctgcacggcatgctcactccatcactacactcaatcaccctctaaacttaacaaaggagcagctgtcggagggagccctgatggccagcagcgttgatgtcctcgtaagcatatgcgtggtgtttgctatgtctttcgtgccagctagttttacactcgttctcatcgaggaacgggtgacacgcgccaaacacctgcagttaatgggtgggctgagcccaaccctctattggttaggcaatttcctctgggatatgtgtaattacctcgtgcccgcttgtatcgtggtcctcatcttcctggcttttcagcagcgagcctacgttgcaccagctaacctgccagcccttctgctgcttttactgctgtacggatggtcgatcacccctctaatgtaccccgccagctttttcttttcagtcccttccacagcatacgtcgtgctcacctgcatcaacctgttcatcgggatcaacggatccatggccacatttgtgctggagcttttctccgatcagaaactccaggaggtctctcggatcctcaaacaggtttttcttattttcccccacttctgcctcggcagggggttgatagacatggtgagaaatcaggctatggcagacgccttcgagcgtttgggtgatagacaattccagtcacctctgcgatgggaggtggtgggaaagaatttactggccatggtcatacaagggcccttattcctcctttttactctgttactgcagcaccgatcccagctgttgccacagcctcgggtgcggagcctgccactcctgggggaggaggatgaggatgtcgctagggaaagggagagagtcgtccagggtgctacccagggggatgtgctggtgctgcgcaatctcacaaaggtgtatcggggtcaaagaatgcccgccgtagataggctctgccttggaataccccctggggagtgctttggccttctgggggtgaatggggctgggaagaccagcacttttcgcatggttactggggatacactagccagccggggagaagcagtgctcgcggggcattcggtggctcgagaaccatcagctgcccacctcagcatggggtactgtccccagagcgacgcaatttttgagctgctaaccgggcgggagcatttggaacttctcgcccgcctgcggggggtaccggaggcacaagtggcgcaaacagccggaagcggcttggcccgcctcgggttgagctggtatgctgatagacctgcgggtacctactcaggaggaaataaacgcaagctcgccaccgcactcgccctggtgggggatcccgccgtagtcttcttggacgaaccaacaacgggaatggaccctagtgcaagaaggttcctgtggaattcactgctggccgtcgtcagggaagggcgatcagtgatgctgactagccatagcatggaggagtgtgaggctctttgttctcgtctagctatcatggtgaatggcaggttcagatgtctgggtagtcctcagcatttaaaaggacgattcgccgcgggacatacgctgaccctgagggtgcctgcagccaggtctcaacctgccgctgccttcgttgccgccgagttcccaggggctgaactgcgggaagcgcacggcggtagacttaggtttcagttgccccccggtggcagatgcgctctcgcccgggtgttcggcgagctcgccgtgcacggtgcggagcacggcgtggaagacttctcagtcagccagaccatgctggaagaggtttttctgtatttctctaaggaccagggtaaagatgaagacactgaggagcagaaggaggctggggttggggtggaccccgctcccggtctgcagcaccccaagagagtcagccagttcctggatgacccatcaactgcggaaactgtcctttag

SEQ ID NO: 201768 - DNA, 6441 bp, Artificial Sequence
  derived and/or modified sequence
atggccttctggacccagctgatgctgctgctgtggaagaacttcatgtatcgcaggcgccagccggtccagcttctggtggagctgctctggcctttgttcttatttttcatcctggtcgctgtgcggcactcacacccacccctcgaacaccacgaatgtcattttcctaataagcctttgccctcagcaggcacagtgccttggcttcaaggtctgatatgcaatgtgaataacacctgctttccgcagctgactcctggcgaagagccaggtcgcctgagtaacttcaacgattccctggtgtcgcggctactggccgatgccagaaccgttctgggcggagctagtgcacaccgtactctcgcaggactgggaaaactgatcgccacactgcgggcagcgcgcagtaccgcgcagccacaacccacaaaacagtcaccacttgagccccctatgctcgatgtcgcagagctgcttacaagtctgttgagaactgagagcctcggtttggccctggggcaagcccaagaacccctacatagcctgctggaggccgcagaagatttagcccaggagcttcttgccctgcggtccctcgtggaattgagagccctgctgcagcggccgcgggggactagtggcccccttgagctgctgtcagaggccctgtgctctgttcgggggccctcttcaaccgtgggaccatctctgaattggtacgaggcttccgatttgatggaactggttggccaggaacccgaaagcgcattgcctgatagctccctaagccctgcatgcagcgaactgatcggagcattggacagtcacccgctgtcgagactgctctggcggcggttgaaacctcttatattgggcaagctcctgttcgcccccgatacaccattcacacgtaagctgatggcacaggtaaatagaacattcgaggagctgaccttgctccgggatgtgagggaggtctgggagatgctcggaccgcgcatattcacattcatgaacgattcttcaaacgtcgcaatgctccagcgactacttcagatgcaagatgaagggaggagacagcccagaccaggcgggagggaccatatggaagcacttagaagctttctcgaccccggcagcggaggatattcttggcaggatgcccacgccgatgtgggccatcttgtgggaaccctcgggcgtgtgacagaatgtctatccctggataaacttgaggcggcaccctccgaagctgcactggtgtccagagccctgcagctgctggccgagcatcgcttttgggcaggagtggtattcctcggtcctgaagattcctcagatcccactgagcatcccacacctgaccttgggcctggccacgtgcgcatcaagatccgcatggacattgatgtggtcactaggacgaataaaatccgggaccgcttctgggatcccggacccgctgctgaccctttaactgatctccgatatgtgtggggagggtttgtttacctccaggacctggtagagagagccgctgtgcgagtgctcagcggagctaaccctagggcaggcctatatctgcagcagatgccttacccatgttacgtggatgacgtctttctccgcgtgctgagcaggagtcttcctctgtttcttacactcgcgtggatttatagtgtgactctgacagtgaaagctgtcgtcagagagaaggaaacccgtctgcgggatacgatgcgagccatggggcttagccgagccgtcctctggcttgggtggttcctatcctgtctgggccccttcctcttaagtgcagctcttctggtcttagtcctgaagttgggagacatcctgccttattcccacccaggagtcgtctttctgttcttggccgccttcgctgtggcaacagttactcagagttttctcctaagcgcgttcttcagccgagccaaccttgccgcggcctgcggtggacttgcatatttctcactgtacctcccatacgtgctctgcgtcgcctggagggatcgacttcctgccggaggacgtgtcgcagcctctctcctgtcgccggtcgcgtttgggtttggctgtgagtccctggcgctgctcgaggaacaaggcgagggggcacagtggcacaatgtcggcactcgcccgactgccgacgtctttagtctagcgcaggtgtccgggctcctgctcctggatgcagccctgtacggattggcgacctggtacctggaagcggtgtgtcctggtcaatacggtatcccagagccttggaatttccctttccgtcggtcatactggtgcggaccacgacccccgaagagcccagccccctgtcccacccctttggatcctaaagttctggtggaagaggccccccccgggctttccccaggggtttctgttcgcagtctagagaagcgctttcctggcagtcctcaacctgcactgcgtgggctaagcttagacttctaccagggccacattactgcattccttgggcataatggcgctgggaagacaaccactctatctattctgagcggcctgttccccccctccggaggatccgccttcatattgggccacgatgttagatcctccatggccgccatcagaccgcatctgggggtctgcccccagtataacgtgctgtttgatatgcttaccgtcgacgaacatgtgtggttttacgggcgactaaagggcctatcagctgcagtcgtagggcccgagcaggacagacttcttcaggatgtcggactcgtgagtaaacagagcgtgcaaacacggcacctgtctgggggaatgcagagaaagctgtcagttgccatcgcattcgttggcggcagccaggtggtaattctagacgagcctacagccggagtggaccctgctagtcggcgaggcatttgggagcttctgcttaaataccgagagggacgaacgcttatcctgtcaactcatcatcttgacgaagctgagctgcttggtgatcgggttgcagttgtcgcgggcggcagactttgttgctgcggatctcccttatttctccggcgccacttaggctccggatattacctcactctggttaaagcgagactccctctgaccacaaacgaaaaagccgataccgatatggaaggatcagtggatactcggcaagaaaagaaaaacgggtctcagggcagccgcgtggggaccccccagctcttagctctggtccagcattgggtcccaggggcccgcctggtcgaggagctgcctcacgagttggttctcgtcctcccctatactggggcccatgatggctcgttcgcaacactgtttcgggagttagacacccgcctggccgagctacgtctgaccggatacgggatatctgacacatcactggaggaaatcttcctgaaagtggttgaggaatgtgcagccgatacagatatggaggatggttcctgcggccagcacctgtgtacaggaattgccgggctggatgtgacactccgccttaaaatgcccccacaagagacggctttggaaaatggggaaccagcgggctccgcccccgagaccgaccaggggagtggccccgacgccgtgggaagggtgcaaggatgggcgcttacccgacagcagctacaagcgctactgttgaagagattcctgctggctcgcagatcccgcagggggctttttgcccagattgtgctgccagccctgttcgttggattagctctggtgttttcacttatcgtgccgcctttcggccactaccctgctcttcgtctcagtccaacaatgtatggtgcccaggtttcatttttcagcgaggacgctccaggcgacccaggtcgagcccgcctgttagaagctttgctgcaggaagccggactggaggagccacctgttcagcactcatcacacagattctcagcacccgaagtcccagcagaggtcgccaaagtgctggcctcaggcaattggacgcccgagagtccctctccagcttgtcagtgctctagacccggggccagacgactcttacccgactgcccggccgctgcaggtggtccacctccgccccaagcggtgaccgggagcggcgaggtagtccagaaccttaccgggaggaatcttagtgattttctggtgaaaacctatccccgcctcgtgagacagggccttaaaactaaaaagtgggtgaacgaagttagatacggtggctttagccttggaggaagagaccctggcctgccgtccggacaggagctgggaaggtctgtggaggaattgtgggccctcctatcacctttgccgggaggcgccctcgatagggtcctgaaaaatctgacggcatgggctcatagcctggacgcacaggatagcctgaagatttggttcaacaataagggatggcactccatggtcgcgttcgtgaatcgagcctccaacgccatacttcgcgctcatcttccaccaggacctgccagacacgctcattcaattacgaccctgaaccaccccttaaacctgaccaaggaacagctgtcagagggggctctgatggcctcatccgtggacgtactggtgagcatctgtgtggtgttcgctatgagtttcgtgccggccagcttcactctcgtgctaatcgaggagcgggttacacgggcaaaacatctccagctcatgggagggcttagcccaacactttactggctagggaattttttatgggacatgtgcaattatctggtcccagcctgcatagtggtactgatttttttggcctttcagcaaagagcctatgttgcccctgcaaatctgccagcgctcctgctgctgctcctcttgtatggatggtctatcacccccctcatgtacccagcctctttttttttcagcgtgccttcaacggcttacgtggtgctcacatgtatcaatctgtttattgggattaatgggagtatggccactttcgtgctggagctgttttccgatcagaagttacaggaagttagcaggatcctgaagcaggtcttccttatctttccgcatttttgtctgggacggggattaatcgacatggttaggaaccaggccatggcagatgccttcgagcgcctaggggaccggcagttccagtctcccttacgctgggaagtcgtggggaaaaatttgctggcgatggtcatacagggacctttgtttctgcttttcactctgctcttgcaacatcggagccagcttcttccccagccccgggtccggagtttaccgctcctgggcgaggaagatgaagacgttgctcgggaaagagaacgcgtagtccagggcgctacccagggagacgtattagtactgagaaacctcaccaaagtataccgtggacagcggatgcctgctgtcgataggctgtgtttgggaattccccccggtgagtgctttggcttactgggggtgaatggagcaggcaaaacgagcacttttagaatggtgaccggcgacacactcgcgtcgcgcggggaggcggtacttgcaggccactccgttgctcgggaacctagcgccgcccatttgagcatgggttactgcccccagtcagacgccatcttcgagctcctgaccgggagggagcacctggaactactggcccgacttaggggagtccctgaagcccaggtagcccaaaccgcgggatctggtcttgccagactaggtttgtcgtggtatgccgatagacctgcaggaacctatagcggagggaacaagcgaaagctggctaccgcgctggccctggtaggggatcctgccgtggtgtttttggatgagcccacaactgggatggacccttctgcgagacgcttcctgtggaattccctgttggcagtggtgagggaagggagatctgtcatgctcacgtcacacagcatggaggagtgcgaggcattgtgctcacgactggcaattatggtgaacggaagattccgttgcctaggttctccacagcacttgaagggccggttcgcagcaggtcataccctgacattacgtgtgccagccgcccgcagtcagcctgccgccgcgttcgtagccgccgagtttcccggagcagagcttagagaagcccacggagggagactcagattccagctcccgccgggcggacgctgtgctctcgccagagtgttcggggagcttgcggtgcacggggcagaacacggagtcgaagacttttcggtctcccaaaccatgctggaggaggtctttctgtatttctcaaaggaccaggggaaggacgaagacactgaagagcagaaggaagccggcgtgggagtggatccggctcctgggttacagcaccctaagagagtaagccaattcctcgacgatcctagtactgcagagactgtgttatag

SEQ ID NO: 201769 - DNA, 6441 bp, Artificial Sequence
  derived and/or modified sequence
atggctttttggacacagctcatgctgttgctgtggaagaactttatgtatcgcagacgacagccagtccagctcttggttgaactgctgtggcctctgtttttgttcttcattctcgtcgccgtacgccacagccaccctcccctggaacatcacgagtgtcatttccccaacaaacctctcccatctgctggcacagtaccctggctccagggccttatatgcaacgtgaataatacgtgcttcccacagctcacccctggagaagagcccggtcgcctgtctaacttcaacgactctctagtatccagactcctggctgatgcaagaacggtgctgggcggagcttctgctcaccggacccttgctggcctggggaagctgattgccacactgagagcagccaggtctaccgcccagcctcagccaaccaagcagagcccccttgaaccgcctatgttggacgtagctgaactgttgacttcactacttagaactgaatctctgggccttgccctgggccaggctcaagagcctctgcactctctgctggaagctgcagaggatttagcccaggagctgctggcactgcggtctctggtggagttgcgggcattgctgcaaagacccagagggacaagtggcccactagagttattgtccgaggctctctgtagcgtcagggggcctagttccaccgtcgggcctagcctcaattggtatgaggctagcgacctcatggagctggttggccaggagccggagtctgctctgccagacagctccctgtcccccgcatgctccgagctgattggggctctggacagccatcccctgtccaggctgctttggcgacggcttaaaccccttatcctggggaagttgctgtttgcacccgatacaccatttacacggaaactgatggcacaggtgaacagaacgtttgaagagctgaccctcctccgcgacgtgcgagaggtgtgggagatgctgggcccacgcatttttacgtttatgaatgattcctctaacgttgcgatgctccagcgtttactgcaaatgcaggacgaagggcgacgtcagcctaggccgggtggtagggatcatatggaggcgctgaggtcattcctggatcctggatccggcggttatagctggcaggacgctcatgctgacgtgggacacctagtaggcactctcggtcgcgtgaccgagtgtctgagcttagacaagttggaagcagccccatccgaggcagcgcttgtgtccagagcattgcagctgctggccgaacaccggttttgggccggagttgtgttcttgggaccagaggatagcagcgatccaactgaacatcccacccctgacctgggccctggacatgtgaggattaaaatacggatggatatcgacgtagtgacacgtactaataagattcgcgatcgattttgggaccccggtccagctgccgaccctctgaccgacctgagatatgtttggggtggatttgtttatctgcaggaccttgtcgagcgcgctgcggtgcgcgtgctgagcggcgctaacccacgcgcaggactatacttgcagcagatgccatacccatgctatgtggatgacgtgtttctccgcgtgttgagccgcagcctgccgctattcttgacgctcgcttggatctattccgtcaccctgaccgtgaaggctgtggtgagggaaaaagagacaagacttcgggatactatgagagccatgggactgagccgggctgttttgtggctgggatggttcttgtcatgtctggggccttttctcctatcagccgctttgctcgtcctcgtcctgaaactcggtgacatccttccctacagccatcccggtgtcgtgttcctgttcctcgccgctttcgctgttgctaccgttactcaatcctttctcctgagcgccttcttttcccgggcaaatctggccgctgcttgtggaggcctggcctacttctccctgtacctgccttacgtcctgtgcgttgcttggagagaccgtctccccgctgggggtcgagtagccgcttccctcctaagccccgtggcctttgggtttggatgtgaaagcctcgccttactggaggagcaaggggagggggctcagtggcataatgtggggacgcgcccaacggcagatgtgtttagtctagctcaggtatcagggctcctgctgctggatgccgctctctacgggctggccacctggtatttagaagccgtctgtcctggccagtatgggatacctgagccatggaatttcccttttcgtaggtcgtactggtgcggacccagacccccaaaatcaccagcaccttgccctacccccctagatccgaaagtgctcgtcgaggaagctccgccaggcctctcaccaggagtgtccgtaaggagccttgaaaagcgtttccccggaagtccacagcccgctctgagaggactgtcactggacttttaccaaggacacattactgccttcctcggccataacggtgccggaaaaactacgactctaagtattctcagtggtctgttccccccatccgggggttccgcattcattctgggccatgatgtgcgctcatctatggccgcaatccgcccacacctgggagtatgtccacagtacaacgtcctgttcgacatgctgacagtggacgagcacgtatggttttacggccgacttaaggggctttcagccgcagtggttggacctgaacaagatagactgcttcaggatgttggattagtgagtaagcagtctgtgcagacccgtcacctctctggcggtatgcagaggaaattgtccgtcgcaattgcgttcgttggagggagccaagttgtcatacttgatgaaccgacggcgggtgtggatcccgcttctcgaagggggatctgggaattactcctgaagtatcgggaaggaagaacacttatcttgtctacacaccatctggacgaagcagagctgcttggcgatcgggtggcagtggtggctgggggaagactctgttgctgtggaagccccttattcttacgccgacacctggggagcggatattatttaaccttggtcaaggccaggctacccctgacaacaaacgagaaagcagatacagatatggaagggtcggtggacacaagacaggaaaagaagaacggatctcaggggtcaagagttggcaccccacagctccttgccctagttcagcactgggttcctggcgcacggcttgtggaggagcttccacacgagctggtcctggtgcttccttacactggagcacatgatggcagcttcgccacactatttcgagaattagacacccgactggcagagctgagactcaccggctacggcattagcgacacaagtctggaggagatcttcttgaaagtagtggaggaatgcgctgcagatactgatatggaagatggcagttgcggccaacatctgtgtaccggcatcgctgggttagatgttaccttgcggctgaaaatgcctcctcaggaaaccgctctggagaatggagagcccgcaggatccgctccagaaacagatcaggggtcaggcccagacgctgttggcagagttcagggctgggcccttaccagacagcagcttcaagccctgttgctcaaacggttcctgctagcgcgtcgaagcagaaggggactgtttgctcaaattgtactgcctgcactcttcgtggggctggccctcgttttcagcctgatcgtgccccctttcggccactaccctgcgctgagactgtcacccaccatgtatggggctcaagtctcattcttttcagaggacgccccaggtgatccgggtagagctcgtctgctggaggccttgctgcaggaagctggtctggaagagccccctgttcagcatagtagccatagattttccgcgcctgaagtccctgcagaagtggccaaagtgcttgcatcgggcaactggacgccagagagtccttctcccgcttgtcagtgtagtaggcctggagcccgtaggcttctccccgattgccccgctgcagcagggggacctcccccaccacaggctgtgactggcagcggcgaggtcgtccaaaatctcacgggccgtaacctgtccgatttcctggtaaaaacataccctcgactggttagacagggactcaagacaaaaaaatgggtgaatgaggttagatacggcggattttcactcgggggtcgcgaccccggacttccatccggccaagaacttggtcgctccgtagaggaactttgggccctactgtcccctctgcccggaggtgcactcgacagggttctcaagaatcttaccgcctgggcccatagtctggatgcacaggacagtctgaagatctggtttaacaacaaaggatggcactccatggtcgccttcgtaaatcgcgcaagcaatgccattcttagggctcacttgccacctggtcccgcaaggcatgcccacagcataacgactctcaaccatcccctgaatctgacgaaggagcagctcagtgaaggagctcttatggctagcagtgtcgacgtactggtgtctatctgcgttgtattcgccatgtctttcgtgccagcgtcctttacactggtgctcatcgaagaaagggtgacccgagccaagcatttgcagcttatgggcggactgtctcccacattgtattggttgggaaacttcctctgggatatgtgcaattacctcgtgccagcctgcatcgttgtgcttatctttctcgccttccagcagcgagcctatgtagctccagcaaaccttcctgcgcttctgttgttactcctgctctacgggtggagtatcactccactgatgtaccctgccagctttttcttctccgttccttctaccgcatacgtcgtgttaacctgcatcaatttgttcattggaatcaatgggtctatggccacgtttgtgctagaactgttttccgatcagaaactgcaagaagtatctcgaattctcaaacaagtgtttcttatatttccacacttttgcttaggaagaggactaattgatatggtccgcaatcaagccatggcagacgcgttcgagcggctgggagaccgccaatttcagtctcccctgagatgggaagtggtcgggaagaatctgctggccatggtgattcagggcccactgtttctgctcttcacactgttgctgcagcatcgctcacaattgctgccccagccgagagtgcgtagccttcccctccttggggaggaagacgaagatgttgcccgtgagagggagagggttgtacagggcgctactcaaggagatgtccttgtgcttaggaatctgaccaaggtttataggggtcaacgcatgcccgctgtggatagactttgtctgggaattcctccaggcgagtgtttcggtctgctaggggtgaacggagcaggcaaaacatctactttccgtatggtaacaggagatacgcttgcctcccggggagaagcggtgctggccggtcactctgtcgccagggagcctagcgccgctcacctgtccatgggctattgcccacaatccgacgctatctttgaactgcttacagggagggaacacctcgagctgttagctaggctgagaggcgtgccggaggctcaggtcgctcagaccgcaggctccggcctggccaggcttggactatcatggtatgccgacagaccagcaggcacatacagcggcggaaacaagaggaagcttgccacagccctggcactggtgggcgatcccgctgttgtctttttagacgaacccacaacgggaatggatccaagtgccaggcggttcctctggaactctcttctggcagttgtcagagagggcaggtccgtaatgctgacgtcccattccatggaggagtgcgaggctctctgctcacgactggctatcatggtgaatggccgttttaggtgcctcggtagtccacaacatttgaaggggaggttcgccgctgggcacacgctgactctgcgggtgcctgcggcaagaagccagcctgctgcggcattcgtggccgctgaattcccaggtgcggagctgcgtgaagcccatggtggacggctgcgatttcaactgcccccaggaggtcgttgtgctctggcccgagtttttggcgagttagcagtccacggggcagagcatggagtcgaagatttttcagtatctcaaaccatgctagaggaggtctttttatatttctctaaggatcaggggaaggacgaagatacggaggaacaaaaggaagctggtgtgggggtggatccagctcctgggctacaacatcctaagcgagtttctcagttcctggatgatccatcaacagcagagacagtactgtat

SEQ ID NO: 201770 - DNA, 6440 bp, Artificial Sequence
  derived and/or modified sequence
atggcattctggacccagctgatgctgctgctgtggaaaaactttatgtataggcgcagacaacccgtgcaactcttggtggagttgttatggcccttgtttctgttctttatactggttgccgtccgtcattcccaccccccactcgaacaccacgaatgccacttccctaacaagcctttgccttcagctgggactgtcccctggctccagggtctcatatgtaatgtgaacaatacatgttttccccagcttacgcccggagaggagccagggagactctctaatttcaacgacagcttggtcagtagactcttagcagatgccaggactgtcttggggggagcgtctgcacaccgaaccctggctggcttggggaaactcattgcaacactacgcgctgctagaagcaccgctcagcctcagcccaccaaacaaagccctttagagccacctatgctcgatgtggccgagctgctgacatctctgctgcggaccgaaagcctggggttggccttaggacaggcacaggaacctcttcactctctccttgaggccgctgaggatctcgcccaggaactgctggcactcagaagcctggtggaactgagggcccttctgcagagacccaggggcacaagtggacccttggaactgctgagcgaggccctctgttctgttcggggacccagcagcaccgttggaccaagcttgaactggtatgaagcttctgaccttatggaacttgtgggacaggagccggagtcagctttgcccgatagctcgctgtcccctgcatgctccgaattgatcggagcacttgactcccaccctctatcgagactcctatggagacgtttaaagccgttgattctgggtaagcttctttttgcacctgacacgcctttcactaggaaattgatggcgcaggtcaatcgtaccttcgaggaactgacacttctgagggatgtcagggaggtttgggaaatgctcggtcccagaatctttacatttatgaacgattcctccaatgtggcaatgcttcagcggctgctacagatgcaggacgaaggcaggcgtcagccacgtcctggcggaagggatcacatggaggccctgaggtcttttctcgacccaggctcagggggatattcctggcaggatgcccacgctgacgtggggcatctcgtgggcacgctcggcagagtgaccgagtgcctgtctctggacaagctggaagccgctccgtcagaagcggctctagtctcgcgcgcactgcagctgctagccgaacaccgattctgggctggcgtggtgtttctagggccagaggacagcagtgacccaacagagcatccaaccccagatctgggtcccggacacgtacggatcaaaattcgtatggacatcgacgtggtgacccgcaccaacaaaattagagaccgattctgggatccgggtcctgcggcagacccattaaccgatctgaggtacgtatggggcggatttgtgtacctgcaagacctggtagagcgcgctgctgtgagagtgttatcaggcgcaaatccccgagctggcctctacctccagcagatgccttatccctgctacgttgatgacgtgttcctgagggtgctgtccagatcccttccattgtttctgacgctggcctggatttactccgtgaccctgacagtgaaagccgtggtgcgtgagaaggagactcggctccgggacactatgcgagcgatgggcttgtccagggctgtcttatggctgggctggttcttgtcatgtcttggaccatttcttctttcagcggctttgctggtcctggtgctgaagctgggcgacatactgccctacagccaccctggggtagtctttctattcttggccgcttttgcagtggcaactgtgacacagagtttcttgcttagtgcctttttttcccgcgctaacctcgccgcagcgtgtggcggactcgcctacttctcactctacctgccgtatgtcctttgcgttgcctggcgagacaggcttccagctggcggacgggtcgccgcttccctactgagccccgtggcttttggcttcggctgtgagagcctggctctgctggaggagcagggggagggcgctcagtggcataacgttggtactagaccaaccgctgatgtatttagtttggcccaggtgagtggcctgttactgctggacgcagcactgtacggactggccacctggtacctggaggcggtgtgcccgggacagtatggcatccccgagccctggaacttccctttccggcgatcgtattggtgcggcccaaggcccccaaaatccccggcaccctgcccgaccccactagacccaaaagtgttagttgaagaggccccaccgggactctcccctggcgtttccgtgcgcagcttagagaaacgatttcccggatctcctcaaccagccctcagggggttatcactagatttttatcaaggacacatcactgcctttctcgggcacaacggagctggcaagaccactacactgtctatactctctggtttgtttcctccctcagggggatcagcctttattttaggccatgatgtgaggtcgtccatggcagcaattagaccccacctaggggtatgccctcagtataacgtcctgtttgacatgctgacagtggatgagcatgtctggttctatggcaggctgaaaggattgagcgcagccgtggtcggcccagaacaagaccggctgttgcaggacgtagggcttgtatctaaacaatcagttcagaccagacacctgtctggtggtatgcagagaaaactgtcagtcgccattgcattcgtggggggttctcaagtcgttattctcgacgagcccaccgcgggagtggatccagccagcaggaggggcatttgggagttgctgttaaagtatcgtgaagggagaacacttatcctgagcactcatcacctcgatgaagctgagctccttggcgaccgggtggctgtggtggccggtggtcgtctatgttgctgcggttctccgctgtttctgcgcaggcatcttgggagtggctactatctcaccctggtaaaagctaggcttcctctgacaactaatgagaaagctgataccgacatggaggggtctgttgacacccggcaggaaaagaagaatggctcccagggctccagggtgggtacgcctcagttactggcactagtccaacactgggtgcccggagcacgcctcgtggaggaacttccacatgaactggtactcgtgcttccatatactggagcgcatgatggatcttttgccacactgttccgggaactggacactcgcctggcggagctccgcctgactggatacggcatcagcgacacttccctggaggaaatattcctcaaagtggtggaagaatgcgcagccgacaccgacatggaagacggctcatgtgggcagcacctctgcaccggaattgcgggtctggatgtgaccctgcggttgaaaatgccccctcaggaaacagctcttgaaaacggagaaccagccggttccgcgcctgagaccgatcagggttcagggccagatgcagtgggtagagtgcaggggtgggcactcacgcgacaacagctgcaggctcttctcctaaagcgctttctgctcgccagacgcagtcgtagaggtctgtttgcccagatcgttcttcctgcactctttgtgggtctcgctttggtcttcagcttaattgtgcctccattcgggcattaccctgcgttacgcttgtcccctacaatgtatggggctcaggtgtcgttcttttccgaggacgccccaggtgatccgggtagagccaggctcctggaagccttgctccaggaggccggtcttgaggaaccaccggtgcaacacagctcccataggttttctgcacctgaagtgccagccgaggtggccaaagttctggcatctggaaattggacccccgagtcgccttccccagcttgccagtgttctagaccaggggctcggagactcctccccgattgtcccgcagctgccggagggcctccacctccccaggccgtgaccggttcgggagaggtagtccagaacttaactgggagaaacttgtcagactttttggtgaaaacataccctagactggtgagacaagggctcaagacaaaaaagtgggtgaacgaggtgagatacgggggattcagcctggggggtcgggatcccggtctgccttcgggacaggaactggggaggagcgtagaagagttgtgggctcttcttagccccttacctggtggggctctggaccgggtgctcaaaaaccttactgcttgggcgcactccctggacgcacaggacagcctgaagatttggtttaacaataaaggatggcacagcatggttgcattcgtgaatcgcgcatccaacgcaatcctccgggctcacctccctcctggcccagctcggcacgcccactcaattaccacactgaaccaccccctgaacctgactaaagaacagctgagcgagggcgctttgatggcctcttccgtggatgtccttgtatcgatctgcgtggtcttcgcaatgagtttcgttcctgcctcctttaccctggtattgatagaagagagagtcacaagagcgaaacacttgcaactgatgggcggactttccccaacattgtactggttgggaaactttctgtgggatatgtgcaactacctggtgcccgcttgtatagtcgttttgatttttctggctttccagcagagggcctatgtagcgccagccaatttacctgctctcctgctgttactgttgctgtacggctggagcatcacgccactgatgtaccctgccagcttcttcttcagcgttccgtccaccgcctatgtagtactgacatgtatcaacttattcatcgggataaacggtagcatggctaccttcgtgttggaacttttctcagatcagaaattacaggaggtatcccgtatcctgaagcaggtctttcttatcttcccccacttttgtctgggtcgcggtttgattgatatggtgaggaatcaggctatggccgacgcctttgagaggcttggcgacagacagttccagtccccattaaggtgggaagtggtaggtaagaatctgctggccatggttattcagggcccactattcctcctctttactctgctgttacaacaccgatcccagctcctcccccagccacgagtgcgaagtctgccactgctaggagaggaagatgaagacgttgcgagggagagagagagggtcgtgcagggggcaacccagggcgacgtcctggtgctgcggaaccttacaaaagtgtaccgagggcagagaatgcccgctgttgatcggctgtgccttggcattcctcccggtgaatgtttcgggcttctaggagtcaacggagcaggcaagacgagtaccttccgaatggtgacaggcgatacgctggccagcaggggagaggctgtcctcgcagggcattccgttgccagagagcctagcgccgctcatctttcaatgggttactgtccccagtctgacgccatatttgagctgctcactggaagggaacacttagaactgttagcaagactgaggggcgttccagaggcccaggtcgcccagacagcaggcagcggcctggccaggcttggcctcagctggtacgccgaccgcccagccggtacatactcaggcggtaacaaacgaaagctggccacagcactggcattagtcggggacccggcagtcgtctttctggacgagcccaccacagggatggatccgtcagccaggagatttctctggaactcactgcttgcggtggttagagagggcaggtccgtcatgttaacgtctcacagcatggaagaatgcgaggccctatgctcccggctggccataatggtcaacggtcgctttagatgcctaggctccccacagcatctgaagggcaggttcgccgcaggtcacacattgacacttcgcgtccctgccgctcggagtcagcctgcagcagcatttgtcgcagcagagttcccaggagctgaactgcgtgaagcacacgggggacgccttcggtttcagttgccccctggcggacggtgcgccctagccagggttttcggagagctcgctgtgcatggtgcggagcacggggtggaggacttttccgtgagccaaacaatgctggaagaagtttttctctatttcagtaaggaccagggaaaggacgaggacacagaagaacaaaaggaggctggggtgggggttgatcccgctcctggcctccaacaccctaaaagggtatcccagttcttggacgacccctcaactgcagagaccgtgttata

SEQ ID NO: 201771 - DNA, 6816 bp, Artificial Sequence
  derived and/or modified sequence
gggcaagctcagcgcacttggcttaaggggcggcgcgctccctgcctgctgctgggcggagggaaggcggcaagagctgcggagcccctggaagagcttccaggaaccctgcgctgtgggataaaggaatgaggttcagaaaggggcagggagttgcccgcagccgcaccgcacgtcttcagcccgaccgttgtcctgacctctctgtcccgtcccctgcccagtctcaccatggccttctggacacagctgatgctgctgctctggaagaatttcatgtatcgccggagacagccggtccagctcctggtcgaattgctgtggcctctcttcctcttcttcatcctggtggctgttcgccactcccacccgcccctggagcaccatgaatgccacttcccaaacaagccactgccatcggcgggcaccgtgccctggctccagggtctcatctgtaatgtgaacaacacctgctttccgcagctgacaccgggcgaggagcccgggcgcctgagcaacttcaacgactccctggtctcccggctgctagccgatgcccgcactgtgctgggaggggccagtgcccacaggacgctggctggcctagggaagctgatcgccacgctgagggctgcacgcagcacggcccagcctcaaccaaccaagcagtctccactggaaccacccatgctggatgtcgcggagctgctgacgtcactgctgcgcacggaatccctggggttggcactgggccaagcccaggagcccttgcacagcttgttggaggccgctgaggacctggcccaggagctcctggcgctgcgcagcctggtggagcttcgggcactgctgcagagaccccgagggaccagcggccccctggagttgctgtcagaggccctctgcagtgtcaggggacctagcagcacagtgggcccctccctcaactggtacgaggctagtgacctgatggagctggtggggcaggagccagaatccgccctgccagacagcagcctgagccccgcctgctcggagctgattggagccctggacagccacccgctgtcccgcctgctctggagacgcctgaagcctctgatcctcgggaagctactctttgcaccagatacaccttttacccggaagctcatggcccaggtgaaccggaccttcgaggagctcaccctgctgagggatgtccgggaggtgtgggagatgctgggaccccggatcttcaccttcatgaacgacagttccaatgtggccatgctgcagcggctcctgcagatgcaggatgaaggaagaaggcagcccagacctggaggccgggaccacatggaggccctgcgatcctttctggaccctgggagcggtggctacagctggcaggacgcacacgctgatgtggggcacctggtgggcacgctgggccgagtgacggagtgcctgtccttggacaagctggaggcggcaccctcagaggcagccctggtgtcgcgggccctgcaactgctcgcggaacatcgattctgggccggcgtcgtcttcttgggacctgaggactcttcagaccccacagagcacccaaccccagacctgggccccggccacgtgcgcatcaaaatccgcatggacattgacgtggtcacgaggaccaataagatcagggacaggttttgggaccctggcccagccgcggaccccctgaccgacctgcgctacgtgtggggcggcttcgtgtacctgcaagacctggtggagcgtgcagccgtccgcgtgctcagcggcgccaacccccgggccggcctctacctgcagcagatgccctatccgtgctatgtggacgacgtgttcctgcgtgtgctgagccggtcgctgccgctcttcctgacgctggcctggatctactccgtgacactgacagtgaaggccgtggtgcgggagaaggagacgcggctgcgggacaccatgcgcgccatggggctcagccgcgcggtgctctggctaggctggttcctcagctgcctcgggcccttcctgctcagcgccgcactgctggttctggtgctcaagctgggagacatcctcccctacagccacccgggcgtggtcttcctgttcttggcagccttcgcggtggccacggtgacccagagcttcctgctcagcgccttcttctcccgcgccaacctggctgcggcctgcggcggcctggcctacttctccctctacctgccctacgtgctgtgtgtggcttggcgggaccggctgcccgcgggtggccgcgtggccgcgagcctgctgtcgcccgtggccttcggcttcggctgcgagagcctggctctgctggaggagcagggcgagggcgcgcagtggcacaacgtgggcacccggcctacggcagacgtcttcagcctggcccaggtctctggccttctgctgctggacgcggcgctctacggcctcgccacctggtacctggaagctgtgtgcccaggccagtacgggatccctgaaccatggaattttccttttcggaggagctactggtgcggacctcggccccccaagagtccagccccttgccccaccccgctggacccaaaggtgctggtagaagaggcaccgcccggcctgagtcctggcgtctccgttcgcagcctggagaagcgctttcctggaagcccgcagccagccctgcgggggctcagcctggacttctaccagggccacatcaccgccttcctgggccacaacggggccggcaagaccaccaccctgtccatcttgagtggcctcttcccacccagtggtggctctgccttcatcctgggccacgacgtccgctccagcatggccgccatccggccccacctgggcgtctgtcctcagtacaacgtgctgtttgacatgctgaccgtggacgagcacgtctggttctatgggcggctgaagggtctgagtgccgctgtagtgggccccgagcaggaccgtctgctgcaggatgtggggctggtctccaagcagagtgtgcagactcgccacctctctggtgggatgcaacggaagctgtccgtggccattgcctttgtgggcggctcccaagttgttatcctggacgagcctacggctggcgtggatcctgcttcccgccgcggtatttgggagctgctgctcaaataccgagaaggtcgcacgctgatcctctccacccaccacctggatgaggcagagctgctgggagaccgtgtggccgtggtggcaggtggccgcttgtgctgctgtggctccccactcttcctgcgccgtcacctgggctccggctactacctgacgctggtgaaggcccgcctgcccctgaccaccaatgagaaggctgacactgacatggagggcagtgtggacaccaggcaggaaaagaagaatggcagccagggcagcagagtcggcactcctcagctgctggccctggtacagcactgggtgcccggggcacggctggtggaggagctgccacacgagctggtgctggtgctgccctacacgggtgcccatgacggcagcttcgccacactcttccgagagctagacacgcggctggcggagctgaggctcactggctacgggatctccgacaccagcctcgaggagatcttcctgaaggtggtggaggagtgtgctgcggacacagatatggaggatggcagctgcgggcagcacctatgcacaggcattgctggcctagacgtaaccctacggctcaagatgccgccacaggagacagcgctggagaacggggaaccagctgggtcagccccagagactgaccagggctctgggccagacgccgtgggccgggtacagggctgggcactgacccgccagcagctccaggccctgcttctcaagcgctttctgcttgcccgccgcagccgccgcggcctgttcgcccagatcgtgctgcctgccctctttgtgggcctggccctcgtgttcagcctcatcgtgcctcctttcgggcactacccggctctgcggctcagtcccaccatgtacggtgctcaggtgtccttcttcagtgaggacgccccaggggaccctggacgtgcccggctgctcgaggcgctgctgcaggaggcaggactggaggagcccccagtgcagcatagctcccacaggttctcggcaccagaagttcctgctgaagtggccaaggtcttggccagtggcaactggaccccagagtctccatccccagcctgccagtgtagccggcccggtgcccggcgcctgctgcccgactgcccggctgcagctggtggtccccctccgccccaggcagtgaccggctctggggaagtggttcagaacctgacaggccggaacctgtctgacttcctggtcaagacctacccgcgcctggtgcgccagggcctgaagactaagaagtgggtgaatgaggtcagatacggaggcttctcgctggggggccgagacccaggcctgccctcgggccaagagttgggccgctcagtggaggagttgtgggcgctgctgagtcccctgcctggcggggccctcgaccgtgtcctgaaaaacctcacagcctgggctcacagcctggatgctcaggacagtctcaagatctggttcaacaacaaaggctggcactccatggtggcctttgtcaaccgagccagcaacgcaatcctccgtgctcacctgcccccaggcccggcccgccacgcccacagcatcaccacactcaaccaccccttgaacctcaccaaggagcagctgtctgagggtgcactgatggcctcctcggtggacgtcctcgtctccatctgtgtggtctttgccatgtcctttgtcccggccagcttcactcttgtcctcattgaggagcgagtcacccgagccaagcacctgcagctcatggggggcctgtcccccaccctctactggcttggcaactttctctgggacatgtgtaactacttggtgccagcatgcatcgtggtgctcatctttctggccttccagcagagggcatatgtggcccctgccaacctgcctgctctcctgctgttgctactactgtatggctggtcgatcacaccgctcatgtacccagcctccttcttcttctccgtgcccagcacagcctatgtggtgctcacctgcataaacctctttattggcatcaatggaagcatggccacctttgtgcttgagctcttctctgatcagaagctgcaggaggtgagccggatcttgaaacaggtcttccttatcttcccccacttctgcttgggccgggggctcattgacatggtgcggaaccaggccatggctgatgcctttgagcgcttgggagacaggcagttccagtcacccctgcgctgggaggtggtcggcaagaacctcttggccatggtgatacaggggcccctcttccttctcttcacactactgctgcagcaccgaagccaactcctgccacagcccagggtgaggtctctgccactcctgggagaggaggacgaggatgtagcccgtgaacgggagcgggtggtccaaggagccacccagggggatgtgttggtgctgaggaacttgaccaaggtataccgtgggcagaggatgccagctgttgaccgcttgtgcctggggattccccctggtgagtgttttgggctgctgggtgtgaatggagcagggaagacgtccacgtttcgcatggtgacgggggacacattggccagcaggggcgaggctgtgctggcaggccacagcgtggcccgggaacccagtgctgcgcacctcagcatgggatactgccctcaatccgatgccatctttgagctgctgacgggccgcgagcacctggagctgcttgcgcgcctgcgcggtgtcccggaggcccaggttgcccagaccgctggctcgggcctggcgcgtctgggactctcatggtacgcagaccggcctgcaggcacctacagcggagggaacaaacgcaagctggcgacggccctggcgctggttggggacccagccgtggtgtttctggacgagccgaccacaggcatggaccccagcgcgcggcgcttcctttggaacagccttttggccgtggtgcgggagggccgttcagtgatgctcacctcccatagcatggaggagtgtgaagcgctctgctcgcgcctggccatcatggtgaatgggcggttccgctgcctgggcagcccgcaacatctcaagggcagattcgcggcgggtcacacactgaccctgcgggtgcccgccgcaaggtcccagccggcagcggccttcgtggcggccgagttccctggggcggagctgcgcgaggcacatggaggccgcctgcgcttccagctgccgccgggagggcgctgcgccctggcgcgcgtctttggagagctggcggtgcacggcgcagagcacggcgtggaggacttttccgtgagccagacgatgctggaggaggtattcttgtacttctccaaggaccaggggaaggacgaggacaccgaagagcagaaggaggcaggagtgggagtggaccccgcgccaggcctgcagcaccccaaacgcgtcagccagttcctcgatgaccctagcactgccgagactgtgctctgagcctccctcccctgcggggccgcggggaggccctgggaatggcaagggcaaggtagagtgcctaggagccctggactcaggctggcagaggggctggtgccctggagaaaataaagagaaggctggagagaagccgtggtggtg

SEQ ID NO: 201772 - DNA, 6585 bp, Artificial Sequence
  derived and/or modified sequence
atggccttctggacacagctgatgctgctgctctggaagaatttcatgtatcgccggagacagccggtccagctcctggtcgaattgctgtggcctctcttcctcttcttcatcctggtggctgttcgccactcccacccgcccctggagcaccatgaatgccacttcccaaacaagccactgccatcggcgggcaccgtgccctggctccagggtctcatctgtaatgtgaacaacacctgctttccgcagctgacaccgggcgaggagcccgggcgcctgagcaacttcaacgactccctggtctcccggctgctagccgatgcccgcactgtgctgggaggggccagtgcccacaggacgctggctggcctagggaagctgatcgccacgctgagggctgcacgcagcacggcccagcctcaaccaaccaagcagtctccactggaaccacccatgctggatgtcgcggagctgctgacgtcactgctgcgcacggaatccctggggttggcactgggccaagcccaggagcccttgcacagcttgttggaggccgctgaggacctggcccaggagctcctggcgctgcgcagcctggtggagcttcgggcactgctgcagagaccccgagggaccagcggccccctggagttgctgtcagaggccctctgcagtgtcaggggacctagcagcacagtgggcccctccctcaactggtacgaggctagtgacctgatggagctggtggggcaggagccagaatccgccctgccagacagcagcctgagccccgcctgctcggagctgattggagccctggacagccacccgctgtcccgcctgctctggagacgcctgaagcctctgatcctcgggaagctactctttgcaccagatacaccttttacccggaagctcatggcccaggtgaaccggaccttcgaggagctcaccctgctgagggatgtccgggaggtgtgggagatgctgggaccccggatcttcaccttcatgaacgacagttccaatgtggccatgctgcagcggctcctgcagatgcaggatgaaggaagaaggcagcccagacctggaggccgggaccacatggaggccctgcgatcctttctggaccctgggagcggtggctacagctggcaggacgcacacgctgatgtggggcacctggtgggcacgctgggccgagtgacggagtgcctgtccttggacaagctggaggcggcaccctcagaggcagccctggtgtcgcgggccctgcaactgctcgcggaacatcgattctgggccggcgtcgtcttcttgggacctgaggactcttcagaccccacagagcacccaaccccagacctgggccccggccacgtgcgcatcaaaatccgcatggacattgacgtggtcacgaggaccaataagatcagggacaggttttgggaccctggcccagccgcggaccccctgaccgacctgcgctacgtgtggggcggcttcgtgtacctgcaagacctggtggagcgtgcagccgtccgcgtgctcagcggcgccaacccccgggccggcctctacctgcagcagatgccctatccgtgctatgtggacgacgtgttcctgcgtgtgctgagccggtcgctgccgctcttcctgacgctggcctggatctactccgtgacactgacagtgaaggccgtggtgcgggagaaggagacgcggctgcgggacaccatgcgcgccatggggctcagccgcgcggtgctctggctaggctggttcctcagctgcctcgggcccttcctgctcagcgccgcactgctggttctggtgctcaagctgggagacatcctcccctacagccacccgggcgtggtcttcctgttcttggcagccttcgcggtggccacggtgacccagagcttcctgctcagcgccttcttctcccgcgccaacctggctgcggcctgcggcggcctggcctacttctccctctacctgccctacgtgctgtgtgtggcttggcgggaccggctgcccgcgggtggccgcgtggccgcgagcctgctgtcgcccgtggccttcggcttcggctgcgagagcctggctctgctggaggagcagggcgagggcgcgcagtggcacaacgtgggcacccggcctacggcagacgtcttcagcctggcccaggtctctggccttctgctgctggacgcggcgctctacggcctcgccacctggtacctggaagctgtgtgcccaggccagtacgggatccctgaaccatggaattttccttttcggaggagctactggtgcggacctcggccccccaagagtccagccccttgccccaccccgctggacccaaaggtgctggtagaagaggcaccgcccggcctgagtcctggcgtctccgttcgcagcctggagaagcgctttcctggaagcccgcagccagccctgcgggggctcagcctggacttctaccagggccacatcaccgccttcctgggccacaacggggccggcaagaccaccaccctgtccatcttgagtggcctcttcccacccagtggtggctctgccttcatcctgggccacgacgtccgctccagcatggccgccatccggccccacctgggcgtctgtcctcagtacaacgtgctgtttgacatgctgaccgtggacgagcacgtctggttctatgggcggctgaagggtctgagtgccgctgtagtgggccccgagcaggaccgtctgctgcaggatgtggggctggtctccaagcagagtgtgcagactcgccacctctctggtgggatgcaacggaagctgtccgtggccattgcctttgtgggcggctcccaagttgttatcctggacgagcctacggctggcgtggatcctgcttcccgccgcggtatttgggagctgctgctcaaataccgagaaggtcgcacgctgatcctctccacccaccacctggatgaggcagagctgctgggagaccgtgtggccgtggtggcaggtggccgcttgtgctgctgtggctccccactcttcctgcgccgtcacctgggctccggctactacctgacgctggtgaaggcccgcctgcccctgaccaccaatgagaaggctgacactgacatggagggcagtgtggacaccaggcaggaaaagaagaatggcagccagggcagcagagtcggcactcctcagctgctggccctggtacagcactgggtgcccggggcacggctggtggaggagctgccacacgagctggtgctggtgctgccctacacgggtgcccatgacggcagcttcgccacactcttccgagagctagacacgcggctggcggagctgaggctcactggctacgggatctccgacaccagcctcgaggagatcttcctgaaggtggtggaggagtgtgctgcggacacagatatggaggatggcagctgcgggcagcacctatgcacaggcattgctggcctagacgtaaccctacggctcaagatgccgccacaggagacagcgctggagaacggggaaccagctgggtcagccccagagactgaccagggctctgggccagacgccgtgggccgggtacagggctgggcactgacccgccagcagctccaggccctgcttctcaagcgctttctgcttgcccgccgcagccgccgcggcctgttcgcccagatcgtgctgcctgccctctttgtgggcctggccctcgtgttcagcctcatcgtgcctcctttcgggcactacccggctctgcggctcagtcccaccatgtacggtgctcaggtgtccttcttcagtgaggacgccccaggggaccctggacgtgcccggctgctcgaggcgctgctgcaggaggcaggactggaggagcccccagtgcagcatagctcccacaggttctcggcaccagaagttcctgctgaagtggccaaggtcttggccagtggcaactggaccccagagtctccatccccagcctgccagtgtagccggcccggtgcccggcgcctgctgcccgactgcccggctgcagctggtggtccccctccgccccaggcagtgaccggctctggggaagtggttcagaacctgacaggccggaacctgtctgacttcctggtcaagacctacccgcgcctggtgcgccagggcctgaagactaagaagtgggtgaatgaggtcagatacggaggcttctcgctggggggccgagacccaggcctgccctcgggccaagagttgggccgctcagtggaggagttgtgggcgctgctgagtcccctgcctggcggggccctcgaccgtgtcctgaaaaacctcacagcctgggctcacagcctggatgctcaggacagtctcaagatctggttcaacaacaaaggctggcactccatggtggcctttgtcaaccgagccagcaacgcaatcctccgtgctcacctgcccccaggcccggcccgccacgcccacagcatcaccacactcaaccaccccttgaacctcaccaaggagcagctgtctgagggtgcactgatggcctcctcggtggacgtcctcgtctccatctgtgtggtctttgccatgtcctttgtcccggccagcttcactcttgtcctcattgaggagcgagtcacccgagccaagcacctgcagctcatggggggcctgtcccccaccctctactggcttggcaactttctctgggacatgtgtaactacttggtgccagcatgcatcgtggtgctcatctttctggccttccagcagagggcatatgtggcccctgccaacctgcctgctctcctgctgttgctactactgtatggctggtcgatcacaccgctcatgtacccagcctccttcttcttctccgtgcccagcacagcctatgtggtgctcacctgcataaacctctttattggcatcaatggaagcatggccacctttgtgcttgagctcttctctgatcagaagctgcaggaggtgagccggatcttgaaacaggtcttccttatcttcccccacttctgcttgggccgggggctcattgacatggtgcggaaccaggccatggctgatgcctttgagcgcttgggagacaggcagttccagtcacccctgcgctgggaggtggtcggcaagaacctcttggccatggtgatacaggggcccctcttccttctcttcacactactgctgcagcaccgaagccaactcctgccacagcccagggtgaggtctctgccactcctgggagaggaggacgaggatgtagcccgtgaacgggagcgggtggtccaaggagccacccagggggatgtgttggtgctgaggaacttgaccaaggtataccgtgggcagaggatgccagctgttgaccgcttgtgcctggggattccccctggtgagtgttttgggctgctgggtgtgaatggagcagggaagacgtccacgtttcgcatggtgacgggggacacattggccagcaggggcgaggctgtgctggcaggccacagcgtggcccgggaacccagtgctgcgcacctcagcatgggatactgccctcaatccgatgccatctttgagctgctgacgggccgcgagcacctggagctgcttgcgcgcctgcgcggtgtcccggaggcccaggttgcccagaccgctggctcgggcctggcgcgtctgggactctcatggtacgcagaccggcctgcaggcacctacagcggagggaacaaacgcaagctggcgacggccctggcgctggttggggacccagccgtggtgtttctggacgagccgaccacaggcatggaccccagcgcgcggcgcttcctttggaacagccttttggccgtggtgcgggagggccgttcagtgatgctcacctcccatagcatggaggagtgtgaagcgctctgctcgcgcctggccatcatggtgaatgggcggttccgctgcctgggcagcccgcaacatctcaagggcagattcgcggcgggtcacacactgaccctgcgggtgcccgccgcaaggtcccagccggcagcggccttcgtggcggccgagttccctggggcggagctgcgcgaggcacatggaggccgcctgcgcttccagctgccgccgggagggcgctgcgccctggcgcgcgtctttggagagctggcggtgcacggcgcagagcacggcgtggaggacttttccgtgagccagacgatgctggaggaggtattcttgtacttctccaaggaccaggggaaggacgaggacaccgaagagcagaaggaggcaggagtgggagtggaccccgcgccaggcctgcagcaccccaaacgcgtcagccagttcctcgatgaccctagcactgccgagactgtgctctgagcctccctcccctgcggggccgcggggaggccctgggaatggcaagggcaaggtagagtgcctaggagccctggactcaggctggcagaggggctggtgccctggagaaaataaagagaaggctggagagaagccgtggtggtg

SEQ ID NO: 201773 - DNA, 6441 bp, Artificial Sequence
  derived and/or modified sequence
atggccttctggacccagctgatgctgctgctgtggaagaacttcatgtacagaagaagacagcccgtgcagctgctggtggagctgctgtggcccctgttcctgttcttcatcctggtggccgtgagacacagccacccccccctggagcaccacgagtgccacttccccaacaagcccctgcccagcgccggcaccgtgccctggctgcagggcctgatctgcaacgtgaacaacacctgcttcccccagctgacccccggcgaggagcccggcagactgagcaacttcaacgacagcctggtgagcagactgctggccgacgccagaaccgtgctgggcggcgccagcgcccacagaaccctggccggcctgggcaagctgatcgccaccctgagagccgccagaagcaccgcccagccccagcccaccaagcagagccccctggagccccccatgctggacgtggccgagctgctgaccagcctgctgagaaccgagagcctgggcctggccctgggccaggcccaggagcccctgcacagcctgctggaggccgccgaggacctggcccaggagctgctggccctgagaagcctggtggagctgagagccctgctgcagagacccagaggcaccagcggccccctggagctgctgagcgaggccctgtgcagcgtgagaggccccagcagcaccgtgggccccagcctgaactggtacgaggccagcgacctgatggagctggtgggccaggagcccgagagcgccctgcccgacagcagcctgagccccgcctgcagcgagctgatcggcgccctggacagccaccccctgagcagactgctgtggagaagactgaagcccctgatcctgggcaagctgctgttcgcccccgacacccccttcaccagaaagctgatggcccaggtgaacagaaccttcgaggagctgaccctgctgagagacgtgagagaggtgtgggagatgctgggccccagaatcttcaccttcatgaacgacagcagcaacgtggccatgctgcagagactgctgcagatgcaggacgagggcagaagacagcccagacccggcggcagagaccacatggaggccctgagaagcttcctggaccccggcagcggcggctacagctggcaggacgcccacgccgacgtgggccacctggtgggcaccctgggcagagtgaccgagtgcctgagcctggacaagctggaggccgcccccagcgaggccgccctggtgagcagagccctgcagctgctggccgagcacagattctgggccggcgtggtgttcctgggccccgaggacagcagcgaccccaccgagcaccccacccccgacctgggccccggccacgtgagaatcaagatcagaatggacatcgacgtggtgaccagaaccaacaagatcagagacagattctgggaccccggccccgccgccgaccccctgaccgacctgagatacgtgtggggcggcttcgtgtacctgcaggacctggtggagagagccgccgtgagagtgctgagcggcgccaaccccagagccggcctgtacctgcagcagatgccctacccctgctacgtggacgacgtgttcctgagagtgctgagcagaagcctgcccctgttcctgaccctggcctggatctacagcgtgaccctgaccgtgaaggccgtggtgagagagaaggagaccagactgagagacaccatgagagccatgggcctgagcagagccgtgctgtggctgggctggttcctgagctgcctgggccccttcctgctgagcgccgccctgctggtgctggtgctgaagctgggcgacatcctgccctacagccaccccggcgtggtgttcctgttcctggccgccttcgccgtggccaccgtgacccagagcttcctgctgagcgccttcttcagcagagccaacctggccgccgcctgcggcggcctggcctacttcagcctgtacctgccctacgtgctgtgcgtggcctggagagacagactgcccgccggcggcagagtggccgccagcctgctgagccccgtggccttcggcttcggctgcgagagcctggccctgctggaggagcagggcgagggcgcccagtggcacaacgtgggcaccagacccaccgccgacgtgttcagcctggcccaggtgagcggcctgctgctgctggacgccgccctgtacggcctggccacctggtacctggaggccgtgtgccccggccagtacggcatccccgagccctggaacttccccttcagaagaagctactggtgcggccccagaccccccaagagccccgccccctgccccacccccctggaccccaaggtgctggtggaggaggccccccccggcctgagccccggcgtgagcgtgagaagcctggagaagagattccccggcagcccccagcccgccctgagaggcctgagcctggacttctaccagggccacatcaccgccttcctgggccacaacggcgccggcaagaccaccaccctgagcatcctgagcggcctgttcccccccagcggcggcagcgccttcatcctgggccacgacgtgagaagcagcatggccgccatcagaccccacctgggcgtgtgcccccagtacaacgtgctgttcgacatgctgaccgtggacgagcacgtgtggttctacggcagactgaagggcctgagcgccgccgtggtgggccccgagcaggacagactgctgcaggacgtgggcctggtgagcaagcagagcgtgcagaccagacacctgagcggcggcatgcagagaaagctgagcgtggccatcgccttcgtgggcggcagccaggtggtgatcctggacgagcccaccgccggcgtggaccccgccagcagaagaggcatctgggagctgctgctgaagtacagagagggcagaaccctgatcctgagcacccaccacctggacgaggccgagctgctgggcgacagagtggccgtggtggccggcggcagactgtgctgctgcggcagccccctgttcctgagaagacacctgggcagcggctactacctgaccctggtgaaggccagactgcccctgaccaccaacgagaaggccgacaccgacatggagggcagcgtggacaccagacaggagaagaagaacggcagccagggcagcagagtgggcaccccccagctgctggccctggtgcagcactgggtgcccggcgccagactggtggaggagctgccccacgagctggtgctggtgctgccctacaccggcgcccacgacggcagcttcgccaccctgttcagagagctggacaccagactggccgagctgagactgaccggctacggcatcagcgacaccagcctggaggagatcttcctgaaggtggtggaggagtgcgccgccgacaccgacatggaggacggcagctgcggccagcacctgtgcaccggcatcgccggcctggacgtgaccctgagactgaagatgcccccccaggagaccgccctggagaacggcgagcccgccggcagcgcccccgagaccgaccagggcagcggccccgacgccgtgggcagagtgcagggctgggccctgaccagacagcagctgcaggccctgctgctgaagagattcctgctggccagaagaagcagaagaggcctgttcgcccagatcgtgctgcccgccctgttcgtgggcctggccctggtgttcagcctgatcgtgccccccttcggccactaccccgccctgagactgagccccaccatgtacggcgcccaggtgagcttcttcagcgaggacgcccccggcgaccccggcagagccagactgctggaggccctgctgcaggaggccggcctggaggagccccccgtgcagcacagcagccacagattcagcgcccccgaggtgcccgccgaggtggccaaggtgctggccagcggcaactggacccccgagagccccagccccgcctgccagtgcagcagacccggcgccagaagactgctgcccgactgccccgccgccgccggcggccccccccccccccaggccgtgaccggcagcggcgaggtggtgcagaacctgaccggcagaaacctgagcgacttcctggtgaagacctaccccagactggtgagacagggcctgaagaccaagaagtgggtgaacgaggtgagatacggcggcttcagcctgggcggcagagaccccggcctgcccagcggccaggagctgggcagaagcgtggaggagctgtgggccctgctgagccccctgcccggcggcgccctggacagagtgctgaagaacctgaccgcctgggcccacagcctggacgcccaggacagcctgaagatctggttcaacaacaagggctggcacagcatggtggccttcgtgaacagagccagcaacgccatcctgagagcccacctgccccccggccccgccagacacgcccacagcatcaccaccctgaaccaccccctgaacctgaccaaggagcagctgagcgagggcgccctgatggccagcagcgtggacgtgctggtgagcatctgcgtggtgttcgccatgagcttcgtgcccgccagcttcaccctggtgctgatcgaggagagagtgaccagagccaagcacctgcagctgatgggcggcctgagccccaccctgtactggctgggcaacttcctgtgggacatgtgcaactacctggtgcccgcctgcatcgtggtgctgatcttcctggccttccagcagagagcctacgtggcccccgccaacctgcccgccctgctgctgctgctgctgctgtacggctggagcatcacccccctgatgtaccccgccagcttcttcttcagcgtgcccagcaccgcctacgtggtgctgacctgcatcaacctgttcatcggcatcaacggcagcatggccaccttcgtgctggagctgttcagcgaccagaagctgcaggaggtgagcagaatcctgaagcaggtgttcctgatcttcccccacttctgcctgggcagaggcctgatcgacatggtgagaaaccaggccatggccgacgccttcgagagactgggcgacagacagttccagagccccctgagatgggaggtggtgggcaagaacctgctggccatggtgatccagggccccctgttcctgctgttcaccctgctgctgcagcacagaagccagctgctgccccagcccagagtgagaagcctgcccctgctgggcgaggaggacgaggacgtggccagagagagagagagagtggtgcagggcgccacccagggcgacgtgctggtgctgagaaacctgaccaaggtgtacagaggccagagaatgcccgccgtggacagactgtgcctgggcatcccccccggcgagtgcttcggcctgctgggcgtgaacggcgccggcaagaccagcaccttcagaatggtgaccggcgacaccctggccagcagaggcgaggccgtgctggccggccacagcgtggccagagagcccagcgccgcccacctgagcatgggctactgcccccagagcgacgccatcttcgagctgctgaccggcagagagcacctggagctgctggccagactgagaggcgtgcccgaggcccaggtggcccagaccgccggcagcggcctggccagactgggcctgagctggtacgccgacagacccgccggcacctacagcggcggcaacaagagaaagctggccaccgccctggccctggtgggcgaccccgccgtggtgttcctggacgagcccaccaccggcatggaccccagcgccagaagattcctgtggaacagcctgctggccgtggtgagagagggcagaagcgtgatgctgaccagccacagcatggaggagtgcgaggccctgtgcagcagactggccatcatggtgaacggcagattcagatgcctgggcagcccccagcacctgaagggcagattcgccgccggccacaccctgaccctgagagtgcccgccgccagaagccagcccgccgccgccttcgtggccgccgagttccccggcgccgagctgagagaggcccacggcggcagactgagattccagctgccccccggcggcagatgcgccctggccagagtgttcggcgagctggccgtgcacggcgccgagcacggcgtggaggacttcagcgtgagccagaccatgctggaggaggtgttcctgtacttcagcaaggaccagggcaaggacgaggacaccgaggagcagaaggaggccggcgtgggcgtggaccccgcccccggcctgcagcaccccaagagagtgagccagttcctggacgaccccagcaccgccgagaccgtgctgtag

SEQ ID NO: 201774 - protein, 611 aa, Artificial Sequence
  derived and/or modified sequence
MDFKKSKLTLVVVEDDDQGREQEHTFVFRLDSARTCKHLWKCAVEHHAFFRLRTPGNSKSNRSDFIRLGSRFRFSGRTEYQATHGSRLRRTSTFERKPSKRYPSRRHSTFKASNPVIAAQLCSKTNPEVHNYQPQYHPNIHPSQPRWHPHSPNVSYPLPSPVLSSSDRLPFGIEENGGTPFLTAASGRHHHQHQHQHQHQHHSNYSLSLTLENKEGPLRSPNSSSKSLTKLSPGTPALFSEAAAHLKKLELETVKAAGPWPPLHININKAEEKKVSEKTLQTPLLPSPVADHVKCNILKAQLENASRVNIQGGKEESPFVNINKKSSLQDASVRSPIPIRVETAQPAVEKPEIKPPRVRKLTRQYSFDEDDLPPDLAEAVGVTTSTTTNTTTAATQVSVPLPSPKVQNVSSPHKSEGKGLLSPGAKSPSDRGGAFTLEPGDLLMDFTEATPLAEPASNPHCAHSRCSPPLSLPMKEETTGVCMYPPIKTRLIKTFPVDTMNPFPDTFTTGPQFTADFRDSKLQCCPGPTSPLIPAATLRPLTETVHSADHLHHPETCFSGSQCRDTPAGTGEREDDEKTVDDRTVKFSPCHLEDGMVPSVRLLSSGFVCSL

SEQ ID NO: 201775 - protein, 900 aa, Artificial Sequence
  derived and/or modified sequence
MLRFLRRTFGRRSMQRYARGAAGRGAAGLGDERDGGPRGGPAAAASSSALPAAPGGSVFPAGGGPLLTGGAAVHISAAGAAKATLYCRVFLLDGTEVSVDLPKHAKGQDLFDQIVYHLDLVETDYFGLQFLDSAQVAHWLDHAKPIKKQMKIGPAYALHFRVKYYSSEPNNLREEFTRYLFVLQLRHDILSGKLKCPYETAVELAALCLQAELGECELPEHTPELVSEFRFIPNQTEAMEFDIFQRWKECRGKSPAQAELSYLNKAKWLEMYGVDMHVVRGRDGCEYSLGLTPTGILIFEGANKIGLFFWPKITKMDFKKSKLTLVVVEDDDQGREQEHTFVFRLDSARTCKHLWKCAVEHHAFFRLRTPGNSKSNRSDFIRLGSRFRFSGRTEYQATHGSRLRRTSTFERKPSKRYPSRRHSTFKASNPVIAAQLCSKTNPEVHNYQPQYHPNIHPSQPRWHPHSPNVSYPLPSPVLSSSDRLPFGIEENGGTPFLTAASGRHHHQHQHQHQHQHHSNYSLSLTLENKEGPLRSPNSSSKSLTKLSPGTPALFSEAAAHLKKLELETVKAAGPWPPLHININKAEEKKVSEKTLQTPLLPSPVADHVKCNILKAQLENASRVNIQGGKEESPFVNINKKSSLQDASVRSPIPIRVETAQPAVEKPEIKPPRVRKLTRQYSFDEDDLPPDLAEAVGVTTSTTTNTTTAATQVSVPLPSPKVQNVSSPHKSEGKGLLSPGAKSPSDRGGAFTLEPGDLLMDFTEATPLAEPASNPHCAHSRCSPPLSLPMKEETTGVCMYPPIKTRLIKTFPVDTMNPFPDTFTTGPQFTADFRDSKLQCCPGPTSPLIPAATLRPLTETVSTVQTIYTTRKPVSLAASAETLRQELEREKMMKRLLMTEL

SEQ ID NO: 201776 - DNA, 1836 bp, Artificial Sequence
  derived and/or modified sequence
atggatttcaaaaaatccaagcttacacttgtagttgtggaggatgatgatcagggacgggaacaggaacacacattcgtgttccgcctagattccgcacgcacatgcaaacacttatggaagtgtgcggtcgagcaccacgccttctttcgcctacggactcccggcaatagcaaaagcaaccggagcgactttattcgactgggaagcagattcaggtttagcggacggaccgaatatcaggccacacatgggagcagactgcgcaggaccagcacattcgaacggaagcctagtaagaggtacccctcccgccggcactcgactttcaaagccagtaatccagtcatagctgctcagctgtgcagcaaaactaacccagaggtgcacaactatcagccacagtaccaccctaacattcaccctagccagccacgatggcatccacacagtcccaatgttagctacccactcccctctccggtgctatcaagttctgaccgacttccctttggcattgaagaaaatggcggcacaccttttctgactgcagctagcggcaggcaccatcatcagcatcagcaccagcaccaacaccagcaccattcaaactatagcctgtcacttacactggaaaataaagagggacccctcaggtcaccgaattcctcaagtaagtctctaacaaagctgagcccaggaacccctgccctattctccgaagccgcggcccatttaaagaaattggagctggaaaccgtgaaggccgctggcccctggccaccgctgcacattaatatcaacaaagcagaggagaagaaggtgagtgagaagacactccagaccccgttgctgccgtcccccgtggccgaccatgtgaagtgtaacattctgaaagcgcagctcgaaaatgcttccagggtcaatatacaaggaggcaaagaggaaagccccttcgtaaatatcaataaaaaaagcagcttacaggatgcgtccgttcggtcgccaattccaattagggtggaaaccgcacaaccagcagtggagaaacctgaaattaagcctccaagggtccggaaactgacccgccagtacagctttgatgaggacgacctccctcccgacttagcggaggccgtcggcgtgactacatctactactaccaataccactaccgccgccacacaagtgtccgtgccattgccatcacccaaagtccaaaacgtgagtagtccccataaatcagaaggtaaaggactgcttagccccggtgcgaagagtcctagtgaccggggtggcgcctttactttggaacccggcgacctgctcatggattttacagaggccacgccattggccgagcccgcctctaaccctcactgtgcgcattcacgatgcagcccacccctaagtttgcccatgaaagaggaaaccaccggcgtgtgcatgtaccctcccattaaaactcgattaattaagaccttccccgtcgacacaatgaatcccttcccggacacattcactacggggccacaattcacagctgattttcgcgattcaaaactgcaatgctgtcccggcccgacttcaccactgattcctgctgccacactgcggcctctcaccgaaactgtacacagtgccgaccacttgcaccacccagaaacatgtttttctgggtcccaatgccgcgatactcccgccgggactggcgagagagaagatgacgagaaaactgtcgacgatcgcacagttaaattctccccttgtcatctggaggacggaatggttccatccgtgcggctcttaagcagcggattcgtatgcagcctgtag

SEQ ID NO: 201777 - DNA, 2703 bp, Artificial Sequence
  derived and/or modified sequence
atgctgcgcttcttgcggaggacattcggtcgacgcagcatgcaacgttacgccaggggagccgctggccggggggccgctgggttgggggatgagagggacggtggaccgagaggggggcctgccgctgcagccagctctagtgctttaccagcggccccgggcggatcagtgttccccgccggtggagggccactgctcacgggaggcgccgctgtgcatatatcagccgctggggctgccaaagccactttgtactgccgtgtcttcttgcttgacggcaccgaggtgtcagtggatcttccgaagcacgccaagggacaagatcttttcgaccagattgtttatcacctggatcttgtcgagaccgattatttcgggctacaattcctagactccgcgcaagtagctcattggctggatcacgcaaagccaatcaagaaacagatgaaaatcggccccgcatatgccctgcactttagagtcaagtattattcctccgagccgaacaacttgcgcgaggaatttacacgctatctgtttgttcttcagcttaggcatgacattcttagtggaaaactaaaatgcccctatgagacagcagtggagttggccgcgctgtgcctacaagctgagctcggtgagtgcgagctgcctgagcatacaccggagttggtgagcgaattccggtttataccgaaccaaactgaggccatggagttcgacatcttccagagatggaaggaatgcagagggaaaagcccagctcaagccgaacttagctatctgaacaaggcaaaatggctcgaaatgtacggggtggatatgcacgtggttcggggaagagacggctgtgaatattcactgggcctgacccccacgggaatcctaatctttgaaggcgcaaataagatcggactatttttttggccaaaaatcactaagatggattttaaaaaaagcaaacttacacttgttgtggtggaagacgacgaccagggtagggaacaagagcacacattcgtgtttagattggacagtgctcgtacatgtaagcacctgtggaaatgcgcagtagaacaccacgcattcttccggctgagaacacctggaaacagtaagtccaatcgaagcgatttcatccggctgggctcacgcttccgctttagcggccggactgaatatcaggctacccacggatcacggttgcgacgcacttcaacctttgagcgcaaaccatctaagcgctacccatccaggagacatagtactttcaaggccagcaaccctgtcattgccgcacaactttgttctaagacaaatcccgaggtgcataactatcagccccaataccaccccaacattcacccatcccagccaaggtggcacccacacagtccaaacgtgtcctaccccctcccgagtccagtcctgagtagcagtgaccggctcccattcggaatagaggagaacggggggaccccgttcctgactgcagcttccggccggcatcatcaccagcaccagcaccaacatcagcaccagcaccatagcaattactcgctgtcacttactctggaaaataaagagggtcctctgagatcccccaatagtagttctaagagcctcaccaagttatctccaggcaccccggccttgttttctgaggccgcggctcacctgaagaagctggagcttgaaaccgtgaaggctgccggcccgtggccaccgcttcacattaacatcaataaggcagaagaaaaaaaagtgtctgaaaagacactgcagactccactgctgcctagtccagtagccgatcatgtgaaatgtaatatcttgaaggcgcagctcgaaaatgctagtcgcgtgaacatacagggcggcaaggaggagagcccattcgtgaatatcaataaaaagtcctctctgcaggacgctagtgtgagaagcccaattcccatccgagtggaaactgctcaaccagccgtggagaagccagagataaaaccccctcgggtgcggaagctcacacgccagtacagttttgatgaggatgatctgcccccagacttagccgaggccgtgggagtgacaacttcaacaaccactaacaccacaacagcagccacccaggtgagtgttcccctgccttcccctaaggtgcagaacgtgtccagtccgcacaagtccgagggtaagggactgctgtcccccggggctaaatctccaagcgatagaggaggagctttcacactcgagcctggggaccttcttatggacttcaccgaggccacaccgctagccgagcccgcttcgaacccccattgtgcgcattctagatgctcaccccctttgtccttacccatgaaggaggagacaacaggcgtgtgcatgtacccaccaattaaaacccgcctgataaagacatttccagtagacactatgaacccctttcccgacacttttaccacagggcctcaatttacagccgatttcagagactcaaagctgcaatgctgtccgggcccaacctcgccgctgattccggctgcaaccctgcgacccctaacagagaccgtaagcaccgtccaaacaatctataccacaagaaaaccagtttcgctcgccgcaagtgccgagacacttcgacaagaactcgaaagggaaaaaatgatgaagcgccttctcatgacagagctgtag

SEQ ID NO: 201778 - DNA, 1836 bp, Artificial Sequence
  derived and/or modified sequence
atggacttcaagaagagcaagctgaccctggtggtggtggaggatgatgaccagggccgggagcaggagcacacctttgtgttccggctggacagcgcccggacctgcaagcacctgtggaagtgtgctgtggagcaccacgccttcttccggctgcggaccccaggcaacagcaagagcaacagaagtgacttcatccggctgggcagccgcttccgcttcagcggccgcacagagtaccaggccacccacggcagccggctgcggaggaccagcacctttgagaggaagcccagcaagcgctaccccagcagaagacacagcaccttcaaggccagcaaccctgtgattgctgcccagctgtgcagcaagaccaaccctgaggtgcacaactaccagccccagtaccaccccaacatccaccccagccagccccgctggcacccccacagccccaacgtgtcctaccccctgcccagccctgtgctgagcagcagtgaccggctgccctttggaattgaagaaaatggaggcacccccttcctgacagctgccagcggccgccaccaccaccagcaccagcaccagcaccagcaccagcaccacagcaactacagcctgagcctgaccctggagaacaaggagggccccctgcggagccccaacagcagcagcaagagcctgaccaagctgagccctggcaccccagccctcttcagcgaggccgccgcccacctgaagaagctggagctggagaccgtgaaggctgctggcccctggccacccctgcacatcaacatcaacaaggccgaggagaagaaggtgtctgagaagaccctgcagacccccctgctgcccagccctgtggccgaccacgtgaagtgcaacatcctgaaggcccagctggagaatgccagccgggtgaacatccagggcggcaaggaggagagcccctttgtgaacatcaacaagaagagcagcctgcaggatgcctctgtgcgcagccccatccccatccgggtggagacagcccagcctgctgtggagaagccagagatcaagccaccccgggtgaggaagctgacccggcagtacagctttgatgaagatgacctgcccccagacctggccgaggccgtgggcgtgaccaccagcaccaccaccaacaccaccacagctgccacccaggtgtctgtgcccctgcccagccccaaggtgcagaatgtgagcagcccccacaagtctgagggcaagggcctgctgagccctggggccaagagccccagcgaccggggcggggccttcaccctggagcccggggacctgctgatggacttcacagaggccacccccctggccgagcccgccagcaacccccactgtgcccacagccgctgcagcccccccctgagcctgcccatgaaggaggagaccactggagtgtgcatgtacccacccatcaagaccaggctcatcaagaccttccctgtggacaccatgaaccccttcccagacaccttcaccaccggcccccagttcaccgctgacttccgggacagcaagctgcagtgctgccccggccccaccagccccctcatcccagctgccaccctgcggcccctgacagagaccgtgcacagcgctgaccacctgcaccaccctgagacctgcttcagcggcagccagtgccgggacaccccagctggcaccggggagcgggaggatgatgagaagacagtggatgacagaacagtgaagttcagcccctgccacctggaggatggcatggtgcccagcgtgcggctgctgagcagcggctttgtgtgcagcctgtag

SEQ ID NO: 201779 - DNA, 2703 bp, Artificial Sequence
  derived and/or modified sequence
atgctgcgcttcctgcggaggacctttggaagaagatccatgcagagatatgcccggggagctgctggccgcggggctgctggcctgggagatgaaagagatggcggcccccggggcggccctgctgctgctgccagcagcagcgccctgcctgctgcccctgggggctctgtgtttcctgctgggggcggccccctgctgaccggcggcgctgctgtgcacatctctgctgctggggccgccaaggccaccctgtactgcagggtcttcctgctggatggaacagaggtgtctgtggacctgcccaagcacgccaagggccaggacctgtttgaccagatcgtgtaccacctggacctggtggagacagactacttcggcctgcagttcctggacagcgcccaggtggcccactggctggaccacgccaagcccatcaagaagcagatgaagattggccctgcctatgccctgcacttccgggtgaagtactacagcagcgagcccaacaacctgcgggaggagttcacccgctacctgtttgtgctgcagctgcggcatgacatcctgagcggcaagctgaagtgcccctatgaaacagctgtggagctggccgccctgtgcctgcaggccgagctgggagaatgtgagctgcctgagcacaccccagagctggtgtctgagttccgcttcatccccaaccagacagaggccatggagtttgacatcttccagcgctggaaggaatgtcggggcaagagccctgcccaggccgagctgagctacctgaacaaggccaagtggctggagatgtatggagtggacatgcacgtggtgcggggcagagatggctgtgagtacagcctgggcctgacccccaccggcatcctgatctttgaaggagccaacaagattggcctcttcttctggcccaagatcaccaagatggacttcaagaagagcaagctgaccctggtggtggtggaggatgatgaccagggccgggagcaggagcacacctttgtgttccggctggacagcgcccggacctgcaagcacctgtggaagtgtgctgtggagcaccacgccttcttccggctgcggaccccaggcaacagcaagagcaacagaagtgacttcatccggctgggcagccgcttccgcttcagcggccgcacagagtaccaggccacccacggcagccggctgcggaggaccagcacctttgagaggaagcccagcaagcgctaccccagccgccgccacagcaccttcaaggccagcaaccctgtgattgctgcccagctgtgcagcaagaccaaccctgaggtgcacaactaccagccccagtaccaccccaacatccaccccagccagccccgctggcacccccacagccccaacgtgtcctaccccctgcccagccctgtgctgagcagcagtgaccggctgcccttcggcatcgaggagaatggaggcacccccttcctgacagctgccagcggccgccaccaccaccagcaccagcaccagcaccagcaccagcaccacagcaactacagcctgagcctgaccctggagaacaaggagggccccctgcggagccccaacagcagcagcaagagcctgaccaagctgagccctggcaccccagccctcttcagcgaggccgccgcccacctgaagaagctggagctggagaccgtgaaggccgccggcccctggccacccctgcacatcaacatcaacaaggccgaggagaagaaggtgtctgagaagaccctgcagacccccctgctgcccagccctgtggccgaccacgtgaagtgcaacatcctgaaggcccagctggagaatgccagccgggtgaacatccagggcggcaaggaggagagcccctttgtgaacatcaacaagaagagcagcctgcaggatgcctctgtgcgcagccccatccccatccgggtggagacagcccagcctgctgtggagaagccagagatcaagccaccccgggtgaggaagctgacccggcagtacagctttgatgaagatgacctgcccccagacctggccgaggccgtgggcgtgaccaccagcaccaccaccaacaccaccacagctgccacccaggtgtctgtgcccctgcccagccccaaggtgcagaatgtgagcagcccccacaagtctgagggcaagggcctgctgagccctggggccaagagccccagcgacagaggaggagccttcaccctggagcccggggacctgctgatggacttcacagaggccacccccctggccgagcccgccagcaacccccactgtgcccacagccgctgcagcccccccctgagcctgcccatgaaggaggagaccaccggggtgtgcatgtacccacccatcaagaccaggctcatcaagaccttccctgtggacaccatgaaccccttcccagacaccttcaccaccggcccccagttcaccgctgacttccgggacagcaagctgcagtgctgccccggccccaccagccccctcatcccagctgccaccctgcggcccctgacagaaacagtgtccacagtgcagaccatctacaccaccaggaagcctgtgtccctggccgccagcgctgagaccctgcggcaggagctggagcgggagaagatgatgaagaggctgctgatgacagagctgtag

SEQ ID NO: 201780 - DNA, 1836 bp, Artificial Sequence
  derived and/or modified sequence
atggacttcaagaagagcaagctgaccctggtggtggtggaggacgatgaccagggccgtgagcaggaacacactttcgtgttccgactggattccgctcgtacttgtaaacacttgtggaaatgcgccgttgaacaccatgcgttctttagactgcgcactccaggaaatagtaaaagtaatagatccgatttcattcgcctgggctctcggtttcgtttcagcggcaggacagagtaccaggcaacacacggttcccgtttgaggcggacgagtacgttcgagcgcaagccctccaaaagatatcccagtcgccgccactccacctttaaggcatcaaatcccgtcattgctgctcagctctgctcgaagaccaaccctgaagtacacaattaccagccacaatatcaccctaacatccacccttcgcagcccaggtggcaccctcatagtcctaatgtcagctacccgctgccgagtccggtgttgtcatccagcgatagactccccttcggcatcgaggagaacgggggaacgccctttctgacggcagcatctggccgacaccatcatcagcatcagcaccagcaccagcaccagcaccatagcaactacagtcttagcctcacactagaaaacaaagaaggtccccttcgatcccccaactctagttcaaagtctctgaccaaattgagtcctgggacaccagccctgttcagcgaagctgccgctcacctaaaaaagctggagctggaaacagtcaaggccgcgggcccctggccccctctccatattaacatcaacaaagcggaagaaaaaaaggtgtctgagaaaaccctgcagactccattgctcccaagccctgtggcggaccatgtgaaatgcaacatcctcaaagctcagctggaaaatgccagtcgggtgaacatccaagggggtaaagaagagagtccctttgtgaacataaacaaaaaatcttccctgcaggatgcctccgttcggtcacccattcctattcgagtggagactgctcaaccagccgtcgaaaagcctgagataaaacccccacgagttcggaaactgacccggcagtactccttcgacgaggacgatctgccgcctgacctggcggaggcagtgggagtcactacctcaactacaactaatacgactacggcagcgacacaggtctctgttccactaccgtctccaaaagtgcagaacgtatcatctccgcataaatccgaggggaaaggactcctcagccctggggccaagtcccccagcgaccgtggaggtgcttttacactggaacccggtgacctcctgatggacttcactgaggcaactccactcgccgaacctgcgtcaaacccacactgtgctcactctaggtgtagtcctcctctttctctccctatgaaagaggagaccacgggcgtctgtatgtacccgccaattaaaactcgcctcattaagaccttcccggtagatactatgaatcctttccctgatacatttactaccggccctcagttcaccgcggattttcgggactcaaagctgcagtgctgtcctgggcccactagccctttaataccagccgctacccttcgcccactcactgagacagtacacagcgccgaccacctccatcaccccgaaacttgcttctccggcagccagtgccgcgataccccggccggtacaggagagcgcgaggatgacgagaaaactgtcgacgaccgtacagtgaagttctccccctgtcacctggaagacggcatggtgccctccgtgcgactcctaagtagcggttttgtatgcagcttgtag

SEQ ID NO: 201781 - DNA, 2703 bp, Artificial Sequence
  derived and/or modified sequence
atgctgcggttcctgcggcggaccttcggccggcggagcatgcagcggtatgctaggggagccgccgggcggggtgctgctggcttaggcgatgaaagggacggtggcccccgggggggccctgctgcagctgcctctagtagcgccttgcctgctgcaccaggaggctcggtcttccctgccggtggaggccctctgctcactgggggagcggccgtccacatttcggctgcgggggccgccaaagctacactgtattgtagagtcttcctcctagatgggactgaagtgagcgtagacctgcccaaacacgctaagggacaggatctattcgaccagattgtttatcacctggatctcgtggagacagactatttcggactgcagttcctggactccgcgcaggttgcccattggttggatcacgcaaaacctataaagaagcagatgaaaattggcccagcctatgcgttgcacttcagagtgaagtactacagctccgaacccaataacctgagggaggagttcacaaggtacctttttgttctgcagcttagacatgacattctgtccggcaagctgaaatgcccttacgaaaccgccgttgaactggccgcactgtgtttgcaggcagaactgggagagtgcgagctgcctgagcacacacccgaattagtgtctgaatttcgttttattcctaatcagaccgaagccatggagttcgacatatttcagagatggaaggaatgccggggcaaaagtccggcccaagccgagttgtcctatctgaataaggctaagtggctcgaaatgtacggcgttgatatgcacgtggttcgaggccgcgacggctgtgagtatagtctggggctgacacctaccggcattttgatctttgagggggcaaataagattgggctgttcttttggccaaagataacaaaaatggattttaagaagtccaagctcacactggtggtcgtggaggacgatgatcagggccgagagcaagaacataccttcgtgttccggcttgattccgctcggacatgtaaacatctctggaaatgtgccgtagagcaccatgcctttttccgtctgcgtactccaggaaacagtaaatctaacaggtctgattttatccgccttgggagcaggtttcgattttccggacgcacagaataccaggcaacccacgggagcagattgaggcgaacctccaccttcgagaggaagccctccaaacgctatccctcccgccgccactcaacctttaaagcaagtaatcccgtgattgccgctcagctctgctctaagactaatcccgaggtgcacaattatcagccacaataccatccaaacattcacccttctcagccacggtggcatccacactcgcccaacgtgagttatcctctgccaagtcctgttctgagcagcagcgacaggctgccctttggaatcgaggagaacggcggaaccccctttcttacagctgcatctgggcgccaccaccaccaacaccagcaccagcatcagcatcagcaccactcaaactacagtcttagcctgacccttgagaataaggaggggcccctccgaagtccaaactctagttcaaagagcctcaccaagctctccccagggacccccgcacttttttccgaggccgcagcccatctaaaaaagctcgaactggaaacagtaaaggccgctggtccctggccacccctgcatatcaacatcaacaaagcggaagaaaagaaagtgtcagagaaaacactgcagactccactgctgccgtcccccgtcgctgaccatgtgaagtgcaacattctcaaagcacagctggaaaatgcctctcgagtaaatattcaaggcggcaaagaggaatccccatttgtaaacattaacaagaagtctagcctgcaagacgcaagtgtgcggagtcccatacccattcgcgtggaaactgcgcaacccgccgtggagaaaccagaaatcaaacccccccgagtgaggaaactgactcggcagtattcctttgacgaggatgacttgcctcctgatctggctgaggccgtgggagtgacgaccagcaccacgaccaatactactaccgctgcaacccaggtgtctgtgcccctgccttccccaaaggtgcagaacgtgtcctccccccacaagtcggagggaaagggcctcctgtctccaggggccaagtctccgtcagatcgcgggggtgcatttactctggagcccggtgatctcctgatggatttcaccgaagctacacctttagctgagcccgcttccaacccccactgcgcgcactcccgatgcagccctcccctgagcctgccgatgaaggaagagacaacaggagtgtgcatgtatcccccgatcaagacgcgtttaataaagacctttccagtagacacaatgaatccattcccggacacttttacgaccggtccacagtttacggcagacttcagggattcaaaacttcaatgctgtcccgggcccacttctccgcttattccagcagccacgctgaggcctctgaccgaaaccgtctccactgtgcagaccatctacactacccgcaaacccgtctctctcgctgcttccgcagagacactgaggcaggagctcgaacgggagaaaatgatgaagaggctgcttatgacagagctttag

SEQ ID NO: 201782 - DNA, 1836 bp, Artificial Sequence
  derived and/or modified sequence
atggatttcaagaaatcaaagctgacattggtggtggtcgaggatgacgaccaggggcgagagcaggaacatacttttgtgtttagactggacagcgcgcgtacctgcaagcatctctggaagtgcgcagtggaacaccacgccttttttcgcctgcgaaccccgggaaatagcaagtcaaacaggagtgatttcattcgcctaggctctaggttcaggttctctggacggactgaataccaggcgacacatgggtcccgcctcaggaggacttccaccttcgagcgcaagccctccaaaaggtatccctcgaggagacactccacttttaaagctagcaaccccgtcatcgccgctcaactgtgttccaaaacgaatcccgaggttcataactatcagccccagtatcatccgaacattcatccgagccagccaaggtggcacccccactcgccgaatgtgtcctatccgttgcccagccctgtccttagttctagtgatcgcctccctttcggaatagaggagaatggcggtaccccttttctaaccgccgcaagtggaagacaccatcaccagcaccagcaccaacaccagcaccaacaccacagcaactactcactgagcctgactctggagaataaggaagggccacttcggagcccgaacagctcctctaagtccctcactaagctgtcccccggaacccctgccctgttcagcgaggctgcagctcacttgaaaaagctggaattggaaactgtaaaagcagctggtccatggcctcccctgcacattaatattaataaggctgaagaaaagaaggtgtccgaaaagacacttcaaacacctttgctgccctcaccagtagcagatcacgtgaagtgtaatatattgaaagcacagctcgagaatgcgtcaagagtaaatatccaagggggaaaggaggagagcccttttgtcaacatcaacaagaagagcagcttacaagacgcgagcgttagatcacctattcccatacgtgtggaaacagctcagcctgcggtcgaaaaacctgaaatcaaacccccacgggtgcgtaagttgaccagacaatactccttcgatgaagatgacctgccacccgatcttgcggaagctgtgggtgtgactacttcaacaacaaccaacaccacgacagcggctactcaggtcagcgtgccactcccaagtcctaaagtccaaaacgtatcaagtcctcataagtccgaggggaaggggcttctgtccccgggagcaaagtcgccctccgatagaggcggagcgtttacattagaacccggagacctgcttatggatttcacagaggccactccactggctgaacccgctagtaatccgcactgcgcacactccagatgcagccctcccttgtcacttcccatgaaagaagagacaaccggagtttgcatgtatcccccaataaaaacaagacttatcaaaacattcccagtcgacacaatgaatccctttcccgacactttcacaacagggcctcaatttaccgccgacttcagagatagtaaactccagtgttgccctggcccaacaagtccactgatccctgccgcaacactgcgaccgctgaccgagactgtgcacagtgccgaccaccttcatcacccggagacatgctttagcggaagccagtgtcgcgatacccctgctggcaccggtgagcgcgaggatgatgaaaagacggtagatgacaggaccgtcaagtttagcccctgtcacctggaggacggaatggtaccgtccgtgcggctgctgtcctctggattcgtctgttccctgtag

SEQ ID NO: 201783 - DNA, 2703 bp, Artificial Sequence
  derived and/or modified sequence
atgttgaggttcctccgcaggaccttcggtaggcgctcaatgcagaggtatgcaagaggtgctgcgggacgcggtgctgccggtctgggcgacgagcgggacggaggccctcggggaggacccgctgcggcagcatcctccagtgccttaccagcggcacccggaggatcagtgttccccgctggaggtggaccactcctgacaggtggcgctgcagtccacattagcgcagctggggctgcgaaggcaaccctctattgtcgcgtttttctgctcgatgggacagaggtctctgttgacctgcccaaacacgccaaaggccaggatttgtttgatcagatcgtctaccacttagatctggtggagaccgactattttggcttgcagttcctggatagtgcccaggtggctcactggctggatcacgctaaacctattaagaagcagatgaagatcggacctgcctatgcactgcatttcagagttaaatattactctagcgagcccaacaatctgcgagaggagttcacacgttaccttttcgtgctgcagctaagacacgacatcctctcagggaagctcaaatgtccctatgaaactgcggttgagttggccgcactgtgtctacaggctgagctcggcgaatgtgaactccccgaacatactccagaactggtatctgaatttcgatttatcccaaatcagaccgaagccatggagtttgatatattccaacggtggaaagagtgtcgcggaaagagccccgctcaggcggagctctcctatttgaacaaggctaagtggcttgagatgtatggcgttgacatgcacgtcgtgcggggtagggatggttgtgagtactccttggggctcacaccaacaggaattctgatttttgagggggcaaataagatagggctgtttttctggcccaaaatcacaaagatggacttcaaaaagagtaaactgactctagtcgtggtggaagacgacgaccagggaagagaacaagagcacaccttcgtctttcgcttagactctgcccgaacgtgcaagcacctctggaaatgtgctgttgaacatcatgccttcttccgtctgagaactccaggtaactccaaatcaaatagatccgatttcatcaggttgggttctagatttaggttctccggtcgcaccgagtaccaagctacacacggctctagactccggagaacaagcacattcgagagaaagccgtccaaaagatacccaagcagacgccacagcactttcaaggcctccaacccggtgatcgctgcccagctgtgtagcaagacaaatccagaagttcacaactatcaacctcaataccacccaaacatccaccccagccagcctcggtggcatccccactcgcctaacgtgagttatccccttccttctcccgttttgtcgagctctgacaggctgccatttggcatagaagagaacggagggactccgtttctgacggctgcgtctgggagacaccaccatcagcatcagcaccagcatcagcatcaacatcactctaattacagcttaagtctaaccttggagaacaaggagggacctttgagaagcccgaatagtagctctaaatccctcaccaagctgagtccgggtactcccgcactcttctcagaagccgcagcccacctgaaaaaacttgaattggaaaccgtcaaggctgctgggccatggccccctctgcacataaatattaacaaggccgaggagaagaaggtttcagagaaaacactgcagacacccctgttgcctagcccggtcgctgatcacgtaaaatgcaacatactgaaggcacagctcgagaatgcttctcgggtcaatatccaaggcggaaaggaagagagcccttttgtgaatatcaacaagaagtcctccctgcaggacgcatccgtccgatcccctatacccatacgcgtggaaacggcacagcctgcagtggaaaaaccagagatcaaacccccacgagtaaggaagctgaccaggcagtattcattcgatgaggacgacttaccgccagaccttgctgaagcagttggggttacaacatcaacaactacaaacaccacaaccgcagccacacaggtgagcgtccctctcccatctcccaaggttcagaatgtgtcctccccacataagtctgaggggaagggccttctgagccccggagctaagtctcccagcgatcgaggcggagcatttaccctagagccgggtgacctcctcatggatttcaccgaagccacccctcttgcagagcccgcatccaatccccattgcgcacattctcgatgctcaccaccgctgagcctcccaatgaaggaggagacgaccggagtgtgtatgtatccccctatcaaaaccaggctgatcaagacgtttcccgtggatacaatgaatccgttccccgatacgttcaccacaggaccccagtttacggcggacttcagagattccaaattgcagtgctgccccggtcctacgtcccctttaatacctgccgcaacactgagacccctcacagagacagtgagtaccgtccagaccatctacaccactaggaaacctgtaagcttggccgcaagtgccgagacactcaggcaggaactcgagagagagaagatgatgaaaaggctccttatgaccgaattgtag

SEQ ID NO: 201784 - DNA, 1836 bp, Artificial Sequence
  derived and/or modified sequence
atggacttcaagaagagcaagctgaccctggtggtggtggaggacgacgaccagggcagagagcaggagcacaccttcgtgttcagactggacagcgccagaacctgcaagcacctgtggaagtgcgccgtggagcaccacgccttcttcagactgagaacccccggcaacagcaagagcaacagaagcgacttcatcagactgggcagcagattcagattcagcggcagaaccgagtaccaggccacccacggcagcagactgagaagaaccagcaccttcgagagaaagcccagcaagagataccccagcagaagacacagcaccttcaaggccagcaaccccgtgatcgccgcccagctgtgcagcaagaccaaccccgaggtgcacaactaccagccccagtaccaccccaacatccaccccagccagcccagatggcacccccacagccccaacgtgagctaccccctgcccagccccgtgctgagcagcagcgacagactgcccttcggcatcgaggagaacggcggcacccccttcctgaccgccgccagcggcagacaccaccaccagcaccagcaccagcaccagcaccagcaccacagcaactacagcctgagcctgaccctggagaacaaggagggccccctgagaagccccaacagcagcagcaagagcctgaccaagctgagccccggcacccccgccctgttcagcgaggccgccgcccacctgaagaagctggagctggagaccgtgaaggccgccggcccctggccccccctgcacatcaacatcaacaaggccgaggagaagaaggtgagcgagaagaccctgcagacccccctgctgcccagccccgtggccgaccacgtgaagtgcaacatcctgaaggcccagctggagaacgccagcagagtgaacatccagggcggcaaggaggagagccccttcgtgaacatcaacaagaagagcagcctgcaggacgccagcgtgagaagccccatccccatcagagtggagaccgcccagcccgccgtggagaagcccgagatcaagccccccagagtgagaaagctgaccagacagtacagcttcgacgaggacgacctgccccccgacctggccgaggccgtgggcgtgaccaccagcaccaccaccaacaccaccaccgccgccacccaggtgagcgtgcccctgcccagccccaaggtgcagaacgtgagcagcccccacaagagcgagggcaagggcctgctgagccccggcgccaagagccccagcgacagaggcggcgccttcaccctggagcccggcgacctgctgatggacttcaccgaggccacccccctggccgagcccgccagcaacccccactgcgcccacagcagatgcagcccccccctgagcctgcccatgaaggaggagaccaccggcgtgtgcatgtacccccccatcaagaccagactgatcaagaccttccccgtggacaccatgaaccccttccccgacaccttcaccaccggcccccagttcaccgccgacttcagagacagcaagctgcagtgctgccccggccccaccagccccctgatccccgccgccaccctgagacccctgaccgagaccgtgcacagcgccgaccacctgcaccaccccgagacctgcttcagcggcagccagtgcagagacacccccgccggcaccggcgagagagaggacgacgagaagaccgtggacgacagaaccgtgaagttcagcccctgccacctggaggacggcatggtgcccagcgtgagactgctgagcagcggcttcgtgtgcagcctgtag

SEQ ID NO: 201785 - DNA, 2703 bp, Artificial Sequence
  derived and/or modified sequence
atgctgagattcctgagaagaaccttcggcagaagaagcatgcagagatacgccagaggcgccgccggcagaggcgccgccggcctgggcgacgagagagacggcggccccagaggcggccccgccgccgccgccagcagcagcgccctgcccgccgcccccggcggcagcgtgttccccgccggcggcggccccctgctgaccggcggcgccgccgtgcacatcagcgccgccggcgccgccaaggccaccctgtactgcagagtgttcctgctggacggcaccgaggtgagcgtggacctgcccaagcacgccaagggccaggacctgttcgaccagatcgtgtaccacctggacctggtggagaccgactacttcggcctgcagttcctggacagcgcccaggtggcccactggctggaccacgccaagcccatcaagaagcagatgaagatcggccccgcctacgccctgcacttcagagtgaagtactacagcagcgagcccaacaacctgagagaggagttcaccagatacctgttcgtgctgcagctgagacacgacatcctgagcggcaagctgaagtgcccctacgagaccgccgtggagctggccgccctgtgcctgcaggccgagctgggcgagtgcgagctgcccgagcacacccccgagctggtgagcgagttcagattcatccccaaccagaccgaggccatggagttcgacatcttccagagatggaaggagtgcagaggcaagagccccgcccaggccgagctgagctacctgaacaaggccaagtggctggagatgtacggcgtggacatgcacgtggtgagaggcagagacggctgcgagtacagcctgggcctgacccccaccggcatcctgatcttcgagggcgccaacaagatcggcctgttcttctggcccaagatcaccaagatggacttcaagaagagcaagctgaccctggtggtggtggaggacgacgaccagggcagagagcaggagcacaccttcgtgttcagactggacagcgccagaacctgcaagcacctgtggaagtgcgccgtggagcaccacgccttcttcagactgagaacccccggcaacagcaagagcaacagaagcgacttcatcagactgggcagcagattcagattcagcggcagaaccgagtaccaggccacccacggcagcagactgagaagaaccagcaccttcgagagaaagcccagcaagagataccccagcagaagacacagcaccttcaaggccagcaaccccgtgatcgccgcccagctgtgcagcaagaccaaccccgaggtgcacaactaccagccccagtaccaccccaacatccaccccagccagcccagatggcacccccacagccccaacgtgagctaccccctgcccagccccgtgctgagcagcagcgacagactgcccttcggcatcgaggagaacggcggcacccccttcctgaccgccgccagcggcagacaccaccaccagcaccagcaccagcaccagcaccagcaccacagcaactacagcctgagcctgaccctggagaacaaggagggccccctgagaagccccaacagcagcagcaagagcctgaccaagctgagccccggcacccccgccctgttcagcgaggccgccgcccacctgaagaagctggagctggagaccgtgaaggccgccggcccctggccccccctgcacatcaacatcaacaaggccgaggagaagaaggtgagcgagaagaccctgcagacccccctgctgcccagccccgtggccgaccacgtgaagtgcaacatcctgaaggcccagctggagaacgccagcagagtgaacatccagggcggcaaggaggagagccccttcgtgaacatcaacaagaagagcagcctgcaggacgccagcgtgagaagccccatccccatcagagtggagaccgcccagcccgccgtggagaagcccgagatcaagccccccagagtgagaaagctgaccagacagtacagcttcgacgaggacgacctgccccccgacctggccgaggccgtgggcgtgaccaccagcaccaccaccaacaccaccaccgccgccacccaggtgagcgtgcccctgcccagccccaaggtgcagaacgtgagcagcccccacaagagcgagggcaagggcctgctgagccccggcgccaagagccccagcgacagaggcggcgccttcaccctggagcccggcgacctgctgatggacttcaccgaggccacccccctggccgagcccgccagcaacccccactgcgcccacagcagatgcagcccccccctgagcctgcccatgaaggaggagaccaccggcgtgtgcatgtacccccccatcaagaccagactgatcaagaccttccccgtggacaccatgaaccccttccccgacaccttcaccaccggcccccagttcaccgccgacttcagagacagcaagctgcagtgctgccccggccccaccagccccctgatccccgccgccaccctgagacccctgaccgagaccgtgagcaccgtgcagaccatctacaccaccagaaagcccgtgagcctggccgccagcgccgagaccctgagacaggagctggagagagagaagatgatgaagagactgctgatgaccgagctgtag

SEQ ID NO: 201786 - DNA, 5576 bp, Artificial Sequence
  derived and/or modified sequence
caggccgccggcccgggagagcgcgcggcggcggcggcggcgggacggccccgagcgcgccctcccgcctgcggccactcgcagccggcgctggccgggccggcgcgccccgcaggcggctagagcgcggcctcggcctcggcgcgggcttgccccgggccgtagcccgcgagaggcggcgcgggcggccgagggcactgacggcgtcgcgggacgctcccgggcggcggcgcagcggcagcggcagcggcagcggcagcgcagggggcggaggcagggggcgcccccagccaggatgctgcggttcctgcgccggacctttggccgccgctccatgcagcgctacgcgcggggcgcggcggggcgcggggccgccgggctgggggacgagcgcgatggggggccacgggggggcccggccgccgccgcctcctcctcggcgctgcccgccgcgcccgggggcagcgtgttcccggcgggcggcgggcccctgctcaccggcggcgcggccgtgcacatctccgccgccggcgccgccaaggccaccctctactgccgcgtcttcctgctcgacgggaccgaagtgagcgtggacctgccgaaacatgccaaaggccaggatttgtttgatcagattgtgtaccacttggaccttgtggaaacagattactttggcctccagttcctcgactctgcccaggttgcgcactggctggatcatgccaaacccataaaaaagcagatgaaaattggacctgcttatgctttacactttcgagttaaatactattcttcagaaccaaacaaccttcgtgaggagtttacaaggtacctgtttgttttacaactcaggcatgacattctttctggaaaattgaaatgcccttatgaaacagctgtggaattagctgctctctgtctacaagcggagcttggggagtgcgagcttccagaacacacaccagagcttgtgtctgagtttcggttcattccaaatcagacagaagcaatggaatttgatatcttccagagatggaaagagtgcaggggaaagagccctgcccaggcggaactctcctatctgaataaagcgaagtggctggaaatgtatggggtagacatgcacgttgtcaggggaagagatggctgtgaatattctcttggactgaccccgacaggcatattaatctttgaaggagctaacaaaataggcttattcttttggcctaaaattaccaaaatggattttaaaaagagcaaattgacactcgtggtggtcgaggatgatgatcagggacgtgagcaagagcacacgtttgtgttccggttagacagtgccaggacctgcaaacacctttggaagtgtgcagttgagcaccacgcattcttccgactgcggacgccaggaaacagcaaatccaatagatccgactttatcaggctgggctctcgcttcagattcagtgggcggacagaatatcaagctacacatggctccaggttacgaagaaccagcacctttgagaggaagcctagtaaacgttatccatcccggagacattcaacgttcaaagcaagcaacccagtgatagcagcccagctctgctctaaaacaaatccagaagtccataattaccagcctcaatatcatcctaatatccatcccagccagccccggtggcatcctcactctccaaatgtcagctacccgctcccttccccagtgcttagcagctcggaccggttgccttttggcattgaggagaatgggggcacaccgttcctcaccgcagcttcaggaaggcatcaccaccagcaccagcatcagcatcagcaccagcaccactcaaactacagcctctcactgaccctggagaacaaagaggggcctctgaggtccccaaactccagcagcaagtcccttacaaaactgagtccaggaacacctgccttgttcagtgaagccgctgcccatctaaagaagctggaactggaaactgtgaaggctgctggaccctggcctcctctgcacatcaacataaacaaggctgaagaaaagaaagtctcggagaaaactcttcagactccacttttgccttcccctgttgcggatcatgtgaagtgtaacattctgaaagcccagttggaaaatgcttcccgagtgaacatccagggtggaaaggaggaatcaccgtttgtaaatatcaataagaaatccagtcttcaggacgctagtgtaagaagtcctattcctattcgtgtggaaactgcccagccagctgtggaaaagccggaaatcaagcctccccgagtgaggaagttaacaagacagtatagttttgatgaagacgacctccctccagacctggccgaggcagtgggagtgaccacatctacaaccacaaacaccacaacggccgccacacaagtctccgtgccgctgccgtcccccaaggtccagaatgtcagctcgcctcacaagtcagaaggcaaaggcctgctgtcccctggggccaagagcccctctgaccgaggaggtgcctttaccctggagccgggtgatcttctgatggatttcacagaagccactcctctggcagagcccgccagcaacccccactgtgcccactctcgctgttctcctccactctctctccccatgaaggaagagaccactggagtttgcatgtaccctccaatcaaaacgaggctgataaaaacattcccggttgatacaatgaacccgtttcctgatactttcaccacagggccacagtttactgcagacttcagagacagtaaattacagtgctgtcctggcccgacttccccgctgatcccagcagcgaccctgaggcctttgacagagaccgtccacagtgcagaccatttacaccacccggaaacctgtttctctggcagccagtgcagagacactccggcaggaactggagagagagaagatgatgaaaagactgttgatgaccgaactgtgaaattctccccttgtcacctggaagatggcatggtgccttctgtccgtcttctttcttcgggctttgtgtgctcactctagcacagcatacaagtgtgtgctctgttcgcccaggtctccatggttagttgaagccaatttctggcttgacttttatgggaaaagttattttatgtctcctaagcattagagtttttctattactctatgtagttgagacaggatttgataagtctaggaaaagaaagatgggaaaacgggattccttttcagaagtacctgtgtgtatctgttaataaccacaggggttaatatgatgtaggatcttttactatcaatttcaaccatttgattttgtatgattgaaacttgcaccgagctttgactgtttgttaaagagtcatttttaatgaaagaataattctttattgctggtttttcatttacactgataaatacacagatcttataaagtctttaacattcatttgtattcagatgtgagtagaagaactaaaaaaagaaagttacatatcactatgactgaaggtacttcagcttaatctgaaatataatttaacttgtgaactccttggatatgatattatttggaataaacagaatttatcattgaacccaaagtaggaaatgatagcttacattgtctaaaaatccttacaaggttaagatgattcaatatcaagaagattcagaaaattatttctaaagttgatcgattcatgtcgtattgatagaatcttgaccagaagaaattttgctctttttatatagtttcaagaaatgtgtttttaaatttttattaatgcacttgaacaactttgcaggaataaagcaaccccctaaccacaaaatatccctctaaattagttccctagctttctcaatgaatacacacatatttttacatagctatgatcgttgtgtacattctcctttgttttacttctcggcctaacacttgtctcctcttgtcaacacagattctactctcaccaatttaaatgtctttatatccatgtaacatgggtaacctcacttcaccccattattagatatttgagttatatctaatttttcactcttataaatagtgctgctatgaatgtctgtaaaaaaaaaaaactgctccttcttttggattattcccttaggaatatctccaaagagggattacaaggtcaaagagcatgaagtattttatagctcttgttttatattgccagattgctttctagaaagatccaatctttgggttggaaggaccttaaaggtcatctagtttagcctccccaccccctctgaatgcttgaatcccctcgacaatttatgatgccaccagcaatgtataagcatttctgtttaccaatagctctgccagtattgggttttgccatttttatttatttttgctagtttaataggtatgtatagttgttcttgaagagttgttttatttcattaattgctagcaaggctgagcacttttccatgtgatgatttactagttgtatttccttgtgtgtaaaatgttcattcatttcttatgaccacttgttaagaggaactgatctcatatatttgtatcagaactgtatttttatgttatattgtatagtttgctctcctgcccctctccttaaaactgaatggtgccaataatttgatactaatgactacaaaaaaaggtaatgcctcatttactagtattgttgtaaaatgaggaatgtatgtgaatattcagataaccgaggattaaccctttaagtgctgaatctttaaaattttaatatatttttttttgagggaaatctttctaaaatgtattacgcacttccctgccttagtaaacagagtatactggagagtatttaaccttttcttgatgagtcatggtcatgattataaacatcagccccttttataccttggtacggtgcagtgatatcattaagagctatcaatatgtgtagggcttggcttggccttttataggatattatgctgttctcactgatggttttttactgctctctgctctgtcagtggagctatccggggcaattgtagcgtttgggtccttttacccctatgtcccccggctatacttttaaaacagctttagctgttctttatcttgtgcacatgatacaaaatatgttcccgtacaatatggggctgtcacttcttgccaacccagcaccctcttcctcttctaacctgctttctgaggcttctgctcttcacctcctgctcgctgatggaaacctccagggcaaagctgaaggtttcttggggaagccaggaaagccagtatttcctatgtgtcagatctgcttggcttccaagaagggatgcatgggctttttggccagtgtttccaggaggctctgggcttcctgcttcttccccgcttcccccagagttcacagatgttgaagtttctgaaggttgacgtcactggaagtctgaccacaaacaagttggctgttactgtatttgaaacccagtacctttggcagctcacctctaaccagtaaaataagaggattccatggtttca

SEQ ID NO: 201787 - DNA, 5800 bp, Artificial Sequence
  derived and/or modified sequence
ggaaaaggcgccttgggagcgggcgctcggcggggcctcctcgggccccgggcgcggcgcggcgagtgggagcgagcgcgccaggaccacgcaggcgccctgctccggctggccctcggccggcgcgcggcgcgggagcagcccgcagcccgcctcccgcgcccccggcagccccctggcagcccgcagccgcccgtccggagcagcccctcggcagcccgcgcaggccgccggcccgggagagcgcgcggcggcggcggcggcgggacggccccgagcgcgccctcccgcctgcggccactcgcagccggcgctggccgggccggcgcgccccgcaggcggctagagcgcggcctcggcctcggcgcgggcttgccccgggccgtagcccgcgagaggcggcgcgggcggccgagggcactgacggcgtcgcgggacgctcccgggcggcggcgcagcggcagcggcagcggcagcggcagcgcagggggcggaggcagggggcgcccccagccaggatgctgcggttcctgcgccggacctttggccgccgctccatgcagcgctacgcgcggggcgcggcggggcgcggggccgccgggctgggggacgagcgcgatggggggccacgggggggcccggccgccgccgcctcctcctcggcgctgcccgccgcgcccgggggcagcgtgttcccggcgggcggcgggcccctgctcaccggcggcgcggccgtgcacatctccgccgccggcgccgccaaggccaccctctactgccgcgtcttcctgctcgacgggaccgaagtgagcgtggacctgccgaaacatgccaaaggccaggatttgtttgatcagattgtgtaccacttggaccttgtggaaacagattactttggcctccagttcctcgactctgcccaggttgcgcactggctggatcatgccaaacccataaaaaagcagatgaaaattggacctgcttatgctttacactttcgagttaaatactattcttcagaaccaaacaaccttcgtgaggagtttacaaggtacctgtttgttttacaactcaggcatgacattctttctggaaaattgaaatgcccttatgaaacagctgtggaattagctgctctctgtctacaagcggagcttggggagtgcgagcttccagaacacacaccagagcttgtgtctgagtttcggttcattccaaatcagacagaagcaatggaatttgatatcttccagagatggaaagagtgcaggggaaagagccctgcccaggcggaactctcctatctgaataaagcgaagtggctggaaatgtatggggtagacatgcacgttgtcaggggaagagatggctgtgaatattctcttggactgaccccgacaggcatattaatctttgaaggagctaacaaaataggcttattcttttggcctaaaattaccaaaatggattttaaaaagagcaaattgacactcgtggtggtcgaggatgatgatcagggacgtgagcaagagcacacgtttgtgttccggttagacagtgccaggacctgcaaacacctttggaagtgtgcagttgagcaccacgcattcttccgactgcggacgccaggaaacagcaaatccaatagatccgactttatcaggctgggctctcgcttcagattcagtgggcggacagaatatcaagctacacatggctccaggttacgaagaaccagcacctttgagaggaagcctagtaaacgttatccatcccggagacattcaacgttcaaagcaagcaacccagtgatagcagcccagctctgctctaaaacaaatccagaagtccataattaccagcctcaatatcatcctaatatccatcccagccagccccggtggcatcctcactctccaaatgtcagctacccgctcccttccccagtgcttagcagctcggaccggttgccttttggcattgaggagaatgggggcacaccgttcctcaccgcagcttcaggaaggcatcaccaccagcaccagcatcagcatcagcaccagcaccactcaaactacagcctctcactgaccctggagaacaaagaggggcctctgaggtccccaaactccagcagcaagtcccttacaaaactgagtccaggaacacctgccttgttcagtgaagccgctgcccatctaaagaagctggaactggaaactgtgaaggctgctggaccctggcctcctctgcacatcaacataaacaaggctgaagaaaagaaagtctcggagaaaactcttcagactccacttttgccttcccctgttgcggatcatgtgaagtgtaacattctgaaagcccagttggaaaatgcttcccgagtgaacatccagggtggaaaggaggaatcaccgtttgtaaatatcaataagaaatccagtcttcaggacgctagtgtaagaagtcctattcctattcgtgtggaaactgcccagccagctgtggaaaagccggaaatcaagcctccccgagtgaggaagttaacaagacagtatagttttgatgaagacgacctccctccagacctggccgaggcagtgggagtgaccacatctacaaccacaaacaccacaacggccgccacacaagtctccgtgccgctgccgtcccccaaggtccagaatgtcagctcgcctcacaagtcagaaggcaaaggcctgctgtcccctggggccaagagcccctctgaccgaggaggtgcctttaccctggagccgggtgatcttctgatggatttcacagaagccactcctctggcagagcccgccagcaacccccactgtgcccactctcgctgttctcctccactctctctccccatgaaggaagagaccactggagtttgcatgtaccctccaatcaaaacgaggctgataaaaacattcccggttgatacaatgaacccgtttcctgatactttcaccacagggccacagtttactgcagacttcagagacagtaaattacagtgctgtcctggcccgacttccccgctgatcccagcagcgaccctgaggcctttgacagagaccgtctccacagtgcagaccatttacaccacccggaaacctgtttctctggcagccagtgcagagacactccggcaggaactggagagagagaagatgatgaaaagactgttgatgaccgaactgtgaaattctccccttgtcacctggaagatggcatggtgccttctgtccgtcttctttcttcgggctttgtgtgctcactctagcacagcatacaagtgtgtgctctgttcgcccaggtctccatggttagttgaagccaatttctggcttgacttttatgggaaaagttattttatgtctcctaagcattagagtttttctattactctatgtagttgagacaggatttgataagtctaggaaaagaaagatgggaaaacgggattccttttcagaagtacctgtgtgtatctgttaataaccacaggggttaatatgatgtaggatcttttactatcaatttcaaccatttgattttgtatgattgaaacttgcaccgagctttgactgtttgttaaagagtcatttttaatgaaagaataattctttattgctggtttttcatttacactgataaatacacagatcttataaagtctttaacattcatttgtattcagatgtgagtagaagaactaaaaaaagaaagttacatatcactatgactgaaggtacttcagcttaatctgaaatataatttaacttgtgaactccttggatatgatattatttggaataaacagaatttatcattgaacccaaagtaggaaatgatagcttacattgtctaaaaatccttacaaggttaagatgattcaatatcaagaagattcagaaaattatttctaaagttgatcgattcatgtcgtattgatagaatcttgaccagaagaaattttgctctttttatatagtttcaagaaatgtgtttttaaatttttattaatgcacttgaacaactttgcaggaataaagcaaccccctaaccacaaaatatccctctaaattagttccctagctttctcaatgaatacacacatatttttacatagctatgatcgttgtgtacattctcctttgttttacttctcggcctaacacttgtctcctcttgtcaacacagattctactctcaccaatttaaatgtctttatatccatgtaacatgggtaacctcacttcaccccattattagatatttgagttatatctaatttttcactcttataaatagtgctgctatgaatgtctgtaaaaaaaaaaaactgctccttcttttggattattcccttaggaatatctccaaagagggattacaaggtcaaagagcatgaagtattttatagctcttgttttatattgccagattgctttctagaaagatccaatctttgggttggaaggaccttaaaggtcatctagtttagcctccccaccccctctgaatgcttgaatcccctcgacaatttatgatgccaccagcaatgtataagcatttctgtttaccaatagctctgccagtattgggttttgccatttttatttatttttgctagtttaataggtatgtatagttgttcttgaagagttgttttatttcattaattgctagcaaggctgagcacttttccatgtgatgatttactagttgtatttccttgtgtgtaaaatgttcattcatttcttatgaccacttgttaagaggaactgatctcatatatttgtatcagaactgtatttttatgttatattgtatagtttgctctcctgcccctctccttaaaactgaatggtgccaataatttgatactaatgactacaaaaaaaggtaatgcctcatttactagtattgttgtaaaatgaggaatgtatgtgaatattcagataaccgaggattaaccctttaagtgctgaatctttaaaattttaatatatttttttttgagggaaatctttctaaaatgtattacgcacttccctgccttagtaaacagagtatactggagagtatttaaccttttcttgatgagtcatggtcatgattataaacatcagccccttttataccttggtacggtgcagtgatatcattaagagctatcaatatgtgtagggcttggcttggccttttataggatattatgctgttctcactgatggttttttactgctctctgctctgtcagtggagctatccggggcaattgtagcgtttgggtccttttacccctatgtcccccggctatacttttaaaacagctttagctgttctttatcttgtgcacatgatacaaaatatgttcccgtacaatatggggctgtcacttcttgccaacccagcaccctcttcctcttctaacctgctttctgaggcttctgctcttcacctcctgctcgctgatggaaacctccagggcaaagctgaaggtttcttggggaagccaggaaagccagtatttcctatgtgtcagatctgcttggcttccaagaagggatgcatgggctttttggccagtgtttccaggaggctctgggcttcctgcttcttccccgcttcccccagagttcacagatgttgaagtttctgaaggttgacgtcactggaagtctgaccacaaacaagttggctgttactgtatttgaaacccagtacctttggcagctcacctctaaccagtaaaataagaggattccatggtttc

SEQ ID NO: 201788 - protein, 801 aa, Artificial Sequence
  derived and/or modified sequence
MEASGKLICRQRQVLFSFLLLGLSLAGAAEPRSYSVVEETEGSSFVTNLAKDLGLEQREFSRRGVRVVSRGNKLHLQLNQETADLLLNEKLDREDLCGHTEPCVLRFQVLLESPFEFFQAELQVIDINDHSPVFLDKQMLVKVSESSPPGTAFPLKNAEDLDIGQNNIENYIISPNSYFRVLTRKRSDGRKYPELVLDKALDREEEAELRLTLTALDGGSPPRSGTAQVYIEVVDVNDNAPEFEQPFYRVQISEDSPISFLVVKVSATDVDTGVNGEISYSLFQASDEISKTFKVDFLTGEIRLKKQLDFEKFQSYEVNIEARDAGGFSGKCTVLIQVIDVNDHAPEVTMSAFTSPIPENAPETVVALFSVSDLDSGENGKISCSIQEDLPFLLKSSVGNFYTLLTETPLDRESRAEYNVTITVTDLGTPRLTTHLNMTVLVSDVNDNAPAFTQTSYTLFVRENNSPALHIGSVSATDRDSGTNAQVTYSLLPPQDPHLPLASLVSINTDNGHLFALRSLDYEALQAFEFRVGASDRGSPALSSEALVRVLVLDANDNSPFVLYPLQNGSAPCTELVPRAAEPGYLVTKVVAVDGDSGQNAWLSYQLLKATEPGLFGVWAHNGEVRTARLLSERDAAKQRLVVLVKDNGEPPCSATATLHLLLVDGFSQPYLPLPEAAPAQGQADSLTVYLVVALASVSSLFLFSVLLFVAVLLCRRSRAASVGRCSVPEGPFPGHLVDVRGTGSLSQNYQYEVCLAGGSGTNEFQFLKPVLPNIQGHSFGPEMEQNSNFRNGFGFSLQLK

SEQ ID NO: 201789 - DNA, 2406 bp, Artificial Sequence
  derived and/or modified sequence
atggaggcttcagggaaactgatatgtcggcagagacaggtgcttttctcatttctcctcctcggcctgtcattggccggggcagccgaacctcgctcttacagcgtagtcgaggagacggaaggaagttcttttgtaacaaacctggccaaggatctgggtctggaacagagagagtttagccgacggggtgtccgggtggtatctagagggaacaagctccacctgcaactcaaccaggaaacggccgatctcctgcttaacgagaagttggacagagaagatctgtgcggccatacagaaccatgtgtgttgaggttccaggtgctgctcgagtctccttttgagttttttcaggctgaacttcaagtgatcgacatcaacgatcatagtcctgtgtttttagataagcagatgctggtgaaggtgtccgagagcagcccacccgggactgctttccctctcaagaatgccgaagatctggatatcggccagaataatattgaaaattatattatctcgcctaatagctatttccgagtcctgaccagaaagcgcagtgacggccgaaagtacccagaattagtcttggataaagcattggatcgggaggaggaggcggagcttcggcttaccctaactgccctggacggaggaagcccgccacgatctggcaccgcacaggtgtacatcgaggtggtggatgtcaatgacaacgcacccgaattcgagcaacctttctaccgtgttcagatcagcgaggactcccctatatctttcttggtggtgaaagtgtccgctactgatgtcgacacaggtgtgaacggagaaatttcctattcactttttcaagcttccgacgagatcagtaagacattcaaagttgattttctgaccggcgaaatccgcctaaagaagcaattggattttgaaaaatttcaatcttacgaggttaacatcgaggcccgggatgcaggtgggttcagcgggaaatgcaccgtgttaattcaggtgatcgacgtcaacgaccatgctccagaggtaactatgagcgcttttaccagtcccatccctgagaacgcacccgagactgtggtggctctctttagcgtcagtgatctggattccggagaaaacggcaagatatcctgctccatccaggaggaccttccttttctcctcaagtcctccgtaggaaacttttacacactgctgactgaaacacccctcgatcgtgagtcccgggcagaatacaacgtcaccattaccgttacggacctgggcactcccagactgactactcacctgaatatgactgtattagtgagtgatgttaatgacaacgctcctgcattcacccagactagttacacactttttgtacgggagaacaatagtcccgccctgcatattgggagtgtgagtgctactgaccgcgatagcggtaccaatgcccaagtcacgtacagtctcctccctccccaggaccctcatctgcctctcgcctctcttgtatcaattaataccgataatgggcatctgtttgcattgcggtcccttgactacgaggcactgcaggcatttgagttcagggttggggcttccgatcgaggctcaccagcattgagcagcgaggcgttagttagggtgttggtgctcgacgctaacgacaattccccctttgtactgtaccctctccagaacggtagcgccccctgcactgaacttgttcctcgagcagccgaacctgggtacctcgtcaccaaggttgtggccgtcgacggcgactcgggccaaaatgcttggctgagctatcaactgttaaaggcaacagaaccgggactattcggcgtgtgggcgcataatggggaagttagaacggcacggctcttaagcgaacgcgatgccgccaaacagcggctggtggtactggtgaaggataatggagagcctccttgttccgccactgccacacttcacctgttgttagtggacggcttcagccagccgtaccttcctttgcctgaggcagccccagcccaaggacaggccgactcactcacagtttatctcgtcgtcgctttggcatcagtatcctccttgttcttgttcagtgtgttgctattcgttgccgtgctcctctgtcgcagatctcgtgcagccagcgtgggtagatgcagtgttccagagggtcctttccctggccatctcgtcgacgtgcgaggtacgggatccctgtcacagaactaccagtacgaagtatgcttagcagggggctcggggaccaatgagttccaattccttaagcctgtactgcccaacattcaggggcactccttcggccccgagatggagcagaactctaactttcggaatgggtttgggttctccctccaactgaagtag

SEQ ID NO: 201790 - DNA, 2406 bp, Artificial Sequence
  derived and/or modified sequence
atggaggccagcggcaagctgatctgccggcagaggcaggtgctcttctccttcctgctgctgggcctgagcctggccggggctgctgagcccaggagctacagcgtggtggaggagacagagggcagcagctttgtgaccaacctggccaaggacctgggcctggagcagcgggagttcagccggcggggcgtgcgggtggtgtcccggggcaacaagctgcacctgcagctgaaccaggagacagctgacctgctgctgaatgagaagctggaccgggaggacctgtgtggccacacagagccctgtgtgctgcgcttccaggtgctgctggagagcccctttgagttcttccaggccgagctgcaggtgattgacatcaatgaccacagccctgtgttcctggacaagcagatgctggtgaaggtgtctgagagcagccccccaggcacagccttccccctgaagaatgctgaggacctggacatcggccagaacaacatcgagaactacatcatcagccccaacagctacttccgggtgctgaccaggaagagaagtgatggcaggaagtacccagagctggtgctggacaaggccctggaccgggaggaggaggccgagctgcggctgaccctgacagccctggatggcggcagccccccaagaagtggcacagcccaggtgtacatcgaggtggtggatgtgaatgacaatgcccctgagtttgagcagcccttctacagagtgcagatcagcgaggacagccccatctccttcctggtggtgaaggtgtctgccacagatgtggacaccggggtgaatggagagatctcctacagcctcttccaggccagtgatgagatcagcaagaccttcaaggtggacttcctgactggagagatccggctgaagaagcagctggactttgagaagttccagagctatgaggtgaacatcgaggccagagatgctgggggcttctctggaaaatgtactgtgctgatccaggtgattgatgtgaatgaccacgcccctgaggtgaccatgtctgccttcaccagccccatcccagaaaatgcccctgagaccgtggtggccctcttctctgtgtctgacctggacagcggggagaatggcaagatcagctgcagcatccaggaggacctgcccttcctgctgaagagctctgtgggcaacttctacaccctgctgacagagacccccctggaccgggagagcagagctgagtacaacgtgaccatcaccgtgacagacctgggcaccccccggctgaccacccacctgaacatgacagtgctggtgtctgatgtgaatgacaatgccccagccttcacccagaccagctacaccctgtttgtgcgggagaacaacagccctgccctgcacatcggctctgtgtctgccacagaccgggacagcggcaccaatgcccaggtgacctacagcctgctgcccccccaggacccccacctgcccctggccagcctggtgtccatcaacacagacaatggccacctgtttgccctgcggagcctggactatgaggccctgcaggcctttgagttccgggtgggcgccagtgaccggggcagccctgccctgagcagcgaggccctggtgcgggtgctggtgctggatgccaatgacaacagcccctttgtgctgtaccccctgcagaatggcagcgccccctgcacagagctggtgcccagggctgctgagcccggctacctggtgaccaaggtggtggccgtggatggagacagcggccagaatgcctggctgagctaccagctgctgaaggccacagagcccggcctgtttggagtgtgggcccacaacggggaggtgaggacagcccggctgctgtctgaaagagatgctgccaagcagaggctggtggtgctggtgaaggacaacggggagcccccctgcagcgccacagccaccctgcacctgctgctggtggatggcttcagccagccctacctgcccctgcctgaggccgccccagcccagggccaggccgacagcctgactgtgtacctggtggtggccctggcctctgtgagcagcctcttcctgttctctgtgctgctgtttgtggccgtgctgctgtgccgccgcagccgggccgcctctgtgggccgctgcagcgtgcctgagggccccttccctggccacctggtggatgtgcggggcaccggcagcctgagccagaactaccagtatgaggtgtgcctggccggcggcagcggcaccaatgagttccagttcctgaagcctgtgctgcccaacatccagggccacagctttggacctgagatggagcagaacagcaacttcagaaatggcttcggcttcagcctgcagctgaagtag

SEQ ID NO: 201791 - DNA, 2406 bp, Artificial Sequence
  derived and/or modified sequence
atggaggccagcggcaagctgatctgccggcagcggcaggtgctgttttcctttctcctgcttgggttaagtctcgctggcgcagcagaaccaagatcgtatagtgtggtggaagagaccgaagggtccagtttcgttaccaatcttgccaaggacctgggcctggagcagagggagttcagccggagaggtgtgagggtggtgtcaaggggtaataagctccacctccaactgaatcaggaaactgccgacctcttgttgaatgaaaaactggacagagaggatttgtgtggtcacaccgagccatgtgtgctgcgcttccaagtgctgctcgaatcgccattcgagttttttcaggctgagttgcaagtgatagatatcaacgatcactcaccagtattccttgataaacaaatgctcgtcaaagtgtcggagagttctccgcccggtaccgccttcccactcaagaacgccgaggacttggatattggtcaaaataacattgagaactatatcatctctccgaactcgtatttcagggtgctcactcgcaagcgcagtgacgggagaaaatacccggaattagtgctggataaagcattggatagggaggaagaggccgagctgaggctgactttgaccgccctcgatggcggttcgccgcctcgcagcggtaccgctcaggtgtatatcgaagtggtcgatgttaacgacaacgctccagagttcgaacagcctttctacagggtccaaatctcagaagacagccctatctcattccttgtcgtgaaggtttccgctaccgacgtggacactggcgttaacggtgagatcagttactcacttttccaagcatcggatgaaatatcaaaaactttcaaagtggacttcctcacaggcgagatcagattgaagaaacagcttgactttgagaagtttcagagctatgaggtgaacatcgaggccagggatgctggagggttctccggaaaatgcacagtgctaattcaggtcatcgatgtgaacgaccacgcccctgaggtcacaatgtccgccttcacaagccctattcccgagaacgcaccagagactgtcgttgctctcttttccgtgtcagacttggactccggcgagaatggcaagatctcatgttccatacaggaagatctgccgtttctcttgaagtcaagcgttggtaacttttacaccctgcttactgaaaccccattggacagggagagcagagctgaatacaatgtcaccatcacagtcacagatttgggtacccctcgattgactacacacctcaacatgacagttcttgttagcgatgtgaatgacaacgcacctgcatttactcagacatcatacacattgttcgtaagggagaacaattccccagccctgcacattggatcggtaagtgctaccgatcgcgattcaggaaccaacgcacaggtgacatactctctgctcccgccccaggatccgcatctgcccctagcctctctggtgagtatcaataccgataacggacatctgtttgcactccgatctttggattatgaagccctccaggcgttcgaattccgagtgggtgctagtgatcgagggtcacctgctctcagttctgaagctctggtccgagtgttggtgctggatgccaatgacaattctcctttcgtgctctacccactgcagaacggctctgctccttgcactgaattggttcctcgagcggccgagcccggttacctggtgaccaaggtggtcgcagtggatggggactcagggcagaacgcgtggctctcctatcaactgttgaaggcaacggaaccaggactattcggggtgtgggcccacaacggcgaggtgcggaccgcccgtttgctaagcgagagggacgccgccaaacaacgcctcgttgttttggtgaaggataatggggaacccccatgctcagccacagccactctgcacctcttactcgtagatggattctcacagccgtacctcccccttccagaagctgcccccgctcaggggcaggcagacagcctgacggtctacttggtcgtggccctcgccagcgtctctagtcttttcctattttccgtgctactgttcgtagctgtgcttctgtgcagacgttctagggcagcgtctgtcgggcggtgtagtgtgccggagggccccttcccgggtcacctcgtggacgtgcgcgggacaggtagtttgtctcagaactaccagtacgaggtatgccttgctggcggttccggaaccaacgagtttcagtttctcaaacctgttcttcccaatattcagggacactcattcggacctgagatggaacagaatagtaatttccgaaacggattcggattcagcctgcagctcaaatag

SEQ ID NO: 201792 - DNA, 2406 bp, Artificial Sequence
  derived and/or modified sequence
atggaagcatcaggcaaactcatctgcagacaacgccaggtgctcttcagctttctgcttcttggactgagcttggcaggcgctgcagagccaaggtcctacagtgtcgtcgaggaaacagagggaagcagctttgtgaccaatctcgccaaagatctgggtctcgagcaacgcgaattttccagaaggggcgtgagggttgtcagtcggggtaacaaacttcatctccagctcaaccaggagacagccgatttactactgaatgaaaaactggacagagaagatttatgtggacataccgaaccgtgtgtcttgcggtttcaggtgctgctcgagagcccattcgaattctttcaggcagagctgcaggttatagatatcaacgaccacagtccagttttcctcgataagcagatgttagtcaaagttagcgaaagctccccaccgggtactgccttccctctgaaaaatgcagaggatctggatatcggtcagaacaacatcgagaattacatcataagcccaaattcttacttccgagtcctgacaaggaaacgctctgacggtcggaaatatccagagctggtcctggacaaggcactcgacagggaggaggaagccgaattgcgactgactctgaccgcactcgacggcggttcaccacctcggtctggcacagctcaggtgtatatagaggtcgtcgatgtgaatgataatgcacctgagttcgagcaacctttctaccgagtgcagataagtgaagacagtcccatctccttcttagtcgtcaaggtcagcgcgaccgatgtggataccggcgttaacggcgagatatcttactcactctttcaggcctccgatgagataagcaagacttttaaggtcgactttctcacaggggagattcgactgaagaaacagttggacttcgaaaagttccaatcgtacgaggtgaacatagaggcacgtgacgccggaggcttcagcgggaagtgtaccgtcctcatccaggttatcgatgtgaatgatcacgctcccgaggttacgatgtccgctttcaccagccctatccccgagaacgcacctgagacagtggtggctctattcagcgtcagcgatctcgattcaggggaaaacggaaaaatatcatgctctatccaggaggatctcccgtttttgcttaagagttctgtgggcaatttctataccctgctgaccgagacacccctcgacagagaaagcagggccgagtataacgtcactataacagtgaccgatctggggactcctcggcttacaacacacctgaacatgactgtcctcgtctctgatgtaaatgacaatgctcccgctttcacgcaaaccagctacaccctgttcgttagggaaaacaattctcctgctcttcacatcggatctgtctcggccacagacagggattccggtaccaacgctcaggtcacatactctctgctcccccctcaggaccctcacctgccgctggcatctctggtgtctattaacaccgacaatggccacctgttcgcactgcggagcttggactacgaagccctgcaagcattcgaattccgggtgggcgcttccgacaggggctccccagccctgagctccgaggccctggttagggtcctcgtcttggacgccaacgacaacagcccatttgtgctgtaccccctccaaaacggctccgcaccttgcacagagttagtccctcgcgcagcagagcccggataccttgttactaaggtggtggcagtggacggcgattctggacagaatgcctggctgtcgtatcaactgttgaaagctactgagcctggtctgtttggcgtatgggcccacaatggggaggtgcgcactgccagactgctgtctgaaagggacgcggcaaaacagcggttggtagttctggttaaagataatggagagcctccctgcagtgccacagcaacactacaccttctgttggtggacggattttctcagccctacctgccactgccagaggcggctccggcacagggccaagccgacagcttgaccgtgtacctggtggtggcactggcttctgtgtccagcctctttctcttttcggttctgctctttgtggcggtcctgttgtgccgtcgcagccgcgctgcaagcgtagggcgttgcagcgttcctgaaggacctttcccaggacatctcgttgatgtccgtggtaccgggtcgttgtctcaaaattaccagtacgaagtctgtctggcgggagggtcaggtaccaatgagttccagttcctaaagcctgtactcccgaacatccaagggcattctttcggccctgagatggaacagaactctaatttccgcaatgggttcggcttctctcttcaactgaaatag

SEQ ID NO: 201793 - DNA, 2711 bp, Artificial Sequence
  derived and/or modified sequence
tggcgctgcaggataagaaggcacaaaccagaaccgcagctgcagctccattaaccggcaaaaagcagcagaacctggaagtccacggggagcttggatgccaaagggaggacggctgggtcctctggagaggactactcactggcatatttctgaggtatctgtagaaaaccacagcctcagatactggggactttacagtcccacagaaccgtcctcccaggaagctgaattcagcaagaacaatggaggccagcgggaagctcatttgcagacaaaggcaagtccttttttcctttctccttttgggcttatctctggcgggcgcggcggaacctagaagctattctgtggtggaggaaactgagggcagctcctttgtcaccaatttagcaaaggacctgggtctggagcagagggaattctccaggcggggggttagggttgtttccagagggaacaaactacatttgcagctcaatcaggagaccgcggatttgttgctaaatgagaaattggaccgtgaggatctgtgcggtcacacagagccctgtgtgctacgtttccaagtgttgctagagagtcccttcgagttttttcaagctgagctgcaagtaatagacataaacgaccactctccagtatttctggacaaacaaatgttggtgaaagtatcagagagcagtcctcctgggactgcgtttcctctgaagaatgctgaagacttagatataggccaaaacaatattgagaactatataatcagccccaactcctattttcgggtcctcacccgcaaacgcagtgatggcaggaaatacccagagctggtgctggacaaagcgctggaccgagaggaagaagctgagctcaggttaacactcacagcactggatggtggctctccgcccagatctggcactgctcaggtctacattgaagttgtcgatgtcaatgataatgcccctgaatttgagcagcctttctatagggtgcagatctctgaggacagtccaataagcttcctggttgtgaaggtctctgccacggatgtagacacaggagtcaacggagagatttcctattcacttttccaagcttcagatgagataagcaaaacttttaaggtcgatttcttgacaggagaaattcgactaaagaaacaacttgatttcgaaaaatttcagtcctatgaagtcaatatcgaggcgagagatgctggaggcttttctggaaaatgcaccgttctgattcaagtgatagatgtgaacgaccatgccccagaagttaccatgtctgcatttaccagcccaatacctgagaatgcgcctgaaactgtggttgcacttttcagtgtttcagaccttgattcaggagaaaatgggaaaataagttgctccattcaggaggatctacccttcctcctgaaatcttctgtggggaacttttacaccctactaacagagacaccactagacagagaaagcagagccgagtacaacgtcactatcaccgtcactgacttagggacacccaggctgacaacacatctcaatatgaccgtgctggtgtcggacgtcaatgacaacgcccccgccttcacccaaacctcctacaccctgttcgtccgcgagaacaacagccccgccctgcacatcggcagcgtcagcgccacagacagagactcgggcaccaacgcccaggtcacctactcgctgctgccgccccaggatccgcacctgcccctcgcctccctggtctccatcaacacagacaacggccacctgttcgccctcaggtcgctggactacgaggccctgcaggcgttcgagttccgggtgggcgcttcagaccgcggctccccggctttgagcagcgaggcgctggtgcgcgtgctggtgctggacgccaacgacaactcgcccttcgtgctgtacccgctgcagaatggctccgcgccctgcaccgagctggtgccccgggcggccgagccgggctacctggtgaccaaggtggtggcggtggacggcgactcgggccagaacgcctggctgtcgtaccagctgctcaaggccacggagcccgggctgttcggtgtgtgggcgcacaatggcgaggtgcgcaccgccaggctgctgagcgagcgcgacgcggccaagcagaggctggtggtgctggtcaaggacaatggcgagcctccgtgctcggccaccgccacgctgcacttgctcctggtggacggcttctcccagccctacctgccgcttccggaggctgccccagcccagggccaggccgactctctcaccgtctacctggtggtggcgttggcctcggtgtcttcgctcttcctcttctcggtgctcctgttcgtggcggtgctgctgtgtaggaggagcagggcggcctcggtgggtcgctgctcagtgcctgagggcccctttccagggcatctggtggacgtgaggggcaccgggagcctgtctcagaactatcagtacgaggtgtgcctggcaggaggctcagggacgaatgagttccagttcctgaaaccagtattacctaatattcagggccattcttttgggccagaaatggaacaaaactctaactttaggaatggctttggtttcagccttcagttaaagtaattgatttcatattatatattttaatttttatgatcaattcaaaggaatggttttctgtca

SEQ ID NO: 201794 - DNA, 2406 bp, Artificial Sequence
  derived and/or modified sequence
atggaggccagcggcaagctgatctgcagacagagacaggtgctgttcagcttcctgctgctgggcctgagcctggccggcgccgccgagcccagaagctacagcgtggtggaggagaccgagggcagcagcttcgtgaccaacctggccaaggacctgggcctggagcagagagagttcagcagaagaggcgtgagagtggtgagcagaggcaacaagctgcacctgcagctgaaccaggagaccgccgacctgctgctgaacgagaagctggacagagaggacctgtgcggccacaccgagccctgcgtgctgagattccaggtgctgctggagagccccttcgagttcttccaggccgagctgcaggtgatcgacatcaacgaccacagccccgtgttcctggacaagcagatgctggtgaaggtgagcgagagcagcccccccggcaccgccttccccctgaagaacgccgaggacctggacatcggccagaacaacatcgagaactacatcatcagccccaacagctacttcagagtgctgaccagaaagagaagcgacggcagaaagtaccccgagctggtgctggacaaggccctggacagagaggaggaggccgagctgagactgaccctgaccgccctggacggcggcagcccccccagaagcggcaccgcccaggtgtacatcgaggtggtggacgtgaacgacaacgcccccgagttcgagcagcccttctacagagtgcagatcagcgaggacagccccatcagcttcctggtggtgaaggtgagcgccaccgacgtggacaccggcgtgaacggcgagatcagctacagcctgttccaggccagcgacgagatcagcaagaccttcaaggtggacttcctgaccggcgagatcagactgaagaagcagctggacttcgagaagttccagagctacgaggtgaacatcgaggccagagacgccggcggcttcagcggcaagtgcaccgtgctgatccaggtgatcgacgtgaacgaccacgcccccgaggtgaccatgagcgccttcaccagccccatccccgagaacgcccccgagaccgtggtggccctgttcagcgtgagcgacctggacagcggcgagaacggcaagatcagctgcagcatccaggaggacctgcccttcctgctgaagagcagcgtgggcaacttctacaccctgctgaccgagacccccctggacagagagagcagagccgagtacaacgtgaccatcaccgtgaccgacctgggcacccccagactgaccacccacctgaacatgaccgtgctggtgagcgacgtgaacgacaacgcccccgccttcacccagaccagctacaccctgttcgtgagagagaacaacagccccgccctgcacatcggcagcgtgagcgccaccgacagagacagcggcaccaacgcccaggtgacctacagcctgctgcccccccaggacccccacctgcccctggccagcctggtgagcatcaacaccgacaacggccacctgttcgccctgagaagcctggactacgaggccctgcaggccttcgagttcagagtgggcgccagcgacagaggcagccccgccctgagcagcgaggccctggtgagagtgctggtgctggacgccaacgacaacagccccttcgtgctgtaccccctgcagaacggcagcgccccctgcaccgagctggtgcccagagccgccgagcccggctacctggtgaccaaggtggtggccgtggacggcgacagcggccagaacgcctggctgagctaccagctgctgaaggccaccgagcccggcctgttcggcgtgtgggcccacaacggcgaggtgagaaccgccagactgctgagcgagagagacgccgccaagcagagactggtggtgctggtgaaggacaacggcgagcccccctgcagcgccaccgccaccctgcacctgctgctggtggacggcttcagccagccctacctgcccctgcccgaggccgcccccgcccagggccaggccgacagcctgaccgtgtacctggtggtggccctggccagcgtgagcagcctgttcctgttcagcgtgctgctgttcgtggccgtgctgctgtgcagaagaagcagagccgccagcgtgggcagatgcagcgtgcccgagggccccttccccggccacctggtggacgtgagaggcaccggcagcctgagccagaactaccagtacgaggtgtgcctggccggcggcagcggcaccaacgagttccagttcctgaagcccgtgctgcccaacatccagggccacagcttcggccccgagatggagcagaacagcaacttcagaaacggcttcggcttcagcctgcagctgaagtag

SEQ ID NO: 201795 - protein, 526 aa, Artificial Sequence
  derived and/or modified sequence
MVAKDYPFYLTVKRANCSLELPPASGPAKDAEEPSNKRVKPLSRVTSLANLIPPVKATPLKRFSQTLQRSISFRSESRPDILAPRPWSRNAAPSSTKRRDSKLWSETFDVCVNQMLTSKEIKRQEAIFELSQGEEDLIEDLKLAKKAYHDPMLKLSIMTEQELNQIFGTLDSLIPLHEELLSQLRDVRKPDGSTEHVGPILVGWLPCLSSYDSYCSNQVAAKALLDHKKQDHRVQDFLQRCLESPFSRKLDLWNFLDIPRSRLVKYPLLLREILRHTPNDNPDQQHLEEAINIIQGIVAEINTKTGESECRYYKERLLYLEEGQKDSLIDSSRVLCCHGELKNNRGVKLHVFLFQEVLVITRAVTHNEQLCYQLYRQPIPVKDLLLEDLQDGEVRLGGSLRGAFSNNERIKNFFRVSFKNGSQSQTHSLQANDTFNKQQWLNCIRQAKETVLCAAGQAGVLDSEGSFLNPTTGSRELQGETKLEQMDQSDSESDCSMDTSEVSLDCERMEQTDSSCGNSRHGESNV

SEQ ID NO: 201796 - DNA, 1581 bp, Artificial Sequence
  derived and/or modified sequence
atggtggcgaaggattatcctttctatctgactgtgaaacgggctaattgctccctcgagctgcctccagcgtcgggacctgcaaaagacgccgaagaacctagtaacaagagagtgaaaccactcagtcgtgtgacatccctcgccaacctgatccctcctgtgaaggccacacctttaaaacggttttcccagaccctgcagaggagcatttcattccgctccgagagcaggcccgacatattggcccctcgcccctggagtaggaacgccgccccttcttcaaccaagcgcagagactccaagctgtggagcgaaacctttgacgtgtgcgtgaaccagatgcttacctcaaaggagattaaaagacaggaggccattttcgagctttctcagggtgaggaggacctaatcgaggacctgaaattggctaaaaaggcatatcacgacccaatgctgaaactgtccatcatgaccgaacaggagctcaaccaaatctttggaacccttgattctctcatccccctccacgaggaactgctatcacagctgcgggacgttaggaagcccgatgggtcgacagagcacgtgggacccatcttggtgggttggttgccttgcctctcttcttacgactcttattgtagcaatcaggtagccgcaaaggctctactggaccacaagaaacaggaccacagagtacaggattttcttcagagatgtttggaaagcccattcagcaggaaactggatctgtggaacttcttagatatccccagatccagactggtgaaatatccgctgctcctccgcgagatcctgagacatactccaaacgataaccctgatcagcaacatctggaagaagcaatcaacataatccagggaatcgtggccgagatcaacactaaaaccggcgagtcagagtgtagatactacaaagaacgactgctgtatctggaggaggggcagaaagacagcctgatcgatagcagcagggtgctatgttgccatggcgaattaaaaaataatcgcggtgttaagctacacgttttcctgttccaggaagttctggtgataactcgcgctgttacccataatgagcagctttgttaccagctgtatcgccagccaattcccgtaaaggacctcctgttagaggacttgcaggacggggaagtgcgactgggtgggtccctgcgcggagcgttctccaataatgaaaggatcaagaatttcttcagagtctcgtttaagaacgggtctcagtcacagacccatagcctgcaagcgaacgacacttttaataagcaacaatggctcaattgtatccgccaggcaaaagagacagtgctgtgtgcggcgggccaagccggcgtgttggactccgaggggtccttcctgaatcctactactggctctcgagagttgcagggtgaaaccaagctggaacagatggatcaaagcgattcagaatccgattgttccatggatactagtgaggtcagccttgactgtgagcgtatggaacaaactgactcttcttgcggtaattctaggcatggggagagtaatgtctag

SEQ ID NO: 201797 - DNA, 1581 bp, Artificial Sequence
  derived and/or modified sequence
atggtggccaaggactaccccttctacctgactgtgaagagggccaactgcagcctggagctgcccccagccagcggccctgccaaggatgctgaggagcccagcaacaagagggtgaagcccctgagccgggtgaccagcctggccaacctgatcccccctgtgaaggccacccccctgaagcgcttcagccagaccctgcagaggagcatctccttccgctctgagagcaggccagacatcctggccccccggccctggagcagaaatgctgcccccagcagcaccaagaggcgggacagcaagctgtggagcgagacctttgatgtgtgtgtgaaccagatgctgaccagcaaggagatcaagaggcaggaggccatctttgagctgagccagggcgaggaggacctgattgaggacctgaagctggccaagaaggcctaccatgaccccatgctgaagctgagcatcatgacagagcaggagctgaaccagatcttcggcaccctggacagcctcatccccctgcacgaggagctgctgagccagctgagagatgtgaggaagccagatggcagcacagagcacgtgggccccatcctggtgggctggctgccctgcctgagcagctatgacagctactgcagcaaccaggtggccgccaaggccctgctggaccacaagaagcaggaccaccgggtgcaggacttcctgcagcgctgcctggagagccccttcagcaggaagctggacctgtggaacttcctggacatccccaggagccggctggtgaagtaccccctgctgctgcgggagatcctgcggcacaccccaaatgacaacccagaccagcagcacctggaggaggccatcaacatcatccagggcatcgtggccgagatcaacaccaagacaggagagagtgaatgtcgctactacaaggagcggctgctgtacctggaggagggccagaaggacagcctgattgacagcagccgggtgctgtgctgccacggggagctgaagaacaacagaggagtgaagctgcacgtgttcctgttccaggaggtgctggtgatcaccagggctgtgacccacaatgagcagctgtgctaccagctgtaccggcagcccatccctgtgaaggacctgctgctggaggacctgcaggatggagaggtgcggctgggcggcagcctgcggggggccttcagcaacaatgaaagaatcaagaacttcttccgggtgtccttcaagaatggcagccagagccagacccacagcctgcaggccaatgacaccttcaacaagcagcagtggctgaactgcatccggcaggccaaggagaccgtgctgtgtgccgccggccaggccggcgtgctggacagcgagggcagcttcctgaaccccaccaccggcagccgggagctgcagggcgagaccaagctggagcagatggaccagagcgacagcgagagtgactgcagcatggacaccagcgaggtgtccctggactgtgagaggatggagcagacagacagcagctgtggcaacagcagacatggagagagcaatgtgtag

SEQ ID NO: 201798 - DNA, 1581 bp, Artificial Sequence
  derived and/or modified sequence
atggtggccaaggactaccccttctacctgaccgtgaagcgggccaattgtagtttggagctaccacctgcttctggacctgcaaaggacgccgaggagccttcaaacaagagggttaagccactctcaagagtcacgagcctggccaacttgatcccccctgtgaaagcaacccctctcaaaagatttagtcagacccttcaaaggagcatcagtttcagaagcgaaagtagacccgacattttggcacccagaccctggtctcgaaacgcagcaccttcatcaaccaagcgccgggatagcaagctttggtccgaaacctttgacgtttgtgtcaatcagatgttgacatcgaaggagattaaacgacaggaggccatcttcgagttgtcacaaggcgaggaggaccttattgaagatctgaagctggccaaaaaagcctatcatgaccccatgctgaaactgtcgatcatgactgagcaggagctgaatcagatctttggaaccctggatagcctaatccctctgcatgaagaacttctctcccagctgcgcgacgtgcgaaaacccgatggtagcactgagcatgtcgggcccatcctggtcggctggctaccctgtctgagctcatatgatagctactgctctaaccaggtggcagccaaggcgctgctggaccataagaagcaggatcacagggtgcaagacttcctccagagatgcctcgaaagtcccttctcacgcaaactcgacctgtggaatttcctggacatacccagaagccgcctggtgaagtatcctctgctactgagggagattctcagacatacacccaacgacaaccccgatcagcaacacctcgaggaagcgattaatatcatccaaggaatcgtagccgaaataaatactaaaacgggcgagagcgagtgccggtactataaagaacggctgctgtatttagaggaaggacagaaagattctcttattgacagctctcgcgtgctatgttgccatggcgagctcaaaaataatcgcggcgtgaaactccatgtctttctcttccaggaggtgcttgtcattactcgtgccgtgacccacaacgagcagctgtgctatcagctttaccggcagcccatccccgtgaaagatcttctcctggaagacttgcaggatggcgaggttcggctcggagggtcactccgcggggctttttcaaacaacgagaggatcaagaatttctttcgcgtgtcctttaaaaatggatctcagtctcaaactcacagtcttcaggctaacgacaccttcaacaaacaacagtggctgaactgcatacgtcaggctaaagagacggtcctctgtgctgcaggacaggcgggtgtcttagacagtgagggttcttttttaaaccctactacaggctccagagaactgcagggcgagacgaaactggagcagatggaccagtctgactccgaatctgattgttcaatggatacatcagaagtgagcctggattgcgagagaatggaacagactgatagtagctgcgggaattctcggcacggagaaagtaatgtatag

SEQ ID NO: 201799 - DNA, 1581 bp, Artificial Sequence
  derived and/or modified sequence
atggtcgctaaggattaccctttctatctgactgtcaagcgtgcaaactgtagcctggagctgccccctgcaagcggcccagctaaagacgcagaagaaccctccaacaagagagtcaagcccttatcacgcgtgacttctctggccaaccttattccaccagtcaaagcgacgccgctaaaacggttttcccagacattgcagagatctatctcctttaggtccgaaagtcgtccggatatcttagccccaagaccttggtcacgcaacgccgcaccatccagcactaagcgccgagactctaaactctggagtgagactttcgatgtgtgcgtgaatcaaatgctcactagtaaggagattaagagacaggaggcgatcttcgagctgagccagggcgaagaggatctcatcgaggacctgaaattagccaaaaaggcttaccacgatcccatgctgaaactctctattatgaccgaacaggaactgaaccagatcttcggaactctggactctctaattccactgcatgaggaactcctgtcacagcttcgcgacgtcaggaagccggacggcagcaccgagcacgtagggccaatactggtgggctggctgccctgcctgagttcatatgattcttattgtagcaatcaggtggccgctaaagccctactggaccacaaaaagcaagaccatagggttcaagactttcttcaaagatgcctcgaatctcctttcagtcgaaaactggatctttggaatttcttggatattccacgcagccgcctagttaaataccctctcctcctcagggaaattcttcgccatactcctaatgataacccagatcaacaacatttggaagaggccattaatattatacagggaattgttgcagaaattaatactaaaacgggcgagtcagagtgtaggtattacaaggagcggctgctatatctggaggaaggccagaaggatagtcttatcgactctagtagggtgctgtgctgccatggagagcttaaaaacaatagaggggtgaagctgcacgttttcctatttcaagaggtcctcgtcatcactagggccgtaacccataacgaacagctctgctaccaattgtaccggcagcccatccccgtgaaggatcttctccttgaagacctccaagatggagaggtgaggctgggaggctcattgagaggagcattttctaacaatgagaggattaagaattttttccgggtgtcttttaagaacggctcgcagagccagacacatagcctccaagccaacgatacgttcaataagcagcagtggctgaattgcattagacaggcaaaggagacagtgctctgcgctgcagggcaggcaggcgtgttggactcagagggctcattcctgaaccctaccaccggatcccgggagcttcagggagaaacgaagctggagcaaatggaccaatccgactcggaaagtgattgttcaatggacaccagcgaagtttcactggactgcgaacgcatggagcagaccgactctagctgtggcaatagcaggcacggggagtccaatgtctag

SEQ ID NO: 201800 - DNA, 3602 bp, Artificial Sequence
  derived and/or modified sequence
cactcggctccggagcccagtcgagtcctgcccggctagaagccggctgtcggtctccgtgtcgccgccgccgcccggcatcgtggagctggggcccccttttgcctgggagttttgtagtcgcctagggtcagcggtgacatcccaaagggcaggcccggcagccgccatggtggccaaggattaccccttctacctcacggtcaagagagcgaactgcagcctggagctacccccggccagcggtccggccaaggacgctgaggagcctagtaataaacgggtcaaacccctttcccgagtcacgtcgctagcaaacctcatcccgcccgtgaaggccacgccattaaagcgcttcagtcaaaccctgcagcgctccattagcttccgcagtgagagccgccctgacatcctcgccccccgaccctggtccagaaatgccgccccctcgagcacgaaacggagagatagcaagctgtggagtgagaccttcgatgtgtgcgtcaatcagatgcttacatccaaggaaatcaaacgtcaggaggcgatctttgagctttcccaaggagaagaagacttgatagaagacttgaaattagcaaaaaaggcctatcatgaccccatgctgaaactctccataatgacagaacaagagttgaatcaaatttttggaacactggactctctaattcctctacatgaagagctccttagtcagcttcgagatgttaggaagcctgatggctcgactgaacatgttggtcccatcctcgtgggctggctcccttgcctcagctcctatgatagctactgcagcaatcaagtagccgccaaagctctgctggaccacaaaaagcaagatcaccgagtccaggatttcctacagcgatgtttagaatccccctttagccgcaaactagatctctggaatttcctcgatattccaagaagccgcctggtaaaataccctctgcttctccgagaaatcttgaggcacacaccaaatgataatccagatcagcagcacttggaagaagctataaatatcattcagggaattgtggcagaaatcaacaccaagactggtgaatctgaatgccgctattataaagagcggcttctttacttggaagaaggccagaaagactccctgatcgacagctctcgagtcttgtgttgtcatggtgaactgaagaacaatcggggcgtgaaactgcatgttttcctgttccaagaagtgcttgtgatcactcgagccgtcacccacaatgagcagctttgctaccagctgtaccgtcagccaatccccgtgaaagacctcctgctggaagacctccaggatggagaagtgaggctgggtggctccctgcgaggggcattcagcaacaatgagagaattaaaaacttcttcagagtcagtttcaaaaatggatcccaaagtcagacccactcgctacaagccaatgacactttcaacaaacagcagtggcttaactgtattcgtcaagccaaagaaacagttttgtgtgctgccgggcaagctggggtgcttgactccgagggatcgttcctaaatcccaccaccgggagcagagagctacagggagaaacaaaacttgagcagatggaccaatcggacagtgagtcagactgtagtatggacacgagtgaggtcagcctcgactgtgagcgcatggaacagacagactcttcctgtggaaacagcaggcacggtgaaagtaacgtctgacagaagcatgtgcacttcgggaagcaggcctgcatcttacctgtacagtatttgcattccacagatggaacggtttggagaagcactttttcatacttttgtgaaagtatacatgttggcccagtctctcgtatctgtacctttgtccctagtactgtaactgccaatctgtctgtgtaagctggaatctgtggcaactattaccctgtgttgtatttcccaagtgtctggatggatggagaggtactcaaacaagttactttcagttgtcctgctggattttaaaaaaatagaaaaagaatctcaaaactactgttttacatagattgtttgaagagtccttcctcttgtgcttctgtaccactttcccagctcttagatgtggtagctaaaggcacggaatttagacggccttgtaaatagggcatgaggaactcatctgtgtattgggatggtattagagagagaatcaggaaagaccaactcatgaagtgaacttggtttgatcttactcaactagaaagcttgaaaacatccctggggattctgaaggcttaattttgcaaaggaggatgcattgtctgaactttgcaacttcatccagtgcaagtttgatgcaagaatgtattaggacataaaatagaggctgaccttaaaagggccaggacagaagcggctgccagctctgaatctttaactgaaatgcacatggcaccaggaggtgtctctcatagttggttgctagcctaaaacatcagaatagaacccaaagggcttaggaaggcctgccaggataacaagaaggccctgtattcattgtgtttcatctgcctaggcctactcattattttagagaatgaatgaagcaacaaggaagagagaccatgactctatcgatgacactgtttatagaaacacaggagaggaagaatttggaatgaaaagcacttcgtcagaaccttctgtgggagccattgagagaaaagcatggtccagtgccttctgagaaaggccagagctttgggctttcctgctctgcttttgggtcgtcaatttgccatctctggttctgtgctataatcagaattgtaattatgttctccagaggccaatttcattaactctgattaattagaatcagctagccagattagtaacctctttgtccagccttgatttacagtgcagggtaaagtgcagaccttaaaaacagctaagtacctagaagagctccctgcaagtgtaaatattaaggatgacctgtgcaaaattatacccacaccagcactagtggtaattattctaaattattgccaaaaagttttttttaatctgtctttcaagtttacagaaaagaaagcagtaaatgcattgatgtcattttattatgtacatatatcatgtgcattcaagctgtgtgacaagatatatcaatataaaaacaaggtatatactttattattttttgaaaacaaggatattgtgatcaattttaccctgtaaaacatatttctgtatttataggtcttaaacatgatgaattttttctattacaagtttatttaaaactgctttctcaagtcgttattgatacagcaagtgaacctgctgcagacagaagcagaggaaagccaagaacagcctttattggtgaagaaaagaatgaatgattctttgtaggcgccatcagccacttttagaagccatcagccagtgtgttgggaaaagaggtttgtcaagtgttggcctatgggaaggtggtcaatgaatgttttgatgaaatgaatgtttttgtataatggccttaaacttttctggaagtatttcaaataaattacattattaagtcatc

SEQ ID NO: 201801 - DNA, 1581 bp, Artificial Sequence
  derived and/or modified sequence
atggtggccaaggactaccccttctacctgaccgtgaagagagccaactgcagcctggagctgccccccgccagcggccccgccaaggacgccgaggagcccagcaacaagagagtgaagcccctgagcagagtgaccagcctggccaacctgatcccccccgtgaaggccacccccctgaagagattcagccagaccctgcagagaagcatcagcttcagaagcgagagcagacccgacatcctggcccccagaccctggagcagaaacgccgcccccagcagcaccaagagaagagacagcaagctgtggagcgagaccttcgacgtgtgcgtgaaccagatgctgaccagcaaggagatcaagagacaggaggccatcttcgagctgagccagggcgaggaggacctgatcgaggacctgaagctggccaagaaggcctaccacgaccccatgctgaagctgagcatcatgaccgagcaggagctgaaccagatcttcggcaccctggacagcctgatccccctgcacgaggagctgctgagccagctgagagacgtgagaaagcccgacggcagcaccgagcacgtgggccccatcctggtgggctggctgccctgcctgagcagctacgacagctactgcagcaaccaggtggccgccaaggccctgctggaccacaagaagcaggaccacagagtgcaggacttcctgcagagatgcctggagagccccttcagcagaaagctggacctgtggaacttcctggacatccccagaagcagactggtgaagtaccccctgctgctgagagagatcctgagacacacccccaacgacaaccccgaccagcagcacctggaggaggccatcaacatcatccagggcatcgtggccgagatcaacaccaagaccggcgagagcgagtgcagatactacaaggagagactgctgtacctggaggagggccagaaggacagcctgatcgacagcagcagagtgctgtgctgccacggcgagctgaagaacaacagaggcgtgaagctgcacgtgttcctgttccaggaggtgctggtgatcaccagagccgtgacccacaacgagcagctgtgctaccagctgtacagacagcccatccccgtgaaggacctgctgctggaggacctgcaggacggcgaggtgagactgggcggcagcctgagaggcgccttcagcaacaacgagagaatcaagaacttcttcagagtgagcttcaagaacggcagccagagccagacccacagcctgcaggccaacgacaccttcaacaagcagcagtggctgaactgcatcagacaggccaaggagaccgtgctgtgcgccgccggccaggccggcgtgctggacagcgagggcagcttcctgaaccccaccaccggcagcagagagctgcagggcgagaccaagctggagcagatggaccagagcgacagcgagagcgactgcagcatggacaccagcgaggtgagcctggactgcgagagaatggagcagaccgacagcagctgcggcaacagcagacacggcgagagcaacgtgtag

SEQ ID NO: 201802 - protein, 290 aa, Artificial Sequence
  derived and/or modified sequence
MSSYFVNPLYSKYKAAAAAAAAAGEAINPTYYDCHFAPEVGGRHAAAAAALQLYGNSAAGFPHAPPQAHAHPHPSPPPSGTGCGGREGRGQEYFHPGGGSPAAAYQAAPPPPPHPPPPPPPPPCGGIACHGEPAKFYGYDNLQRQPIFTTQQEAELVQYPDCKSSSGNIGEDPDHLNQSSSPSQMFPWMRPQAAPGRRRGRQTYSRFQTLELEKEFLFNPYLTRKRRIEVSHALALTERQVKIWFQNRRMKWKKENNKDKFPVSRQEVKDGETKKEAQELEEDRAEGLTN

SEQ ID NO: 201803 - protein, 106 aa, Artificial Sequence
  derived and/or modified sequence
MFPWMRPQAAPGRRRGRQTYSRFQTLELEKEFLFNPYLTRKRRIEVSHALALTERQVKIWFQNRRMKWKKENNKDKFPVSRQEVKDGETKKEAQELEEDRAEGLTN

SEQ ID NO: 201804 - DNA, 1879 bp, Artificial Sequence
  derived and/or modified sequence
tgctgtggtgcgaaaatgcctcgccggtgcgcaccgggtcggcagcctcggcggcgggggcgagattggcgggaggggggcgcggggggggcgcggtaagaggtggcggcgggcagagggtgttttttttcttttccctccagagccggggtttgtaaaccgaggccagagtgtccccgtgggccgagcgcacttttttcttgtccgggtgcgctcagtcactggtgcctgagaggaaacagtggaggcagcggggcaggtcgcctggggcgtcggcgattatattgcggccgagccggggcgcgccgggaaaggccgggagggcggcggcgcgcgggggctgggcgaggccccgcgacccgcgagggaggcggcgcgaagccgaggcggcgggcgcaagagccgggcatgagcgcccagtagctgagcgcccgcggctgcctggcctcagaagcgacgcgcgagcgcgggcgggcggcagcagcgacgtagcccggcggtcccggcggcgagagcagccgccccacaggcccccgcggcagtgcggccgagtcgaggctcgctctctggctgcttagcgccgcccgcccgcccggggccgccgccgctgacgccccaatgagttcgtacttcgtgaacccgctgtactccaagtacaaggcggcggctgcggcggcggcggcggcgggcgaggccatcaatcccacttactacgactgtcacttcgcgcccgaggtcggcggccgtcacgccgccgccgcagcagccctgcagctctatggcaacagcgccgccggcttcccgcacgcgcccccgcaggcgcacgcgcacccgcacccgtccccgccgccctccgggactgggtgcggcggtagggaaggccggggccaggagtacttccaccccggcgggggcagcccggccgctgcctaccaggccgccccccctcctcctccgcatcctccgcctccgccgccacctcccccctgcggcgggattgcctgtcacggggagcccgcgaagttttacggatacgataacttacagagacagccgatttttacgacccagcaagaggccgagctggtacaatatcctgactgtaaatcgtccagtggtaatattggcgaggacccagaccacttaaatcagagctcgtctccttctcaaatgtttccgtggatgagaccacaagcagctcctggtagacgaagaggaagacaaacctacagtcgcttccaaactctagagttggaaaaggaatttctttttaacccctatctgaccaggaaaagaagaatcgaggtttcccacgccctagccctcaccgagagacaggtaaaaatctggttccagaacaggagaatgaaatggaaaaaggaaaacaacaaggacaaatttcccgtttcccggcaggaggtgaaggacggggaaacgaaaaaggaagcccaagagctggaggaagacagagccgaaggcctgacaaattaacttctacctttaaaatttaccacagactattaaaactaataatcaccatatgctgtggacaccacctattttctttgttggaaaggaccttacctgtgtttcaagctaccttcatgtcactgctcttgaggttttctgtgctttgagagggatttgggtgtttaaaaaagtttctagtatcacatagaagctgtccttgagctgtcctatggaagggtaatttgatactgaccttgtagctatatttttataatggtttttaatgtctgagctagtgatttgcctcaacaacgtaaacttcctaatgattagcacttaataattgcatataaaatgctttattaattaaacaagtgcacttgaacattttaatatttgtggtgagtaa

SEQ ID NO: 201805 - DNA, 873 bp, Artificial Sequence
  derived and/or modified sequence
atgagttcatactttgtgaaccccctttactccaaatataaggctgccgccgctgctgcagccgctgctggagaagctataaatccgacctattacgattgccattttgctccagaggtgggtggtaggcacgctgctgccgctgctgctctccagctgtatgggaacagtgccgccggcttcccacacgcccccccacaggcacacgcccatccccatcctagccctcccccaagtggcacaggctgtggggggagagagggtcgaggccaggaatacttccaccccggaggcggcagtccggcagccgcgtatcaagctgccccgcctcctcccccacatcccccacccccacccccaccccctccctgcgggggcattgcctgtcacggtgaacctgcaaagttttacggatacgacaacttacaacgccaaccgatcttcacgacgcagcaggaagcggaactcgtccagtaccctgactgcaaatcttcctccggcaatataggcgaagacccggatcaccttaatcaatccagtagcccatcacaaatgttcccttggatgcgcccacaggccgcgcccggacgccggcggggccggcagacatactccaggtttcaaacccttgagctggagaaggaattcctcttcaatccctacctcacccggaaacgaagaatcgaggtatctcacgccttagctctcacggaaaggcaggtcaagatatggttccagaaccgaagaatgaaatggaaaaaggaaaacaacaaagacaagttccccgtaagccgccaagaagtcaaggatggcgagacgaaaaaggaagctcaggagctcgaggaggacagggcagaaggcctgaccaactag

SEQ ID NO: 201806 - DNA, 2583 bp, Artificial Sequence
  derived and/or modified sequence
tccgtgcagtgctgtggtgcgaaaatgcctcgccggtgcgcaccgggtcggcagcctcggcggcgggggcgagattggcgggaggggggcgcggggggggcgcggtaagaggtggcggcgggcagagggtgttttttttcttttccctccagagccggggtttgtaaaccgaggccagagtgtccccgtgggccgagcgcacttttttcttgtccgggtgcgctcagtcactggtgcctgagaggaaacagtggaggcagcggggcaggtcgcctggggcgtcggcgattatattgcggccgagccggggcgcgccgggaaaggccgggagggcggcggcgcgcgggggctgggcgaggccccgcgacccgcgagggaggcggcgcgaagccgaggcggcgggcgcaagagccgggcatgagcgcccagtagctgagcgcccgcggctgcctggcctcagaagcgacgcgcgagcgcgggcgggcggcagcagcgacgtagcccggcggtcccggcggcgagagcagccgccccacaggcccccgcggcagtgcggccgagtcgaggctcgctctctggctgcttagcgccgcccgcccgcccggggccgccgccgctgacgccccaatgagttcgtacttcgtgaacccgctgtactccaagtacaaggcggcggctgcggcggcggcggcggcgggcgaggccatcaatcccacttactacgactgtcacttcgcgcccgaggtcggcggccgtcacgccgccgccgcagcagccctgcagctctatggcaacagcgccgccggcttcccgcacgcgcccccgcaggcgcacgcgcacccgcacccgtccccgccgccctccgggactgggtgcggcggtagggaaggccggggccaggagtacttccaccccggcgggggcagcccggccgctgcctaccaggccgccccccctcctcctccgcatcctccgcctccgccgccacctcccccctgcggcgggattgcctgtcacggggagcccgcgaagttttacggatacgataacttacagagacagccgatttttacgacccagcaagaggccgagctggtacaatatcctgactgtaaatcgtccagtggtaatattggcgaggacccagaccacttaaatcagagctcgtctccttctcaaatgtttccgtggatgagaccacaagcagctcctggtagacgaagaggaagacaaacctacagtcgcttccaaactctagagttggaaaaggaatttctttttaacccctatctgaccaggaaaagaagaatcgaggtttcccacgccctagccctcaccgagagacaggtaaaaatctggttccagaacaggagaatgaaatggaaaaaggaaaacaacaaggacaaatttcccgtttcccggcaggaggtgaaggacggggaaacgaaaaaggaagcccaagagctggaggaagacagagccgaaggcctgacaaattaacttctacctttaaaatttaccacagactattaaaactaataatcaccatatgctgtggacaccacctattttctttgttggaaaggaccttacctgtgtttcaagctaccttcatgtcactgctcttgaggttttctgtgctttgagagggatttgggtgtttaaaaaagtttctagtatcacatagaagctgtccttgagctgtcctatggaagggtaatttgatactgaccttgtagctatatttttataatggtttttaatgtctgagctagtgatttgcctcaacaacgtaaacttcctaatgattagcacttaataattgcatataaaatgctttattaattaaacaagtgcacttgaacattttaatatttgtggtgagtaaattaaaaggagtttattaattaaaaaaaattatgtctgcagaatactttatattatttgattacaatgtattatttatggattttttattctttcctttataatgaatagttcgggtgcgttttgtttactcctaaaaggtttctttgcgtattttctaaatgtaatatctcggggaaaatattagaaaagcacgtattagctgaagaatgtaacttgtagtccagctctgcagcttccttaaacttaagaaaaagattgggccagtgacaagaatttaaagacaatgtccaagttgacaattatttttctatagtccatacaaattaaataatctggcaactctggcaaatcgccttgtaaaatgcgtctcattttttaacttgctttcgttttgaaccgcccttgtaatcgcctgaaatcgctagttctttatgcggtggctgccgctgtgttccgttattttcagtaggtgtcatatttatttgtattgcctttgttctgttcgccgctggttttaaaccagcttgctgtgtgcatctcagacgtcggttggtacgtcctccgctgttcttcaggaaagcgatagcctcacctatttgaaacaagccctgagaggaaacgcagaaaaacctgagtgtaaacaactccggaatgtcgctagctccttagtaaataaatgaatctctttctgga

SEQ ID NO: 201807 - DNA, 1560 bp, Artificial Sequence
  derived and/or modified sequence
cgcgcggatccctccgcggggctcctcgtccccgtcacgctgactttccgtgcagtgctgtggtgcgaaaatgcctcgccgagacagccgatttttacgacccagcaagaggccgagctggtacaatatcctgactgtaaatcgtccagtggtaatattggcgaggacccagaccacttaaatcagagctcgtctccttctcaaatgtttccgtggatgagaccacaagcagctcctggtagacgaagaggaagacaaacctacagtcgcttccaaactctagagttggaaaaggaatttctttttaacccctatctgaccaggaaaagaagaatcgaggtttcccacgccctagccctcaccgagagacaggtaaaaatctggttccagaacaggagaatgaaatggaaaaaggaaaacaacaaggacaaatttcccgtttcccggcaggaggtgaaggacggggaaacgaaaaaggaagcccaagagctggaggaagacagagccgaaggcctgacaaattaacttctacctttaaaatttaccacagactattaaaactaataatcaccatatgctgtggacaccacctattttctttgttggaaaggaccttacctgtgtttcaagctaccttcatgtcactgctcttgaggttttctgtgctttgagagggatttgggtgtttaaaaaagtttctagtatcacatagaagctgtccttgagctgtcctatggaagggtaatttgatactgaccttgtagctatatttttataatggtttttaatgtctgagctagtgatttgcctcaacaacgtaaacttcctaatgattagcacttaataattgcatataaaatgctttattaattaaacaagtgcacttgaacattttaatatttgtggtgagtaaattaaaaggagtttattaattaaaaaaaattatgtctgcagaatactttatattatttgattacaatgtattatttatggattttttattctttcctttataatgaatagttcgggtgcgttttgtttactcctaaaaggtttctttgcgtattttctaaatgtaatatctcggggaaaatattagaaaagcacgtattagctgaagaatgtaacttgtagtccagctctgcagcttccttaaacttaagaaaaagattgggccagtgacaagaatttaaagacaatgtccaagttgacaattatttttctatagtccatacaaattaaataatctggcaactctggcaaatcgccttgtaaaatgcgtctcattttttaacttgctttcgttttgaaccgcccttgtaatcgcctgaaatcgctagttctttatgcggtggctgccgctgtgttccgttattttcagtaggtgtcatatttatttgtattgcctttgttctgttcgccgctggttttaaaccagcttgctgtgtgcatctcagacgtcggttggtacgtcctccgctgttcttcaggaaagcgatagcctcacctatttgaaacaagccctgagaggaaacgcagaaaaacctgagtgtaaacaac

SEQ ID NO: 201808 - DNA, 873 bp, Artificial Sequence
  derived and/or modified sequence
atgagcagctactttgtgaaccccctgtacagcaagtacaaggctgctgctgctgctgctgctgctgctggggaggccatcaaccccacctactatgactgccactttgcccctgaggtgggcggcagacatgctgctgctgctgctgccctgcagctgtatggcaacagcgctgctggcttcccccacgccccaccccaggcccacgcccacccccaccccagccccccaccttctggaacaggctgcggcggccgggagggccggggccaggagtacttccaccctgggggcggcagccctgctgctgcctaccaggccgcccctcctcctccaccccaccccccacctcctcctcctcctccaccctgtggcggcatcgcctgccacggggagcccgccaagttctacggctatgacaacctgcagaggcagcccatcttcaccacccagcaggaggccgagctggtgcagtacccagactgcaagagcagcagcggcaacattggagaagatcctgaccacctgaaccagagcagcagccccagccagatgttcccctggatgaggccccaggccgcccctggaagaagaagaggccggcagacctacagccgcttccagaccctggagctggagaaggagttcctgttcaacccctacctgaccaggaagaggcgcatcgaggtgagccacgccctggccctgacagagcggcaggtgaagatctggttccagaacagaaggatgaagtggaagaaggagaacaacaaggacaagtttcctgtgtcccggcaggaggtgaaggatggagagaccaagaaggaggcccaggagctggaggaggacagagctgagggcctgaccaactag

SEQ ID NO: 201809 - DNA, 873 bp, Artificial Sequence
  derived and/or modified sequence
atgagcagctacttcgtgaaccccctgtacagcaagtacaaggccgcagccgcggctgctgccgctgccggtgaggccattaaccctacttattacgattgccacttcgccccagaggtggggggcaggcatgctgccgccgctgccgccctccagctctatggaaactctgcagcaggcttccctcacgctccacctcaggcccacgcccatccacaccctagtccccccccatcaggcaccggctgtggcggcagagagggtcggggccaggaatatttccaccccggaggaggatcccccgcagcggcctaccaggctgccccgccaccccccccacacccgcccccacccccccctcccccgccctgtggcggcatcgcctgccatggcgagcctgcaaagttctacggctacgacaacctgcagagacagccaatatttaccacacagcaggaggctgagttagttcaatatcctgattgcaaatcaagcagcggcaacattggcgaggaccctgaccacctgaatcagtctagctccccctcacagatgttcccttggatgcgacctcaagctgcgccagggaggagacgtgggaggcagacttatagccgattccaaactttggaacttgagaaagaatttctcttcaacccgtacttaactagaaagaggcgcatagaagtaagccatgctctggccttgaccgagcggcaggtgaagatctggttccagaaccgcagaatgaaatggaagaaggagaataacaaagataaatttccagtgagcaggcaagaggttaaagatggggagactaagaaggaggctcaggaactggaggaggacagagccgaagggctgactaactag

SEQ ID NO: 201810 - DNA, 873 bp, Artificial Sequence
  derived and/or modified sequence
atgtctagttacttcgtgaatcccttatatagcaaatacaaggccgcagcggcagctgcagctgccgcaggcgaagctattaacccaacatactacgattgtcattttgccccagaagtaggcggaagacacgcggctgccgctgccgcactgcagctgtacggcaactcggcagccggattcccacacgctcctccgcaggctcacgcccatccccacccttcacctccaccctcagggactggctgtgggggacgcgaaggacgtggacaggaatacttccatccagggggaggatcccccgcagctgcctaccaggccgctccccctccaccgcctcacccgcctccaccccctcccccacctccatgcggcggtatcgcctgccacggggaaccggcaaaattctatggatatgacaacctccagaggcagccaattttcacaacccagcaggaagctgagctggtacagtacccagattgcaaaagctcaagcggaaacatcggggaggatcccgaccacctgaatcagtcatcaagcccatcacagatgtttccctggatgaggcctcaggccgctccagggcgaaggcggggtcggcaaacctactctcgctttcagaccctcgagctggagaaggaattcttgtttaatccatacctgaccaggaagcggaggatagaggtttcgcacgccctcgctctcaccgagcgccaggtcaagatctggttccagaaccggcgtatgaagtggaaaaaggagaacaacaaagataagtttcctgtgagccgtcaagaggtgaaggacggtgaaactaagaaggaggctcaagaactggaggaggatcgtgccgaggggcttaccaattag

SEQ ID NO: 201811 - DNA, 873 bp, Artificial Sequence
  derived and/or modified sequence
atgagcagctacttcgtgaaccccctgtacagcaagtacaaggccgccgccgccgccgccgccgccgccggcgaggccatcaaccccacctactacgactgccacttcgcccccgaggtgggcggcagacacgccgccgccgccgccgccctgcagctgtacggcaacagcgccgccggcttcccccacgcccccccccaggcccacgcccacccccaccccagccccccccccagcggcaccggctgcggcggcagagagggcagaggccaggagtacttccaccccggcggcggcagccccgccgccgcctaccaggccgccccccccccccccccccacccccccccccccccccccccccccccctgcggcggcatcgcctgccacggcgagcccgccaagttctacggctacgacaacctgcagagacagcccatcttcaccacccagcaggaggccgagctggtgcagtaccccgactgcaagagcagcagcggcaacatcggcgaggaccccgaccacctgaaccagagcagcagccccagccagatgttcccctggatgagaccccaggccgcccccggcagaagaagaggcagacagacctacagcagattccagaccctggagctggagaaggagttcctgttcaacccctacctgaccagaaagagaagaatcgaggtgagccacgccctggccctgaccgagagacaggtgaagatctggttccagaacagaagaatgaagtggaagaaggagaacaacaaggacaagttccccgtgagcagacaggaggtgaaggacggcgagaccaagaaggaggcccaggagctggaggaggacagagccgagggcctgaccaactag

SEQ ID NO: 201812 - protein, 2146 aa, Artificial Sequence
  derived and/or modified sequence
MYPNWGRYGGSSHYPPPPVPPPPPVALPEASPGPGYSSSTTPAAPSSSGFMSFREQHLAQLQQLQQMHQKQMQCVLQPHHLPPPPLPPPPVMPGGGYGDWQPPPPPMPPPPGPALSYQKQQQYKHQMLHHQRDGPPGLVPMELESPPESPPVPPGSYMPPSQSYMPPPQPPPSYYPPTSSQPYLPPAQPSPSQSPPSQSYLAPTPSYSSSSSSSQSYLSHSQSYLPSSQASPSRPSQGHSKSQLLAPPPPSAPPGNKTTVQQEPLESGAKNKSTEQQQAAPEPDPSTMTPQEQQQYWYRQHLLSLQQRTKVHLPGHKKGPVVAKDTPEPVKEEVTVPATSQVPESPSSEEPPLPPPNEEVPPPLPPEEPQSEDPEEDARLKQLQAAAAHWQQHQQHRVGFQYQGIMQKHTQLQQILQQYQQIIQPPPHIQTMSVDMQLRHYEMQQQQFQHLYQEWEREFQLWEEQLHSYPHKDQLQEYEKQWKTWQGHMKATQSYLQEKVNSFQNMKNQYMGNMSMPPPFVPYSQMPPPLPTMPPPVLPPSLPPPVMPPALPATVPPPGMPPPVMPPSLPTSVPPPGMPPSLSSAGPPPVLPPPSLSSAGPPPVLPPPSLSSTAPPPVMPLPPLSSATPPPGIPPPGVPQGIPPQLTAAPVPPASSSQSSQVPEKPRPALLPTPVSFGSAPPTTYHPPLQSAGPSEQVNSKAPLSKSALPYSSFSSDQGLGESSAAPSQPITAVKDMPVRSGGLLPDPPRSSYLESPRGPRFDGPRRFEDLGSRCEGPRPKGPRFEGNRPDGPRPRYEGHPAEGTKSKWGMIPRGPASQFYITPSTSLSPRQSGPQWKGPKPAFGQQHQQQPKSQAEPLSGNKEPLADTSSNQQKNFKMQSAAFSIAADVKDVKAAQSNENLSDSQQEPPKSEVSEGPVEPSNWDQNVQSMETQIDKAQAVTQPVPLANKPVPAQSTFPSKTGGMEGGTAVATSSLTADNDFKPVGIGLPHSENNQDKGLPRPDNRDNRLEGNRGNSSSYRGPGQSRMEDTRDKGLVNRGRGQAISRGPGLVKQEDFRDKMMGRREDSREKMNRGEGSRDRGLVRPGSSREKVPGGLQGSQDRGAAGSRERGPPRRAGSQERGPLRRAGSRERIPPRRAGSRERGPPRGPGSRERGLGRSDFGRDRGPFRPEPGDGGEKMYPYHRDEPPRAPWNHGEERGHEEFPLDGRNAPMERERLDDWDRERYWRECERDYQDDTLELYNREDRFSAPPSRSHDGDRRGPWWDDWERDQDMDEDYNREMERDMDRDVDRISRPMDMYDRSLDNEWDRDYGRPLDEQESQFRERDIPSLPPLPPLPPLPPLDRYRDDRWREERNREHGYDRDFRDRGELRIREYPERGDTWREKRDYVPDRMDWERERLSDRWYPSDVDRHSPMAEHMPSSHHSSEMMGSDASLDSDQGLGGVMVLSQRQHEIILKAAQELKMLREQKEQLQKMKDFGSEPQMADHLPPQESRLQNTSSRPGMYPPPGSYRPPPPMGKPPGSIVRPSAPPARSSVPVTRPPVPIPPPPPPPPLPPPPPVIKPQTSAVEQERWDEDSFYGLWDTNDEQGLNSEFKSETAAIPSAPVLPPPPVHSSIPPPGPVPMGMPPMSKPPPVQQTVDYGHGRDISTNKVEQIPYGERITLRPDPLPERSTFETEHAGQRDRYDRERDREPYFDRQSNVIADHRDFKRDRETHRDRDRDRGVIDYDRDRFDRERRPRDDRAQSYRDKKDHSSSRRGGFDRPSYDRKSDRPVYEGPSMFGGERRTYPEERMPLPAPSLSHQPPPAPRVEKKPESKNVDDILKPPGRESRPERIVVIMRGLPGSGKTHVAKLIRDKEVEFGGPAPRVLSLDDYFITEVEKEEKDPDSGKKVKKKVMEYEYEAEMEETYRTSMFKTFKKTLDDGFFPFIILDAINDRVRHFDQFWSAAKTKGFEVYLAEMSADNQTCGKRNIHGRKLKEINKMADHWETAPRHMMRLDIRSLLQDAAIEEVEMEDFDANIEEQKEEKKDAEEEESELGYIPKSKWEMDTSEAKLDKLDGLRTGTKRKRDWEAIASRMEDYLQLPDDYDTRASEPGKKRVRWADLEEKKDADRKRAIGFVVGQTDWEKITDESGHLAEKALNRTKYI

SEQ ID NO: 201813 - protein, 1854 aa, Artificial Sequence
  derived and/or modified sequence
MTPQEQQQYWYRQHLLSLQQRTKVHLPGHKKGPVVAKDTPEPVKEEVTVPATSQVPESPSSEEPPLPPPNEEVPPPLPPEEPQSEDPEEDARLKQLQAAAAHWQQHQQHRVGFQYQGIMQKHTQLQQILQQYQQIIQPPPHIQTMSVDMQLRHYEMQQQQFQHLYQEWEREFQLWEEQLHSYPHKDQLQEYEKQWKTWQGHMKATQSYLQEKVNSFQNMKNQYMGNMSMPPPFVPYSQMPPPLPTMPPPVLPPSLPPPVMPPALPATVPPPGMPPPVMPPSLPTSVPPPGMPPSLSSAGPPPVLPPPSLSSAGPPPVLPPPSLSSTAPPPVMPLPPLSSATPPPGIPPPGVPQGIPPQLTAAPVPPASSSQSSQVPEKPRPALLPTPVSFGSAPPTTYHPPLQSAGPSEQVNSKAPLSKSALPYSSFSSDQGLGESSAAPSQPITAVKDMPVRSGGLLPDPPRSSYLESPRGPRFDGPRRFEDLGSRCEGPRPKGPRFEGNRPDGPRPRYEGHPAEGTKSKWGMIPRGPASQFYITPSTSLSPRQSGPQWKGPKPAFGQQHQQQPKSQAEPLSGNKEPLADTSSNQQKNFKMQSAAFSIAADVKDVKAAQSNENLSDSQQEPPKSEVSEGPVEPSNWDQNVQSMETQIDKAQAVTQPVPLANKPVPAQSTFPSKTGGMEGGTAVATSSLTADNDFKPVGIGLPHSENNQDKGLPRPDNRDNRLEGNRGNSSSYRGPGQSRMEDTRDKGLVNRGRGQAISRGPGLVKQEDFRDKMMGRREDSREKMNRGEGSRDRGLVRPGSSREKVPGGLQGSQDRGAAGSRERGPPRRAGSQERGPLRRAGSRERIPPRRAGSRERGPPRGPGSRERGLGRSDFGRDRGPFRPEPGDGGEKMYPYHRDEPPRAPWNHGEERGHEEFPLDGRNAPMERERLDDWDRERYWRECERDYQDDTLELYNREDRFSAPPSRSHDGDRRGPWWDDWERDQDMDEDYNREMERDMDRDVDRISRPMDMYDRSLDNEWDRDYGRPLDEQESQFRERDIPSLPPLPPLPPLPPLDRYRDDRWREERNREHGYDRDFRDRGELRIREYPERGDTWREKRDYVPDRMDWERERLSDRWYPSDVDRHSPMAEHMPSSHHSSEMMGSDASLDSDQGLGGVMVLSQRQHEIILKAAQELKMLREQKEQLQKMKDFGSEPQMADHLPPQESRLQNTSSRPGMYPPPGSYRPPPPMGKPPGSIVRPSAPPARSSVPVTRPPVPIPPPPPPPPLPPPPPVIKPQTSAVEQERWDEDSFYGLWDTNDEQGLNSEFKSETAAIPSAPVLPPPPVHSSIPPPGPVPMGMPPMSKPPPVQQTVDYGHGRDISTNKVEQIPYGERITLRPDPLPERSTFETEHAGQRDRYDRERDREPYFDRQSNVIADHRDFKRDRETHRDRDRDRGVIDYDRDRFDRERRPRDDRAQSYRDKKDHSSSRRGGFDRPSYDRKSDRPVYEGPSMFGGERRTYPEERMPLPAPSLSHQPPPAPRVEKKPESKNVDDILKPPGRESRPERIVVIMRGLPGSGKTHVAKLIRDKEVEFGGPAPRVLSLDDYFITEVEKEEKDPDSGKKVKKKVMEYEYEAEMEETYRTSMFKTFKKTLDDGFFPFIILDAINDRVRHFDQFWSAAKTKGFEVYLAEMSADNQTCGKRNIHGRKLKEINKMADHWETAPRHMMRLDIRSLLQDAAIEEVEMEDFDANIEEQKEEKKDAEEEESELGYIPKSKWEMDTSEAKLDKLDGLRTGTKRKRDWEAIASRMEDYLQLPDDYDTRASEPPRPRGASLCVTLLPRFSSCFVSTALVFFKVLQCPQEVLESCCTQARR

SEQ ID NO: 201814 - DNA, 5469 bp, Artificial Sequence
  derived and/or modified sequence
atgtaccccaactggggcagatacggcggcagcagccactacccccccccccccgtgcccccccccccccccgtggccctgcccgaggccagccccggccccggctacagcagcagcaccacccccgccgcccccagcagcagcggcttcatgagcttcagagagcagcacctggcccagctgcagcagctgcagcagatgcaccagaagcagatgcagtgcgtgctgcagccccaccacctgccccccccccccctgccccccccccccgtgatgcccggcggcggctacggcgactggcagcccccccccccccccatgccccccccccccggccccgccctgagctaccagaagcagcagcagtacaagcaccagatgctgcaccaccagagagacggcccccccggcctggtgcccatggagctggagagcccccccgagagcccccccgtgccccccggcagctacatgccccccagccagagctacatgccccccccccagcccccccccagctactacccccccaccagcagccagccctacctgccccccgcccagcccagccccagccagagcccccccagccagagctacctggcccccacccccagctacagcagcagcagcagcagcagccagagctacctgagccacagccagagctacctgcccagcagccaggccagccccagcagacccagccagggccacagcaagagccagctgctggccccccccccccccagcgccccccccggcaacaagaccaccgtgcagcaggagcccctggagagcggcgccaagaacaagagcaccgagcagcagcaggccgcccccgagcccgaccccagcaccatgaccccccaggagcagcagcagtactggtacagacagcacctgctgagcctgcagcagagaaccaaggtgcacctgcccggccacaagaagggccccgtggtggccaaggacacccccgagcccgtgaaggaggaggtgaccgtgcccgccaccagccaggtgcccgagagccccagcagcgaggagccccccctgcccccccccaacgaggaggtgcccccccccctgccccccgaggagccccagagcgaggaccccgaggaggacgccagactgaagcagctgcaggccgccgccgcccactggcagcagcaccagcagcacagagtgggcttccagtaccagggcatcatgcagaagcacacccagctgcagcagatcctgcagcagtaccagcagatcatccagccccccccccacatccaggccaccacccccccccccggcatccccccccccggcgtgccccagggcatccccccccagctgaccgccgcccccgtgccccccgccagcagcagccagagcagccaggtgcccgagaagcccagacccgccctgctgcccacccccgtgagcttcggcagcgccccccccaccacctaccacccccccctgcagagcgccggccccagcgagcaggtgaacagcaaggcccccctgagcaagagcgccctgccctacagcagcttcagcagcgaccagggcctgggcgagagcagcgccgcccccagccagcccatcaccgccgtgaaggacatgcccgtgagaagcggcggcctgctgcccgacccccccagaagcagctacctggagagccccagaggccccagattcgacggccccagaagattcgaggacctgggcagcagatgcgagggccccagacccaagggccccagattcgagggcaacagacccgacggccccagacccagatacgagggccaccccgccgagggcaccaagagcaagtggggcatgatccccagaggccccgccagccagttctacatcacccccagcaccagcctgagccccagacagagcggcccccagtggaagggccccaagcccgccttcggccagcagcaccagcagcagcccaagagccaggccgagcccctgagcggcaacaaggagcccctggccgacaccagcagcaaccagcagaagaacttcaagatgcagagcgccgccttcagcatcgccgccgacgtgaaggacgtgaaggccgcccagagcaacgagaacctgagcgacagccagcaggagccccccaagagcgaggtgagcgagggccccgtggagcccagcaactgggaccagaacgtgcagagcatggagacccagatcgacaaggcccaggccgtgacccagcccgtgcccctggccaacaagcccgtgcccgcccagagcaccttccccagcaagaccggcggcatggagggcggcaccgccgtggccaccagcagcctgaccgccgacaacgacttcaagcccgtgggcatcggcctgccccacagcgagaacaaccaggacaagggcctgcccagacccgacaacagagacaacagactggagggcaacagaggcaacagcagcagctacagaggccccggccagagcagaatggaggacaccagagacaagggcctggtgaacagaggcagaggccaggccatcagcagaggccccggcctggtgaagcaggaggacttcagagacaagatgatgggcagaagagaggacagcagagagaagatgaacagaggcgagggcagcagagacagaggcctggtgagacccggcagcagcagagagaaggtgcccggcggcctgcagggcagccaggacagaggcgccgccggcagcagagagagaggcccccccagaagagccggcagccaggagagaggccccctgagaagagccggcagcagagagagaatcccccccagaagagccggcagcagagagagaggcccccccagaggccccggcagcagagagagaggcctgggcagaagcgacttcggcagagacagaggccccttcagacccgagcccggcgacggcggcgagaagatgtacccctaccacagagacgagccccccagagccccctggaaccacggcgaggagagaggccacgaggagttccccctggacggcagaaacgcccccatggagagagagagactggacgactgggacagagagagatactggagagagtgcgagagagactaccaggacgacaccctggagctgtacaacagagaggacagattcagcgccccccccagcagaagccacgacggcgacagaagaggcccctggtgggacgactgggagagagaccaggacatggacgaggactacaacagagagatggagagagacatggacagagacgtggacagaatcagcagacccatggacatgtacgacagaagcctggacaacgagtgggacagagactacggcagacccctggacgagcaggagagccagttcagagagagagacatccccagcctgccccccctgccccccctgccccccctgccccccctggacagatacagagacgacagatggagagaggagagaaacagagagcacggctacgacagagacttcagagacagaggcgagctgagaatcagagagtaccccgagagaggcgacacctggagagagaagagagactacgtgcccgacagaatggactgggagagagagagactgagcgacagatggtaccccagcgacgtggacagacacagccccatggccgagcacatgcccagcagccaccacagcagcgagatgatgggcagcgacgccagcctggacagcgaccagggcctgggcggcgtgatggtgctgagccagagacagcacgagatcatcctgaaggccgcccaggagctgaagatgctgagagagcagaaggagcagctgcagaagatgaaggacttcggcagcgagccccagatggccgaccacctgcccccccaggagagcagactgcagaacaccagcagcagacccggcatgtaccccccccccggcagctacagaccccccccccccatgggcaagccccccggcagcatcgtgagacccagcgccccccccgccagaagcagcgtgcccgtgaccagaccccccgtgcccatcccccccccccccccccccccccccctgcccccccccccccccgtgatcaagccccagaccagcgccgtggagcaggagagatgggacgaggacagcttctacggcctgtgggacaccaacgacgagcagggcctgaacagcgagttcaagagcgagaccgccgccatccccagcgcccccgtgctgccccccccccccgtgcacagcagcatccccccccccggccccgtgcccatgggcatgccccccatgagcaagcccccccccgtgcagcagaccgtggactacggccacggcagagacatcagcaccaacaaggtggagcagatcccctacggcgagagaatcaccctgagacccgaccccctgcccgagagaagcaccttcgagaccgagcacgccggccagagagacagatacgacagagagagagacagagagccctacttcgacagacagagcaacgtgatcgccgaccacagagacttcaagagagacagagagacccacagagacagagacagagacagaggcgtgatcgactacgacagagacagattcgacagagagagaagacccagagacgacagagcccagagctacagagacaagaaggaccacagcagcagcagaagaggcggcttcgacagacccagctacgacagaaagagcgacagacccgtgtacgagggccccagcatgttcggcggcgagagaagaacctaccccgaggagagaatgcccctgcccgcccccagcctgagccaccagcccccccccgcccccagagtggagaagaagcccgagagcaagaacgtggacgacatcctgaagccccccggcagagagagcagacccgagagaatcgtggtgatcatgagaggcctgcccggcagcggcaagacccacgtggccaagctgatcagagtgatggagtacgagtacgaggccgagatggaggagacctacagaaccagcatgttcaagaccttcaagaagaccctggacgacggcttcttccccttcatcatcctggacgccatcaacgacagagtgagacacttcgaccagttctggagcgccgccaagaccaagggcttcgaggtgtacctggccgagatgagcgccgacaaccagacctgcggcaagagaaacatccacggcagaaagctgaaggagatcaacaagatggccgaccactgggagaccgcccccagacacatgatgagactggacatcagaagcctgctgcaggacgccgccatcgaggaggtggagatggaggacttcgacgccaacatcgaggagcagaaggaggagaagaaggacgccgaggaggaggagagcgagctggtgggcgacagacccaccaccctgaacagcgtgagcctgctgaagttcctgaagaaggtgtag

SEQ ID NO: 201815 - DNA, 6441 bp, Artificial Sequence
  derived and/or modified sequence
atgtaccccaactggggcagatacggcggcagcagccactacccccccccccccgtgcccccccccccccccgtggccctgcccgaggccagccccggccccggctacagcagcagcaccacccccgccgcccccagcagcagcggcttcatgagcttcagagagcagcacctggcccagctgcagcagctgcagcagatgcaccagaagcagatgcagtgcgtgctgcagccccaccacctgccccccccccccctgccccccccccccgtgatgcccggcggcggctacggcgactggcagcccccccccccccccatgccccccccccccggccccgccctgagctaccagaagcagcagcagtacaagcaccagatgctgcaccaccagagagacggcccccccggcctggtgcccatggagctggagagcccccccgagagcccccccgtgccccccggcagctacatgccccccagccagagctacatgccccccccccagcccccccccagctactacccccccaccagcagccagccctacctgccccccgcccagcccagccccagccagagcccccccagccagagctacctggcccccacccccagctacagcagcagcagcagcagcagccagagctacctgagccacagccagagctacctgcccagcagccaggccagccccagcagacccagccagggccacagcaagagccagctgctggccccccccccccccagcgccccccccggcaacaagaccaccgtgcagcaggagcccctggagagcggcgccaagaacaagagcaccgagcagcagcaggccgcccccgagcccgaccccagcaccatgaccccccaggagcagcagcagtactggtacagacagcacctgctgagcctgcagcagagaaccaaggtgcacctgcccggccacaagaagggccccgtggtggccaaggacacccccgagcccgtgaaggaggaggtgaccgtgcccgccaccagccaggtgcccgagagccccagcagcgaggagccccccctgcccccccccaacgaggaggtgcccccccccctgccccccgaggagccccagagcgaggaccccgaggaggacgccagactgaagcagctgcaggccgccgccgcccactggcagcagcaccagcagcacagagtgggcttccagtaccagggcatcatgcagaagcacacccagctgcagcagatcctgcagcagtaccagcagatcatccagccccccccccacatccagaccatgagcgtggacatgcagctgagacactacgagatgcagcagcagcagttccagcacctgtaccaggagtgggagagagagttccagctgtgggaggagcagctgcacagctacccccacaaggaccagctgcaggagtacgagaagcagtggaagacctggcagggccacatgaaggccacccagagctacctgcaggagaaggtgaacagcttccagaacatgaagaaccagtacatgggcaacatgagcatgcccccccccttcgtgccctacagccagatgcccccccccctgcccaccatgcccccccccgtgctgccccccagcctgcccccccccgtgatgccccccgccctgcccgccaccgtgcccccccccggcatgcccccccccgtgatgccccccagcctgcccaccagcgtgcccccccccggcatgccccccagcctgagcagcgccggccccccccccgtgctgcccccccccagcctgagcagcgccggccccccccccgtgctgcccccccccagcctgagcagcaccgcccccccccccgtgatgcccctgccccccctgagcagcgccacccccccccccggcatccccccccccggcgtgccccagggcatccccccccagctgaccgccgcccccgtgccccccgccagcagcagccagagcagccaggtgcccgagaagcccagacccgccctgctgcccacccccgtgagcttcggcagcgccccccccaccacctaccacccccccctgcagagcgccggccccagcgagcaggtgaacagcaaggcccccctgagcaagagcgccctgccctacagcagcttcagcagcgaccagggcctgggcgagagcagcgccgcccccagccagcccatcaccgccgtgaaggacatgcccgtgagaagcggcggcctgctgcccgacccccccagaagcagctacctggagagccccagaggccccagattcgacggccccagaagattcgaggacctgggcagcagatgcgagggccccagacccaagggccccagattcgagggcaacagacccgacggccccagacccagatacgagggccaccccgccgagggcaccaagagcaagtggggcatgatccccagaggccccgccagccagttctacatcacccccagcaccagcctgagccccagacagagcggcccccagtggaagggccccaagcccgccttcggccagcagcaccagcagcagcccaagagccaggccgagcccctgagcggcaacaaggagcccctggccgacaccagcagcaaccagcagaagaacttcaagatgcagagcgccgccttcagcatcgccgccgacgtgaaggacgtgaaggccgcccagagcaacgagaacctgagcgacagccagcaggagccccccaagagcgaggtgagcgagggccccgtggagcccagcaactgggaccagaacgtgcagagcatggagacccagatcgacaaggcccaggccgtgacccagcccgtgcccctggccaacaagcccgtgcccgcccagagcaccttccccagcaagaccggcggcatggagggcggcaccgccgtggccaccagcagcctgaccgccgacaacgacttcaagcccgtgggcatcggcctgccccacagcgagaacaaccaggacaagggcctgcccagacccgacaacagagacaacagactggagggcaacagaggcaacagcagcagctacagaggccccggccagagcagaatggaggacaccagagacaagggcctggtgaacagaggcagaggccaggccatcagcagaggccccggcctggtgaagcaggaggacttcagagacaagatgatgggcagaagagaggacagcagagagaagatgaacagaggcgagggcagcagagacagaggcctggtgagacccggcagcagcagagagaaggtgcccggcggcctgcagggcagccaggacagaggcgccgccggcagcagagagagaggcccccccagaagagccggcagccaggagagaggccccctgagaagagccggcagcagagagagaatcccccccagaagagccggcagcagagagagaggcccccccagaggccccggcagcagagagagaggcctgggcagaagcgacttcggcagagacagaggccccttcagacccgagcccggcgacggcggcgagaagatgtacccctaccacagagacgagccccccagagccccctggaaccacggcgaggagagaggccacgaggagttccccctggacggcagaaacgcccccatggagagagagagactggacgactgggacagagagagatactggagagagtgcgagagagactaccaggacgacaccctggagctgtacaacagagaggacagattcagcgccccccccagcagaagccacgacggcgacagaagaggcccctggtgggacgactgggagagagaccaggacatggacgaggactacaacagagagatggagagagacatggacagagacgtggacagaatcagcagacccatggacatgtacgacagaagcctggacaacgagtgggacagagactacggcagacccctggacgagcaggagagccagttcagagagagagacatccccagcctgccccccctgccccccctgccccccctgccccccctggacagatacagagacgacagatggagagaggagagaaacagagagcacggctacgacagagacttcagagacagaggcgagctgagaatcagagagtaccccgagagaggcgacacctggagagagaagagagactacgtgcccgacagaatggactgggagagagagagactgagcgacagatggtaccccagcgacgtggacagacacagccccatggccgagcacatgcccagcagccaccacagcagcgagatgatgggcagcgacgccagcctggacagcgaccagggcctgggcggcgtgatggtgctgagccagagacagcacgagatcatcctgaaggccgcccaggagctgaagatgctgagagagcagaaggagcagctgcagaagatgaaggacttcggcagcgagccccagatggccgaccacctgcccccccaggagagcagactgcagaacaccagcagcagacccggcatgtaccccccccccggcagctacagaccccccccccccatgggcaagccccccggcagcatcgtgagacccagcgccccccccgccagaagcagcgtgcccgtgaccagaccccccgtgcccatcccccccccccccccccccccccccctgcccccccccccccccgtgatcaagccccagaccagcgccgtggagcaggagagatgggacgaggacagcttctacggcctgtgggacaccaacgacgagcagggcctgaacagcgagttcaagagcgagaccgccgccatccccagcgcccccgtgctgccccccccccccgtgcacagcagcatccccccccccggccccgtgcccatgggcatgccccccatgagcaagcccccccccgtgcagcagaccgtggactacggccacggcagagacatcagcaccaacaaggtggagcagatcccctacggcgagagaatcaccctgagacccgaccccctgcccgagagaagcaccttcgagaccgagcacgccggccagagagacagatacgacagagagagagacagagagccctacttcgacagacagagcaacgtgatcgccgaccacagagacttcaagagagacagagagacccacagagacagagacagagacagaggcgtgatcgactacgacagagacagattcgacagagagagaagacccagagacgacagagcccagagctacagagacaagaaggaccacagcagcagcagaagaggcggcttcgacagacccagctacgacagaaagagcgacagacccgtgtacgagggccccagcatgttcggcggcgagagaagaacctaccccgaggagagaatgcccctgcccgcccccagcctgagccaccagcccccccccgcccccagagtggagaagaagcccgagagcaagaacgtggacgacatcctgaagccccccggcagagagagcagacccgagagaatcgtggtgatcatgagaggcctgcccggcagcggcaagacccacgtggccaagctgatcagagacaaggaggtggagttcggcggccccgcccccagagtgctgagcctggacgactacttcatcaccgaggtggagaaggaggagaaggaccccgacagcggcaagaaggtgaagaagaaggtgatggagtacgagtacgaggccgagatggaggagacctacagaaccagcatgttcaagaccttcaagaagaccctggacgacggcttcttccccttcatcatcctggacgccatcaacgacagagtgagacacttcgaccagttctggagcgccgccaagaccaagggcttcgaggtgtacctggccgagatgagcgccgacaaccagacctgcggcaagagaaacatccacggcagaaagctgaaggagatcaacaagatggccgaccactgggagaccgcccccagacacatgatgagactggacatcagaagcctgctgcaggacgccgccatcgaggaggtggagatggaggacttcgacgccaacatcgaggagcagaaggaggagaagaaggacgccgaggaggaggagagcgagctgggctacatccccaagagcaagtgggagatggacaccagcgaggccaagctggacaagctggacggcctgagaaccggcaccaagagaaagagagactgggaggccatcgccagcagaatggaggactacctgcagctgcccgacgactacgacaccagagccagcgagcccggcaagaagagagtgagatgggccgacctggaggagaagaaggacgccgacagaaagagagccatcggcttcgtggtgggccagaccgactgggagaagatcaccgacgagagcggccacctggccgagaaggccctgaacagaaccaagtacatctag

SEQ ID NO: 201816 - DNA, 5565 bp, Artificial Sequence
  derived and/or modified sequence
atgaccccccaggagcagcagcagtactggtacagacagcacctgctgagcctgcagcagagaaccaaggtgcacctgcccggccacaagaagggccccgtggtggccaaggacacccccgagcccgtgaaggaggaggtgaccgtgcccgccaccagccaggtgcccgagagccccagcagcgaggagccccccctgcccccccccaacgaggaggtgcccccccccctgccccccgaggagccccagagcgaggaccccgaggaggacgccagactgaagcagctgcaggccgccgccgcccactggcagcagcaccagcagcacagagtgggcttccagtaccagggcatcatgcagaagcacacccagctgcagcagatcctgcagcagtaccagcagatcatccagccccccccccacatccagaccatgagcgtggacatgcagctgagacactacgagatgcagcagcagcagttccagcacctgtaccaggagtgggagagagagttccagctgtgggaggagcagctgcacagctacccccacaaggaccagctgcaggagtacgagaagcagtggaagacctggcagggccacatgaaggccacccagagctacctgcaggagaaggtgaacagcttccagaacatgaagaaccagtacatgggcaacatgagcatgcccccccccttcgtgccctacagccagatgcccccccccctgcccaccatgcccccccccgtgctgccccccagcctgcccccccccgtgatgccccccgccctgcccgccaccgtgcccccccccggcatgcccccccccgtgatgccccccagcctgcccaccagcgtgcccccccccggcatgccccccagcctgagcagcgccggccccccccccgtgctgcccccccccagcctgagcagcgccggccccccccccgtgctgcccccccccagcctgagcagcaccgcccccccccccgtgatgcccctgccccccctgagcagcgccacccccccccccggcatccccccccccggcgtgccccagggcatccccccccagctgaccgccgcccccgtgccccccgccagcagcagccagagcagccaggtgcccgagaagcccagacccgccctgctgcccacccccgtgagcttcggcagcgccccccccaccacctaccacccccccctgcagagcgccggccccagcgagcaggtgaacagcaaggcccccctgagcaagagcgccctgccctacagcagcttcagcagcgaccagggcctgggcgagagcagcgccgcccccagccagcccatcaccgccgtgaaggacatgcccgtgagaagcggcggcctgctgcccgacccccccagaagcagctacctggagagccccagaggccccagattcgacggccccagaagattcgaggacctgggcagcagatgcgagggccccagacccaagggccccagattcgagggcaacagacccgacggccccagacccagatacgagggccaccccgccgagggcaccaagagcaagtggggcatgatccccagaggccccgccagccagttctacatcacccccagcaccagcctgagccccagacagagcggcccccagtggaagggccccaagcccgccttcggccagcagcaccagcagcagcccaagagccaggccgagcccctgagcggcaacaaggagcccctggccgacaccagcagcaaccagcagaagaacttcaagatgcagagcgccgccttcagcatcgccgccgacgtgaaggacgtgaaggccgcccagagcaacgagaacctgagcgacagccagcaggagccccccaagagcgaggtgagcgagggccccgtggagcccagcaactgggaccagaacgtgcagagcatggagacccagatcgacaaggcccaggccgtgacccagcccgtgcccctggccaacaagcccgtgcccgcccagagcaccttccccagcaagaccggcggcatggagggcggcaccgccgtggccaccagcagcctgaccgccgacaacgacttcaagcccgtgggcatcggcctgccccacagcgagaacaaccaggacaagggcctgcccagacccgacaacagagacaacagactggagggcaacagaggcaacagcagcagctacagaggccccggccagagcagaatggaggacaccagagacaagggcctggtgaacagaggcagaggccaggccatcagcagaggccccggcctggtgaagcaggaggacttcagagacaagatgatgggcagaagagaggacagcagagagaagatgaacagaggcgagggcagcagagacagaggcctggtgagacccggcagcagcagagagaaggtgcccggcggcctgcagggcagccaggacagaggcgccgccggcagcagagagagaggcccccccagaagagccggcagccaggagagaggccccctgagaagagccggcagcagagagagaatcccccccagaagagccggcagcagagagagaggcccccccagaggccccggcagcagagagagaggcctgggcagaagcgacttcggcagagacagaggccccttcagacccgagcccggcgacggcggcgagaagatgtacccctaccacagagacgagccccccagagccccctggaaccacggcgaggagagaggccacgaggagttccccctggacggcagaaacgcccccatggagagagagagactggacgactgggacagagagagatactggagagagtgcgagagagactaccaggacgacaccctggagctgtacaacagagaggacagattcagcgccccccccagcagaagccacgacggcgacagaagaggcccctggtgggacgactgggagagagaccaggacatggacgaggactacaacagagagatggagagagacatggacagagacgtggacagaatcagcagacccatggacatgtacgacagaagcctggacaacgagtgggacagagactacggcagacccctggacgagcaggagagccagttcagagagagagacatccccagcctgccccccctgccccccctgccccccctgccccccctggacagatacagagacgacagatggagagaggagagaaacagagagcacggctacgacagagacttcagagacagaggcgagctgagaatcagagagtaccccgagagaggcgacacctggagagagaagagagactacgtgcccgacagaatggactgggagagagagagactgagcgacagatggtaccccagcgacgtggacagacacagccccatggccgagcacatgcccagcagccaccacagcagcgagatgatgggcagcgacgccagcctggacagcgaccagggcctgggcggcgtgatggtgctgagccagagacagcacgagatcatcctgaaggccgcccaggagctgaagatgctgagagagcagaaggagcagctgcagaagatgaaggacttcggcagcgagccccagatggccgaccacctgcccccccaggagagcagactgcagaacaccagcagcagacccggcatgtaccccccccccggcagctacagaccccccccccccatgggcaagccccccggcagcatcgtgagacccagcgccccccccgccagaagcagcgtgcccgtgaccagaccccccgtgcccatcccccccccccccccccccccccccctgcccccccccccccccgtgatcaagccccagaccagcgccgtggagcaggagagatgggacgaggacagcttctacggcctgtgggacaccaacgacgagcagggcctgaacagcgagttcaagagcgagaccgccgccatccccagcgcccccgtgctgccccccccccccgtgcacagcagcatccccccccccggccccgtgcccatgggcatgccccccatgagcaagcccccccccgtgcagcagaccgtggactacggccacggcagagacatcagcaccaacaaggtggagcagatcccctacggcgagagaatcaccctgagacccgaccccctgcccgagagaagcaccttcgagaccgagcacgccggccagagagacagatacgacagagagagagacagagagccctacttcgacagacagagcaacgtgatcgccgaccacagagacttcaagagagacagagagacccacagagacagagacagagacagaggcgtgatcgactacgacagagacagattcgacagagagagaagacccagagacgacagagcccagagctacagagacaagaaggaccacagcagcagcagaagaggcggcttcgacagacccagctacgacagaaagagcgacagacccgtgtacgagggccccagcatgttcggcggcgagagaagaacctaccccgaggagagaatgcccctgcccgcccccagcctgagccaccagcccccccccgcccccagagtggagaagaagcccgagagcaagaacgtggacgacatcctgaagccccccggcagagagagcagacccgagagaatcgtggtgatcatgagaggcctgcccggcagcggcaagacccacgtggccaagctgatcagagacaaggaggtggagttcggcggccccgcccccagagtgctgagcctggacgactacttcatcaccgaggtggagaaggaggagaaggaccccgacagcggcaagaaggtgaagaagaaggtgatggagtacgagtacgaggccgagatggaggagacctacagaaccagcatgttcaagaccttcaagaagaccctggacgacggcttcttccccttcatcatcctggacgccatcaacgacagagtgagacacttcgaccagttctggagcgccgccaagaccaagggcttcgaggtgtacctggccgagatgagcgccgacaaccagacctgcggcaagagaaacatccacggcagaaagctgaaggagatcaacaagatggccgaccactgggagaccgcccccagacacatgatgagactggacatcagaagcctgctgcaggacgccgccatcgaggaggtggagatggaggacttcgacgccaacatcgaggagcagaaggaggagaagaaggacgccgaggaggaggagagcgagctgggctacatccccaagagcaagtgggagatggacaccagcgaggccaagctggacaagctggacggcctgagaaccggcaccaagagaaagagagactgggaggccatcgccagcagaatggaggactacctgcagctgcccgacgactacgacaccagagccagcgagccccccagacccagaggcgccagcctgtgcgtgaccctgctgcccagattcagcagctgcttcgtgagcaccgccctggtgttcttcaaggtgctgcagtgcccccaggaggtgctggagagctgctgcacccaggccagaagatag

SEQ ID NO: 201817 - DNA, 5469 bp, Artificial Sequence
  derived and/or modified sequence
atgtaccctaactggggtcgatacgggggttctagccattaccctccaccgcctgtgcccccacccccaccggttgcactgcccgaggcctcaccaggtcctggttacagcagcagtaccacccccgccgccccctcctcatccggtttcatgagcttccgtgagcagcacctggctcagttgcaacagcttcagcagatgcatcaaaagcagatgcagtgcgtgcttcagccccatcacctgccccctcctcctctgccgccccctcctgtcatgcccggaggcggttacggcgattggcaaccaccacctcctccaatgccacctccaccaggccctgccctgagctaccaaaagcaacagcaatataagcatcagatgctgcaccatcaacgggatggaccacccggtttagtgcccatggagcttgagagccctccggaatcccctccagtgcccccaggatcttacatgccacctagccaatcctacatgccgccgcctcagccgccacctagctattaccctcccacatcttcccagccttatctaccgcctgctcaaccttctccatctcaatcccctcctagccagagttatctggcaccaacaccctcatattctagctcttcatccagctcccagtcttatctgtcacactcccagtcttatctgcctagcagccaagcttccccatcccggccatctcagggccattctaagtcccagctgctcgccccaccacctccatcagccccccccggcaacaagacgactgtccagcaagaacccttggagagcggagctaagaacaagagcacggaacagcagcaagcagctcctgagcctgacccaagcacaatgacacctcaagagcagcagcagtactggtatcgccagcatttactgagtctacaacagcgcacgaaggttcatctcccgggacataagaaagggcctgtagttgctaaagacacccctgagcccgtcaaagaggaagtgacagttccggccaccagtcaggtaccggagagcccctccagcgaagaacctccactcccacctccaaatgaggaggtacctcctcccctgcctccagaggaaccgcagtccgaggaccctgaggaagacgcacgactgaagcagttgcaagctgcagctgcacactggcagcaacaccaacagcatcgggtgggatttcagtatcagggcatcatgcagaaacatactcagctgcaacagattctgcagcagtatcagcaaataatccaaccgccgccgcacattcaagccaccacaccccctcctgggattccgcctcccggcgtgcctcaagggatccctccccaactaacagccgccccggttcctcccgcttcgagtagccagtcgtctcaggttcccgagaaaccaagacctgccctgctacctacacctgtgtcattcggttccgcgccccctacaacgtaccatccccctctgcagagcgccggtccttcagaacaggtaaattccaaagcacctctgagtaagtcggctctgccgtactccagtttctcatcggatcaagggctcggggagtcttccgccgctccctcccagccaattactgcagtgaaggatatgccagtcagatcgggcggacttctgccagatcctccacgctccagctatctcgagtcaccgcgtggacctcggttcgatggtccacggcgcttcgaggacctgggaagccgatgcgaggggccgcgaccaaaaggacctcgtttcgaagggaacagacctgacggtccacgcccacgttacgagggtcaccccgctgagggaactaaaagcaaatgggggatgatccctaggggacctgccagtcagttttacattaccccctctacgtctctgagccctagacaaagtgggccacagtggaaaggacccaaacctgcattcggccagcaacaccagcaacaacctaaatcacaggctgagcctttaagtgggaataaggagcctctcgctgacacttcatctaatcagcaaaaaaacttcaaaatgcagtctgccgccttctccatcgccgcggatgttaaggacgtgaaggccgcacagagcaacgagaacctctcagactcacaacaggagcctcccaagtcggaggtctccgaaggacctgtagaaccttccaactgggatcagaacgtgcagagcatggagacacagatcgataaggcacaggcggtgacccagccagtccccctcgccaacaagcccgtgcctgctcagtctaccttcccaagcaaaaccggcggcatggagggcggcactgctgttgcaacgagcagtctgacggccgataacgactttaaaccagtaggaatcgggctcccgcacagcgaaaacaaccaagacaaggggttgcctcggccggacaatcgagacaatagactggaaggaaataggggaaactcctccagttatcgcggcccaggacaatctaggatggaggacacccgtgataagggactggttaaccgaggtagagggcaggccatcagcagagggcctggtttagtgaaacaggaagacttcagggataagatgatgggaaggcgggaggacagtcgcgagaagatgaatcgcggagaaggctcacgagacagggggctggtacgccctggatccagccgagagaaagtccctggcggcttacagggaagtcaagaccgcggcgcagccggctccagagagagaggtcctccaaggcgagccgggtctcaggagcgcgggcccctaagaagggccgggagccgggaaagaatccctcccaggcgagctggctcacgcgaacgtggacctcccaggggtccagggtcaagggaacgggggctgggcaggtccgattttgggagggacagaggcccctttcgccctgaaccaggagatggtggggaaaagatgtacccataccacagagatgagcctccccgggccccatggaatcacggggaggagagggggcatgaggaatttcctctcgacggtagaaacgcccccatggaacgggagaggctggatgattgggatagagagaggtattggagagaatgtgaacgagattaccaggatgatactttggaattgtacaaccgcgaggacagattctccgccccgccatcaagaagtcatgacggcgatcgccgaggcccctggtgggatgactgggagcgcgaccaggacatggacgaggactacaaccgggagatggagcgcgatatggatcgcgatgtagaccggattagtaggcccatggatatgtacgaccgaagtctcgacaatgagtgggaccgggattacggccgccccttggatgagcaggagagccagtttcgcgagcgagacatcccctcactacccccgctgccccccctgccccccctcccccccctggaccgttacagagacgacaggtggagagaggaacggaacagggagcacggctacgatagagacttccgcgacaggggcgagttgcggatccgagagtacccagaacgcggcgatacatggagggagaagcgcgattatgtgcccgatcgtatggattgggaacgtgagcggttgagtgacagatggtatcccagtgacgtagatagacattcacccatggctgaacacatgcccagttcccatcactcaagcgaaatgatgggaagtgatgcttcccttgatagtgatcagggtttggggggcgtgatggttttatcacagcgccagcacgagataatcctgaaggccgcccaggaactgaaaatgttgcgtgagcagaaagagcagctgcagaagatgaaggattttgggtcagagccccagatggctgaccacctacctccgcaagagtcaaggcttcaaaacacctctagcaggcccggtatgtaccctccaccgggatcctaccgacctcccccccctatggggaagcctccaggatcaattgtgcgcccctccgcgccacccgctagatcctccgtgcccgttaccaggccacccgtgcccatcccaccgccacctcccccaccccccctgccacctcctccccccgtcattaaacctcagaccagcgcagttgaacaggagagatgggacgaagattctttctacgggctgtgggacactaatgacgagcaaggtttgaacagtgagttcaaaagtgagacagccgcgattcccagtgcgccagtcctgcctccaccgcctgtgcactcctccataccccctcccggacctgtccctatgggaatgcctccaatgtccaaacctccccccgtccagcaaacagtggattatggccatggacgtgatatcagcaccaataaggttgaacagattccatacggtgaacgtatcacactccgccctgatcctctgcccgaacgctccaccttcgagaccgaacatgctgggcagagagatcgctacgacagagaacgggatagggagccttattttgaccgccagtctaacgtgatcgctgaccatagagattttaagcgcgatagagaaacacacagagacagggaccgcgacagaggagtcatcgactatgaccgggaccgattcgacagagaaagaaggccccgggacgaccgtgctcaatcctaccgggataaaaaggatcatagctcaagtagacggggtgggtttgaccggccgagctatgatagaaagtcagatagacctgtgtatgagggaccctctatgtttgggggagaaagacgcacataccccgaggagaggatgcctctccctgccccttcactctctcaccagccccccccagcccctagagtggaaaagaagccagagagcaaaaacgtcgacgacatcctcaagcctcctgggcgggagtcccggccagagagaatagtggtcataatgcgcggactcccaggatccgggaagacccacgtggccaagctcattagggtaatggaatatgagtacgaggcagagatggaggaaacatatcgaacatcgatgttcaagacgtttaagaagaccctggatgatgggttctttcccttcattattctcgacgctataaacgatcgggtacgacacttcgatcaattctggtcggccgccaagaccaagggttttgaagtctacctggcggaaatgagtgccgacaaccagacgtgcggtaaacggaacattcatggtcggaagttgaaggagataaacaagatggctgatcactgggagaccgccccaagacacatgatgcgcctggacatacgcagccttctgcaggacgcagccatcgaggaggtggaaatggaggactttgacgccaatatcgaggagcagaaggaagaaaagaaggacgcagaagaggaggagagcgaactggtgggcgatcgaccgacgactctcaattctgtgagcctgctgaagttccttaaaaaagtctag

SEQ ID NO: 201818 - DNA, 6441 bp, Artificial Sequence
  derived and/or modified sequence
atgtaccccaactggggacggtacggcgggagcagtcattatccaccaccccctgtcccccctcctcctcccgttgcgctgcccgaggcctcgcctggccccggatactcgtctagcaccacaccagccgcaccatcttccagtggctttatgtcgttccgcgaacagcacctggcccagctgcagcagctgcagcagatgcatcagaaacaaatgcagtgtgtcctgcaacctcatcacctaccaccaccacccctgcccccacctcccgttatgcccggcggaggctatggggattggcagcctccaccacctccaatgcctcctccgccaggacccgctctgagctatcagaagcagcagcagtataagcaccaaatgttacaccaccagagggacggccctcccggactcgttccaatggagcttgaaagccccccagagtctcctcctgttcctcccggtagctacatgccaccatcccagagttacatgcctccaccccagccaccaccttcttattatccacccacctcgagccagccataccttccacctgcgcagccatctccatcacagtcccccccgagtcaaagctacctggctcctactccgtcctattcatcctcatcctccagtagccagagttatttgtcccactcccagagctaccttccaagtagtcaggcatccccatccaggccctctcagggccattcgaagagtcagttattggccccaccccctccatccgcccctcccggcaataagactactgttcagcaagaacctctggaatctggggccaaaaacaagtcaacagagcagcaacaggcggcccccgagcccgacccatcaactatgacaccgcaggagcagcaacagtattggtatcggcaacatttgctcagcctccagcagcgaactaaagtgcacctccctgggcacaagaaagggcctgtggtcgcaaaggataccccagagcccgttaaagaggaagttactgtcccagcgacgtcccaggtgcctgaatcccccagcagcgaggagcctcccctccctcccccgaatgaagaggtgccacctcccctgccacccgaggaacctcagtcagaggaccccgaggaggatgcccgcctcaagcaactgcaagccgctgctgcccactggcaacagcaccaacagcaccgagttggcttccaataccaaggaatcatgcagaagcacacacagctccaacaaatcctgcaacagtaccagcaaatcatccagccaccaccacatatccagaccatgagcgtagacatgcagctgcggcactacgaaatgcagcagcagcaattccagcacctgtaccaagaatgggaaagggaattccaactctgggaggaacagctgcattcctatcctcataaggatcaactccaggaatatgagaaacaatggaaaacatggcaggggcatatgaaagccacacagtcctatctgcaggaaaaggttaattctttccagaatatgaagaatcaatacatggggaatatgtctatgccccctccatttgttccatactcgcaaatgccaccacccctgcccaccatgcccccgccagtacttccccctagcctgccccccccagtaatgccccccgccctgcccgctactgtgccacctcccggaatgcccccaccagtgatgcctcctagtctgccaacctcggtcccccccccaggaatgccacctagcttgtccagcgccgggcctcctcccgttctaccaccgcccagcctgtcttcggcagggcctccacctgtgctcccacccccatccctgtcgtcaaccgcacctcctccagtgatgccattacctcctctgagcagcgccacccctccacctggcattccgccccccggcgtgccacagggaattccacctcaactgactgccgcccccgtgcccccagcttcctccagccagtcaagtcaggtaccggagaagccacggcccgctcttctcccaacccctgtttccttcggctccgcacctcccaccacataccaccccccactgcagtcggccggccccagtgagcaggttaatagcaaggcccccttgtccaagtccgcgctcccgtactcatccttctcaagcgaccagggtctgggcgaatctagtgctgctcctagccagcctatcaccgccgtgaaagacatgcccgttaggagtggcggtcttctgcccgacccccctcgttcctcctacctggagtctccacgtgggccccggttcgacggcccaagaagatttgaggatctggggagtcggtgcgaggggccgagacccaaaggcccaagattcgagggaaatcgaccagacggccctaggcctagatacgaaggccaccctgccgaggggacgaaatccaagtggggtatgatccctcggggccctgcatcccaattctatattacacccagcacatcactgagcccaagacagtctgggccccagtggaagggcccaaaacccgcattcggccagcagcatcagcaacagcctaaatcccaggccgagcccctctcaggcaataaggagcccctggcagatacgtcgagtaaccagcagaaaaactttaaaatgcaatcagcagccttctctattgccgctgatgtgaaagacgttaaggcagcccagtctaatgaaaatctctctgattcacaacaggagccccctaagtctgaggttagcgagggcccagtcgagccttcgaattgggatcaaaacgtccagtccatggagactcagatcgataaagcacaggccgttacccaacctgtcccactggctaacaagcccgtacccgcacaaagtaccttcccgtctaaaactggcggaatggaaggaggcacggcggttgctacgtcgtctctgacggccgacaatgactttaagccagtgggcattggcttgcctcattccgaaaataaccaggacaaaggactgccgaggccggacaaccgggacaataggttggagggcaatcgtggtaattcctctagttatcgtggccccggacagagcagaatggaagacactcgcgacaaaggcctcgtgaatcgcggccggggtcaggctatctccagaggccccggcttagttaagcaagaggacttccgcgacaaaatgatggggagacgggaggacagccgggagaagatgaaccggggcgaggggtctcgtgatagaggactcgtccgcccaggaagcagtagagagaaagtcccagggggcctgcagggatctcaagaccgcggagctgcgggaagccgggaacgtggcccacctaggcgcgcgggcagtcaggaacgtggaccactgcggcgggctggttcaagagagagaatcccacccaggcgagccggctcccgagagagaggcccaccgagaggccctggctcgcgagaacggggcctcgggagatctgattttggcagagataggggcccattccgacccgaacccggagatggtggagagaagatgtacccatatcaccgggatgaacctccacgggcaccgtggaatcacggagaagaacgtgggcacgaagaattccctctcgatggcagaaacgctccaatggagagagagagattggatgactgggacagagaacgatactggagggagtgtgaaagagactaccaagatgatacactcgagttatataatagagaagatcggttcagtgcccccccctcccggtcacatgatggagaccggcgtggtccttggtgggatgattgggagcgcgaccaagatatggacgaagattacaatcgtgagatggagagggacatggaccgggatgtcgaccggatcagcagacccatggacatgtatgatagaagcttagataacgaatgggaccgtgactacgggagacccctcgacgaacaggagagccagtttcgggagagagatatcccatccttgcctccactgccacccctcccccctttacctccgctcgatcgctacagggatgatcgatggcgggaggagcgaaaccgcgagcacggctatgacagggactttcgcgaccggggggagctgcggattagggaatatcccgagcgcggagacacctggagagagaaacgagactacgtccctgatagaatggactgggagcgggagagactgtctgaccgatggtatccatcggacgtcgacaggcatagtccaatggcagagcacatgcccagcagtcatcacagttcagaaatgatggggagcgacgcgagtctggattctgatcaaggactgggtggagtgatggtactaagtcagcgacagcatgaaattatcttgaaagcagctcaggagctgaagatgcttcgcgagcaaaaggaacagttgcagaagatgaaggacttcggatcggagccacagatggcagatcacttaccacctcaggaatctcggctgcaaaatacctcgtctcgtccgggtatgtatcctcctcccggatcctaccgtcctccccccccaatgggaaagccccctggatctatcgtacgcccatcggctcctcctgctaggagttccgtccccgttactagaccccctgtgcccatccctccaccgccaccgcctcccccactaccacccccaccacccgtgatcaagcctcagacctctgccgtggagcaggaaagatgggatgaggacagtttttatggcctgtgggataccaatgacgagcagggcctcaattcagaatttaaatctgagaccgcagcaatcccgagtgccccagtgctgcctccaccccccgtgcatagcagcattcccccacccgggcccgttcccatgggtatgcctccaatgtctaaacctccgccagtgcaacagaccgtcgactacgggcatgggagagatatctccacgaacaaagtcgagcagattccttatggagaacggataaccctcaggcccgatccactccccgagcgttctacctttgagactgaacatgcaggtcagcgcgatagatatgacagggaaagggaccgagagccttacttcgacagacagtcaaacgtgatcgctgatcaccgggattttaaacgggacagggagacacaccgggaccgcgacagggacagaggagttatagactatgaccgcgatcggtttgaccgcgagcggcggccccgtgatgatcgggcccaatcatacagagacaaaaaagaccattccagcagtcggcgcggtggttttgatcgtccatcatacgatcggaagtccgaccgtccagtttacgagggacctagcatgtttgggggggagagacgtacataccctgaagaaaggatgccccttccagcacctagtctctctcaccaaccacctccagctccccgtgtcgaaaagaaaccggaatcaaagaatgttgatgacattttaaagcctccgggacgggaatctaggccggagcggattgtggtaatcatgcgcgggctgccgggcagtggaaagactcatgtcgcgaaactgatcagagacaaggaggtggaattcggcggccccgcacctcgcgtactgtctctcgatgactacttcatcacagaggttgagaaggaggagaaggacccagattccggcaagaaggtgaagaagaaagtgatggagtacgagtatgaggccgagatggaagagacctaccgcacctctatgtttaaaactttcaagaagacgctggacgacggatttttccccttcattatcctggatgcgattaacgaccgtgtacggcactttgatcaattctggagtgccgccaagaccaagggctttgaagtctacctcgctgagatgagcgctgataaccaaacatgcggaaagcggaacattcacgggaggaaactgaaggaaattaataagatggcagatcattgggaaacagctccgcgccacatgatgcgtctcgacattagaagtctgctgcaagacgccgccatcgaagaggtcgaaatggaggactttgacgcaaatatcgaggagcagaaagaagagaagaaagatgccgaggaggaagaatcagagttagggtacatccctaagtctaagtgggagatggacacaagcgaggccaagctggataagttagatgggctgcggaccggaacgaagcgaaagagggactgggaggcaattgcatctcgcatggaggattacctgcagctgccagacgattacgacactcgcgcatctgaaccaggcaagaagcgggtcagatgggctgatctggaggaaaagaaggacgccgatagaaagagggcaattgggttcgtggtcggtcagaccgactgggaaaagattaccgacgaatctgggcacttggcagagaaggcgctcaaccgtaccaagtacatatag

SEQ ID NO: 201819 - DNA, 5565 bp, Artificial Sequence
  derived and/or modified sequence
atgacaccacaagagcagcagcagtactggtaccgccagcatttactttccctgcaacagcgtacaaaggttcacctgcccggccacaaaaaggggcccgtggtcgcaaaagacaccccggagcctgtcaaagaggaagtgacggtacctgcgacttcccaggtacccgaaagcccgtccagcgaagagcctccgctccctccccctaatgaagaggtgccacctcctttaccacccgaagaacctcaatcagaagatcctgaagaggacgctcgactgaaacagcttcaggccgcggcagcacattggcagcaacatcagcagcacagagtaggtttccaataccaggggattatgcaaaaacacacgcagctgcagcagattttgcagcagtaccaacaaattatccagccccccccccatatacagacaatgagcgtagatatgcagctaagacattatgaaatgcaacagcagcagtttcagcacttatatcaggaatgggagcgtgagtttcaattgtgggaagagcaactacactcttatccccacaaggaccagctacaggagtacgagaagcaatggaagacttggcaggggcacatgaaggctacccaatcatatctgcaggagaaagtaaacagcttccaaaacatgaaaaaccaatacatgggcaacatgagtatgccaccccccttcgtcccttactctcaaatgccacctccactccccactatgcctcctccagtcttacccccatctctgcccccacctgtgatgcccccagccctgcccgccaccgtaccgcctcctggcatgccccctcccgtgatgcccccaagcctccctacatcagtgccccctcctgggatgccaccttccctgtcaagtgcgggacctcctcctgtgttgccgccgccctcattgagttctgccggccctccaccagtgttgccacctccgtcactgtccagtactgcccccccccctgtaatgcccttaccgcctctctccagtgctacgcctccccccggaatccctcccccgggagtgccccaaggtatcccgccgcagctaaccgccgctccagtgccgccagcctcttccagtcagtcttcccaggtgcccgaaaagccacgcccggcattgctgcccacacccgtctcatttgggtcagcgcccccaactacatatcatcctcccctccaatcagcaggaccgtccgagcaggtcaattcgaaggccccgctctcaaagtctgctttaccttattcttctttttcaagtgatcagggcctcggggaaagttctgccgctccttctcagcctatcacagccgtaaaagatatgcctgtccggtccggtggcctgttacccgatcctcctcgctcatcatacttggagtccccacggggcccacggtttgatggacccaggaggtttgaagatctcggaagtcgatgcgaggggcctaggcctaagggccccagatttgagggtaaccgcccagatggacctagacctcgctacgagggacatcctgctgaaggaactaagtctaaatgggggatgataccacgcggcccggcctcccaattctacatcaccccgagtacctccctgtcaccaagacagtcaggaccgcaatggaagggcccgaagccagcctttggccagcagcaccagcagcaacctaaatcccaggcagagcctcttagcggcaataaagaacctctggctgatactagttcaaatcagcagaaaaacttcaagatgcagagcgccgcgttttccatcgccgctgatgtgaaagacgtgaaggccgcgcagtccaatgagaacctgagcgacagccagcaagagccaccaaaaagcgaggtttccgagggacccgtggagccttcaaattgggatcaaaacgtgcagtctatggagacccagattgataaagcccaggcagtcacacagcccgtgcccctcgctaataaacctgtgcccgcgcagtcaactttccctagcaaaactggcggtatggaggggggaactgccgtggccacgagctcattgaccgccgacaatgatttcaagcccgtagggattggcttgccgcattctgaaaataatcaggataaagggctgccacggcccgacaatagagacaatcgcctggagggcaatcgcggaaatagctctagctatcgcggccccgggcagtccaggatggaagacactagggacaagggactggtgaaccgcggtcgaggacaggctattagtcgcggcccaggcttagtgaagcaggaagatttccgtgacaagatgatgggaagacgggaggattccagagagaagatgaaccgcggagaaggatccagagacaggggtcttgttcgccctggatcttccagggaaaaggtaccaggtggcctccagggctcgcaggaccggggggcagctggcagcagagagcgggggccccccagaagggcagggagccaggagagaggaccacttcgcagggccggatctcgagagagaatccctccaagaagagccggttccagggagcgcggcccccccaggggtccgggatcacgcgaaaggggattggggcggtccgactttggccgggatcggggccccttcagacccgaaccaggtgacggtggtgagaagatgtatccataccaccgggacgagccacctagggcaccatggaatcacggggaggagcggggacacgaggagttcccattggacggcaggaatgcccctatggaacgtgagcgcctggacgattgggaccgggagagatactggcgcgagtgcgagagggattatcaggatgatacattggaactgtacaacagggaagacaggttttcggcgcccccttcacggagccatgacggtgatcgccgagggccatggtgggacgattgggagcgtgaccaggatatggatgaagattacaacagggagatggaaagggatatggacagagacgtggaccggatttcccgtccaatggatatgtacgatcggagcctggataacgaatgggatcgcgattatgggagaccgctggacgaacaggaaagtcagtttcgggagcgagatattccctcactgccgccgctgccacccctaccacctttgccaccactggatcgctatagggacgaccgttggagggaggagaggaacagggaacatggatacgaccgtgattttagggataggggcgagttacgaataagagaatacccagagagaggagatacctggcgggaaaaaagagattatgtccctgataggatggactgggaacgagaaagactgtcagataggtggtaccctagtgatgtggaccggcactcccccatggccgagcacatgccctcgtcgcaccattcatctgaaatgatgggatcagacgccagcctcgactcagaccagggactcggcggagttatggtgctgtcccaacggcagcacgagatcatcctaaaagctgctcaagagttgaagatgttgcgcgaacagaaggagcagctgcagaagatgaaggattttggctctgagccacagatggccgaccacctccctccccaagaaagtcggctccagaacacgtcttccagacctggcatgtaccccccaccagggtcctatagacccccacctccaatgggaaagccgcctggatcgatcgtaaggccatcagctccccctgctcgtagtagcgtacccgtgactcgtccgcccgtcccaatccccccccctccacctcctccccctctacctcctccacccccagtgatcaagcctcagactagcgcagtggaacaagagaggtgggacgaggattcattttacgggctgtgggacactaacgatgagcaagggcttaatagcgaatttaaaagtgaaacagccgccatccccagtgctccagtgctgcctccccccccagtccacagctctatccccccaccaggtccagtgcccatgggcatgccccctatgtcaaaaccaccccccgtgcagcagactgtggattatggacacggtagggatatttccacgaacaaagttgaacaaatcccatacggggaacgcatcacactgcggcccgatccattacctgaacgaagcacctttgaaaccgagcatgcaggtcagcgggatcgatacgatcgagaacgggaccgagaaccgtactttgatcggcaaagcaacgttattgccgatcatcgggactttaagcgcgaccgcgaaacccaccgcgacagggaccgcgaccggggtgtcatcgactacgatcgcgaccgctttgaccgtgagaggcggcccagagacgacagggcgcagtcctatagagataaaaaagatcacagtagtagccgccgcggaggtttcgataggccatcttatgatcggaagtctgatcgacctgtctacgagggcccaagtatgttcggcggcgaaaggagaacttatccagaagaacgcatgcctctgccagctccttccctgagtcaccaacccccccccgcaccaagggtggagaagaagcccgaatctaaaaatgtggacgatatcctcaaaccccctggcagggaaagcagacctgagcgcatcgttgtcattatgagaggactgccaggctccggtaagacccacgtggccaaactgataagggataaggaagtagagttcggcgggccagccccccgcgttctctcgttggacgattattttattacagaagttgagaaggaagaaaaagaccccgatagcggaaagaaggtcaagaaaaaggtgatggagtatgagtatgaggccgaaatggaagagacataccggacttcaatgtttaagacttttaagaaaactctagatgatggtttcttccccttcataattctggatgctattaacgaccgggtccggcattttgatcagttttggtcagcagctaagactaagggcttcgaagtttacttggctgaaatgtcagctgataaccaaacgtgcgggaagcgcaatatccatgggcgaaagctgaaggaaattaacaagatggcagatcactgggagacagcaccaagacacatgatgagactggacattcgctctctgcttcaggatgcagcaattgaagaggtggaaatggaggattttgatgctaacattgaggagcagaaggaggagaagaaggacgctgaagaagaggaatcggaattagggtacataccaaagtctaagtgggaaatggacacctctgaggcaaaattggacaagttagatggtcttcgcaccggtacaaagagaaagagggactgggaggcgatcgcctccagaatggaagactacttacagcttcccgacgattatgatacacgcgcctcagagccacctcgccctcggggcgcttccttgtgcgtgacgctcctgcccaggttctcctcttgctttgtgagcaccgccctcgtattcttcaaggtgctgcagtgtccccaggaggttctggagtcatgttgcacccaggccaggcggtag

SEQ ID NO: 201820 - DNA, 5469 bp, Artificial Sequence
  derived and/or modified sequence
atgtaccccaactggggccgctatggaggcagcagccactacccacctcctcctgtgcccccacctcctcctgtggccctgcctgaggccagccctggccctggctacagcagcagcaccaccccagctgcccccagcagcagcggcttcatgtccttccgggagcagcacctggcccagctgcagcagctgcagcagatgcaccagaagcagatgcagtgtgtgctgcagccccaccacctgcccccaccacccctgcccccacctcctgtgatgcctgggggcggctatggagactggcagcccccacctccacccatgcctcctcctcctggccctgccctgagctaccagaagcagcagcagtacaagcaccagatgctgcaccaccagagagatggccccccaggcctggtgcccatggagctggagagccccccagagagcccccctgtgcccccaggcagctacatgccacccagccagagctacatgcccccaccccagcccccacccagctactacccacccaccagcagccagccctacctgcccccagcccagcccagccccagccagagcccccccagccagagctacctggcccccacccccagctacagcagcagcagcagcagcagccagagctacctgagccacagccagagctacctgcccagcagccaggccagccccagccggcccagccagggccacagcaagagccagctgctggcccctcctcctccttctgcccctcctggcaacaagaccaccgtgcagcaggagcccctggagagcggggccaagaacaagagcacagagcagcagcaggccgcccctgagccagaccccagcaccatgaccccccaggagcagcagcagtactggtaccggcagcacctgctgagcctgcagcagaggaccaaggtgcacctgcccggccacaagaagggccctgtggtggccaaggacaccccagagcctgtgaaggaggaggtgacagtgcctgccaccagccaggtgcctgagagccccagcagcgaggagccccccctgcccccaccaaatgaggaggtgcccccacccctgcccccagaggagccccagagcgaggaccctgaggaggatgcccggctgaagcagctgcaggccgctgctgcccactggcagcagcaccagcagcaccgggtgggcttccagtaccagggcatcatgcagaagcacacccagctgcagcagatcctgcagcagtaccagcagatcatccagcccccaccccacatccaggccaccaccccacctcctggcatccccccacctggggtgccccagggcatccccccccagctgacagctgcccctgtgcccccagccagcagcagccagagcagccaggtgcctgagaagcccaggcctgccctgctgcccacccctgtgtcctttggcagcgccccacccaccacctaccacccccccctgcagagcgctggccccagcgagcaggtgaacagcaaggcccccctgagcaagagcgccctgccctacagcagcttcagcagtgaccagggcctgggggagagcagcgctgcccccagccagcccatcacagctgtgaaggacatgcctgtgcgcagcggcggcctgctgcctgaccccccaagaagcagctacctggagagcccccggggccccaggtttgatggccccaggagatttgaggacctgggcagccgctgtgagggcccccggcccaagggccccaggtttgagggcaacagaccagatggcccccggcccaggtatgagggccaccctgctgagggcaccaagagcaagtggggcatgatcccccggggccctgccagccagttctacatcacccccagcaccagcctgagcccccggcagagcggcccccagtggaagggccccaagccagccttcggccagcagcaccagcagcagcccaagagccaggccgagcccctgagcggcaacaaggagcccctggccgacaccagcagcaaccagcagaagaacttcaagatgcagagcgctgccttcagcattgctgctgatgtgaaggatgtgaaggccgcccagagcaatgaaaacctgagtgacagccagcaggagccccccaagtctgaggtgtctgagggccctgtggagcccagcaactgggaccagaatgtgcagagcatggagacccagattgacaaggcccaggccgtgacccagcctgtgcccctggccaacaagcctgtgcctgcccagagcaccttccccagcaagacaggaggcatggagggcggcacagctgtggccaccagcagcctgacagctgacaatgacttcaagcctgtgggcatcggcctgccccacagcgagaacaaccaggacaagggcctgcccaggccagacaacagagacaaccggctggagggcaacagaggcaacagcagcagctaccggggccctggccagagcaggatggaggacacccgggacaagggcctggtgaacagaggccggggccaggccatcagccggggccctggcctggtgaagcaggaggacttccgggacaagatgatgggcagaagagaggacagccgggagaagatgaacagaggagagggcagccgggaccggggcctggtgcggcccggcagcagccgggagaaggtgcctgggggcctgcagggcagccaggacagaggagctgctggcagccgggagcggggccccccccggcgggccggcagccaggagcggggccccctgcggcgggccggcagccgggagcgcatccccccccggcgggccggcagccgggagcggggccccccccggggccctggcagccgggagcggggcctgggccgcagtgactttggccgggaccggggccccttccggcctgagcctggagatggaggagagaagatgtacccctaccacagagatgagcccccccgggccccctggaaccacggggaggagcggggccacgaggagttccccctggatggaagaaatgcccccatggagcgggagcggctggatgactgggaccgggagcgctactggagagaatgtgagcgggactaccaggatgacaccctggagctgtacaaccgggaggaccgcttcagcgccccacccagccgcagccatgatggagacagaagaggcccctggtgggatgactgggagcgggaccaggacatggatgaggactacaaccgggagatggagcgggacatggacagagatgtggaccgcatcagccggcccatggacatgtatgacaggagcctggacaatgagtgggaccgggactatggccggcccctggatgagcaggagagccagttccgggagcgggacatccccagcctgccccccctgccccccctgccccccctgccccccctggaccgctacagagatgaccgctggagggaggagaggaaccgggagcacggctatgaccgggacttccgggacagaggagagctgcgcatccgggagtacccagagcggggggacacctggagggagaagagggactatgtgcctgacaggatggactgggagcgggagcggctgagtgaccgctggtaccccagtgatgtggacagacacagccccatggccgagcacatgcccagcagccaccacagcagcgagatgatgggcagtgatgccagcctggacagcgaccagggcctgggcggcgtgatggtgctgagccagaggcagcacgagatcatcctgaaggccgcccaggagctgaagatgctgcgggagcagaaggagcagctgcagaagatgaaggactttggcagcgagccccagatggctgaccacctgcccccccaggagagccggctgcagaacaccagcagccggcccggcatgtacccacctcctggcagctacagacctcctccacccatgggcaagcccccaggcagcatcgtgcggcccagcgcccccccagcccggagctctgtgcctgtgaccaggcctcctgtgcccatccccccacctcctcctcctccacccctgcccccacctcctcctgtgatcaagccccagaccagcgctgtggagcaggagcgctgggatgaagattccttctacggcctgtgggacaccaatgatgagcagggcctgaacagcgagttcaagtcagaaacagctgccatccccagcgcccctgtgctgcccccacctcctgtgcacagcagcatccccccacctggccctgtgcccatgggcatgccacccatgagcaagcccccacctgtgcagcagacagtggactatggccacggccgggacatcagcaccaacaaggtggagcagatcccctatggagagcgcatcaccctgcggccagaccccctgcctgagaggagcacctttgaaacagagcacgccggccagagggacagatatgaccgggagcgggaccgggagccctactttgaccggcagagcaatgtgattgctgaccaccgggacttcaagagggaccgggagacccaccgggaccgggaccgggacagaggagtgattgattatgaccgggacagatttgaccgggagcggcggcccagagatgaccgggcccagagctacagagacaagaaggaccacagcagcagccggcggggcggctttgaccggcccagctatgacaggaagagtgacaggcctgtgtatgagggccccagcatgtttggaggagagaggaggacctacccagaggagaggatgcccctgcctgcccccagcctgagccaccagcccccaccagccccccgggtggagaagaagccagagagcaagaatgtggatgacatcctgaagcccccaggccgggagagcaggcctgagcgcatcgtggtgatcatgaggggcctgcccggcagcggcaagacccacgtggccaagctgatccgggtgatggagtatgaatatgaggccgagatggaggagacctaccgcacctccatgttcaagaccttcaagaagaccctggatgatggcttcttccccttcatcatcctggatgccatcaatgacagagtgcgccactttgaccagttctggagcgctgccaagaccaagggctttgaggtgtacctggccgagatgtctgctgacaaccagacctgtgggaagaggaacatccacggcaggaagctgaaggagatcaacaagatggctgaccactgggagacagcccccaggcacatgatgaggctggacatccgcagcctgctgcaggatgctgccatcgaggaggtggagatggaggactttgatgccaacatcgaggagcagaaggaggagaagaaggatgctgaggaggaggagagcgagctggtgggggaccggcccaccaccctgaacagcgtgtccctgctgaagttcctgaagaaggtgtag

SEQ ID NO: 201821 - DNA, 6441 bp, Artificial Sequence
  derived and/or modified sequence
atgtaccccaactggggccgctatggaggcagcagccactacccacctcctcctgtgcccccacctcctcctgtggccctgcctgaggccagccctggccctggctacagcagcagcaccaccccagctgcccccagcagcagcggcttcatgtccttccgggagcagcacctggcccagctgcagcagctgcagcagatgcaccagaagcagatgcagtgtgtgctgcagccccaccacctgcccccaccacccctgcccccacctcctgtgatgcctgggggcggctatggagactggcagcccccacctccacccatgcctcctcctcctggccctgccctgagctaccagaagcagcagcagtacaagcaccagatgctgcaccaccagagagatggccccccaggcctggtgcccatggagctggagagccccccagagagcccccctgtgcccccaggcagctacatgccacccagccagagctacatgcccccaccccagcccccacccagctactacccacccaccagcagccagccctacctgcccccagcccagcccagccccagccagagcccccccagccagagctacctggcccccacccccagctacagcagcagcagcagcagcagccagagctacctgagccacagccagagctacctgcccagcagccaggccagccccagccggcccagccagggccacagcaagagccagctgctggcccctcctcctccttctgcccctcctggcaacaagaccaccgtgcagcaggagcccctggagagcggggccaagaacaagagcacagagcagcagcaggccgcccctgagccagaccccagcaccatgaccccccaggagcagcagcagtactggtaccggcagcacctgctgagcctgcagcagaggaccaaggtgcacctgcccggccacaagaagggccctgtggtggccaaggacaccccagagcctgtgaaggaggaggtgacagtgcctgccaccagccaggtgcctgagagccccagcagcgaggagccccccctgcccccaccaaatgaggaggtgcccccacccctgcccccagaggagccccagagcgaggaccctgaggaggatgcccggctgaagcagctgcaggccgctgctgcccactggcagcagcaccagcagcaccgggtgggcttccagtaccagggcatcatgcagaagcacacccagctgcagcagatcctgcagcagtaccagcagatcatccagcccccaccccacatccagaccatgtctgtggacatgcagctgcggcactatgagatgcagcagcagcagttccagcacctgtaccaggagtgggagcgggagttccagctgtgggaggagcagctgcacagctacccccacaaggaccagctgcaggagtatgagaagcagtggaagacctggcagggccacatgaaggccacccagagctacctgcaggagaaggtgaacagcttccagaacatgaagaaccagtacatgggcaacatgtccatgcccccaccatttgtgccctacagccagatgcccccacccctgcccaccatgcctcctcctgtgctgccccccagcctgcccccacctgtgatgcccccagccctgcctgccaccgtgcccccacctggcatgcctcctcctgtgatgccacccagcctgcccacctctgtgcccccacctggcatgccacccagcctgagcagcgctggccccccacctgtgctgcccccacccagcctgagcagcgctggccccccacctgtgctgcccccacccagcctgagcagcacagcccctcctcctgtgatgcccctgccccccctgagcagcgccaccccacctcctggcatccccccacctggggtgccccagggcatccccccccagctgacagctgcccctgtgcccccagccagcagcagccagagcagccaggtgcctgagaagcccaggcctgccctgctgcccacccctgtgtcctttggaagtgccccacccaccacctaccacccccccctgcagagcgctggccccagcgagcaggtgaacagcaaggcccccctgagcaagagcgccctgccctacagcagcttcagcagtgaccagggcctgggggagagcagcgctgcccccagccagcccatcacagctgtgaaggacatgcctgtgcgcagcggcggcctgctgcctgacccccccaggagcagctacctggagagcccccggggccccaggtttgatggccccaggagatttgaggacctgggcagccgctgtgagggcccccggcccaagggccccaggtttgagggcaacagaccagatggcccccggcccaggtatgagggccaccctgctgagggcaccaagagcaagtggggcatgatcccccggggccctgccagccagttctacatcacccccagcaccagcctgagcccccggcagagcggcccccagtggaagggccccaagccagccttcggccagcagcaccagcagcagcccaagagccaggccgagcccctgagcggcaacaaggagcccctggccgacaccagcagcaaccagcagaagaacttcaagatgcagagcgctgccttcagcattgctgctgatgtgaaggatgtgaaggccgcccagagcaatgaaaacctgagtgacagccagcaggagccccccaagtctgaggtgtctgagggccctgtggagcccagcaactgggaccagaatgtgcagagcatggagacccagattgacaaggcccaggccgtgacccagcctgtgcccctggccaacaagcctgtgcctgcccagagcaccttccccagcaagacaggaggcatggagggcggcacagctgtggccaccagcagcctgacagctgacaatgacttcaagcctgtgggcatcggcctgccccacagcgagaacaaccaggacaagggcctgcccaggccagacaacagagacaaccggctggagggcaacagaggcaacagcagcagctaccggggccctggccagagcaggatggaggacacccgggacaagggcctggtgaacagaggccggggccaggccatcagccggggccctggcctggtgaagcaggaggacttccgggacaagatgatgggccggcgggaggacagccgggagaagatgaacagaggagagggcagccgggaccggggcctggtgcggcccggcagcagccgggagaaggtgcctgggggcctgcagggcagccaggacagaggagctgctggcagccgggagcggggccccccaagaagagctggcagccaggagcggggccccctgcggcgggccggcagccgggagcgcatccccccaagaagagctggcagccgggagcggggccccccccggggccctggcagccgggagcggggcctgggccgcagtgactttggccgggaccggggccccttccggcctgagcctggagatggaggagagaagatgtacccctaccacagagatgagcccccccgggccccctggaaccacggggaggagcggggccacgaggagttccccctggatggaagaaatgcccccatggagcgggagcggctggatgactgggaccgggagcgctactggagagaatgtgagcgggactaccaggatgacaccctggagctgtacaacagagaagatcgcttcagcgccccacccagccgcagccatgatggagaccggcggggcccctggtgggatgactgggagcgggaccaggacatggatgaggactacaaccgggagatggagcgggacatggacagagatgtggaccgcatcagccggcccatggacatgtatgacaggagcctggacaatgagtgggaccgggactatggccggcccctggatgagcaggagagccagttccgggagcgggacatccccagcctgccccccctgccccccctgccccccctgccccccctggaccgctacagagatgaccgctggagggaggagaggaaccgggagcacggctatgaccgggacttccgggacagaggagagctgcgcatccgggagtacccagagcggggggacacctggagggagaagagggactatgtgcctgacaggatggactgggagcgggagcggctgagtgaccgctggtaccccagtgatgtggacagacacagccccatggccgagcacatgcccagcagccaccacagcagcgagatgatgggcagtgatgccagcctggacagcgaccagggcctgggcggcgtgatggtgctgagccagaggcagcacgagatcatcctgaaggccgcccaggagctgaagatgctgcgggagcagaaggagcagctgcagaagatgaaggactttggaagtgagccccagatggctgaccacctgcccccccaggagagccggctgcagaacaccagcagcaggcctggcatgtacccacctcctggcagctaccggcccccaccacccatgggcaagcccccaggcagcatcgtgcggcccagcgcccccccagcccggagctctgtgcctgtgacccggccccctgtgcccatccccccacctcctcctcctccacccctgcccccacctcctcctgtgatcaagccccagaccagcgctgtggagcaggagcgctgggatgaggacagcttctacggcctgtgggacaccaatgatgagcagggcctgaacagcgagttcaagtcagaaacagctgccatccccagcgcccctgtgctgcccccacctcctgtgcacagcagcatccccccacctggccctgtgcccatgggcatgccacccatgagcaagcccccacctgtgcagcagacagtggactatggccacggccgggacatcagcaccaacaaggtggagcagatcccctacggggagcgcatcaccctgcggccagaccccctgcctgagaggagcacctttgaaacagaacatgctggccagagggacagatatgaccgggagcgggaccgggagccctactttgaccggcagagcaatgtgattgctgaccaccgggacttcaagagggaccgggagacccaccgggaccgggaccgggaccggggcgtcatcgactatgaccgggacagatttgaccgggagcggcggcccagagatgaccgggcccagagctacagagacaagaaggaccacagcagcagcagaagaggaggctttgaccggcccagctatgacaggaagagtgacaggcctgtgtatgagggccccagcatgtttggaggagagaggaggacctacccagaggagaggatgcccctgcctgcccccagcctgagccaccagcccccaccagccccccgggtggagaagaagccagagagcaagaatgtggatgacatcctgaagcccccaggccgggagagcaggcctgagagaattgtggtgatcatgaggggcctgcccggcagcggcaagacccacgtggccaagctgatccgggacaaggaggtggagtttggaggccctgccccccgggtgctgagcctggatgactacttcatcacagaggtggagaaggaggagaaggaccctgacagcggcaagaaggtgaagaagaaggtgatggagtatgaatatgaagctgagatggaggagacctaccgcacctccatgttcaagaccttcaagaagaccctggatgatggcttcttccccttcatcatcctggatgccatcaatgacagagtgcgccactttgaccagttctggagcgctgccaagaccaagggctttgaggtgtacctggccgagatgtctgctgacaaccagacctgtgggaagaggaacatccacggcaggaagctgaaggagatcaacaagatggctgaccactgggagacagcccccaggcacatgatgaggctggacatccgcagcctgctgcaggatgctgccatcgaggaggtggagatggaggactttgatgccaacatcgaggagcagaaggaggagaagaaggatgctgaggaggaggagagcgagctgggctacatccccaagagcaagtgggagatggacaccagcgaggccaagctggacaagctggatggcctgaggacaggcaccaagaggaagagggactgggaggccatcgccagcaggatggaggactacctgcagctgcctgatgattatgacacccgggccagcgagcccgggaagaagagggtgcgctgggccgacctggaggagaagaaggatgctgacaggaagagggccatcggctttgtggtgggccagacagactgggagaagatcacagatgagagcggccacctggccgagaaggccctgaacagaaccaagtacatctag

SEQ ID NO: 201822 - DNA, 5565 bp, Artificial Sequence
  derived and/or modified sequence
atgaccccccaggagcagcagcagtactggtaccggcagcacctgctgagcctgcagcagaggaccaaggtgcacctgcccggccacaagaagggccctgtggtggccaaggacaccccagagcctgtgaaggaggaggtgacagtgcctgccaccagccaggtgcctgagagccccagcagcgaggagccccccctgcccccaccaaatgaggaggtgcccccacccctgcccccagaggagccccagagtgaagatcctgaagaagatgcccggctgaagcagctgcaggccgccgccgcccactggcagcagcaccagcagcaccgggtgggcttccagtaccagggcatcatgcagaagcacacccagctgcagcagatcctgcagcagtaccagcagatcatccagcccccaccccacatccagaccatgtctgtggacatgcagctgcggcactatgagatgcagcagcagcagttccagcacctgtaccaggagtgggagcgggagttccagctgtgggaggagcagctgcacagctacccccacaaggaccagctgcaggagtatgagaagcagtggaagacctggcagggccacatgaaggccacccagagctacctgcaggagaaggtgaacagcttccagaacatgaagaaccagtacatgggcaacatgtccatgcctcctccatttgtgccctacagccagatgcccccacccctgcccaccatgcctcctcctgtgctgccccccagcctgcccccacctgtgatgcccccagccctgcctgccaccgtgcccccacctggcatgcctcctcctgtgatgccacccagcctgcccacctctgtgcccccacctggcatgccacccagcctgagcagcgctggccccccacctgtgctgcccccacccagcctgagcagcgctggccccccacctgtgctgcccccacccagcctgagcagcacagcccctcctcctgtgatgcccctgccccccctgagcagcgccaccccacctcctggcatccccccacctggggtgccccagggcatccccccccagctgacagctgcccctgtgcccccagccagcagcagccagagcagccaggtgcctgagaagcccaggcctgccctgctgcccacccctgtgtcctttggcagcgccccacccaccacctaccacccccccctgcagagcgctggccccagcgagcaggtgaacagcaaggcccccctgagcaagagcgccctgccctacagcagcttcagcagtgaccagggcctgggggagagcagcgctgcccccagccagcccatcacagctgtgaaggacatgcctgtgcgcagcggcggcctgctgcctgaccccccaagaagcagctacctggagagcccccggggccccaggtttgatggccccaggagatttgaggacctgggcagccgctgtgagggcccccggcccaagggccccaggtttgagggcaacagaccagatggcccccggcccaggtatgagggccaccctgctgagggcaccaagagcaagtggggcatgatcccccggggccctgccagccagttctacatcacccccagcaccagcctgagcccccggcagagcggcccccagtggaagggccccaagccagccttcggccagcagcaccagcagcagcccaagagccaggccgagcccctgagcggcaacaaggagcccctggccgacaccagcagcaaccagcagaagaacttcaagatgcagagcgctgccttcagcattgctgctgatgtgaaggatgtgaaggccgcccagagcaatgaaaacctgagtgacagccagcaggagccccccaagtctgaggtgtctgagggccctgtggagcccagcaactgggaccagaatgtgcagagcatggagacccagattgacaaggcccaggccgtgacccagcctgtgcccctggccaacaagcctgtgcctgcccagagcaccttccccagcaagacaggaggcatggagggcggcacagctgtggccaccagcagcctgacagctgacaatgacttcaagcctgtgggcatcggcctgccccacagcgagaacaaccaggacaagggcctgcccaggccagacaacagagacaaccggctggagggcaacagaggcaacagcagcagctaccggggccctggccagagcaggatggaggacacccgggacaagggcctggtgaacagaggccggggccaggccatcagccggggccctggcctggtgaagcaggaggacttccgggacaagatgatgggcagaagagaggacagccgggagaagatgaacagaggagagggcagccgggaccggggcctggtgcggcccggcagcagccgggagaaggtgcctgggggcctgcagggcagccaggacagaggagctgctggcagccgggagcggggccccccccggcgggccggcagccaggagcggggccccctgcggcgggccggcagccgggagcgcatccccccccggcgggccggcagccgggagcggggccccccccggggccctggcagccgggagcggggcctgggccgcagtgactttggccgggaccggggccccttccggcctgagcctggagatggaggagagaagatgtacccctaccacagagatgagcccccccgggccccctggaaccacggggaggagcggggccacgaggagttccccctggatggaagaaatgcccccatggagcgggagcggctggatgactgggaccgggagcgctactggagagaatgtgagcgggactaccaggatgacaccctggagctgtacaaccgggaggaccgcttcagcgccccacccagccgcagccatgatggagacagaagaggcccctggtgggatgactgggagcgggaccaggacatggatgaggactacaaccgggagatggagcgggacatggacagagatgtggaccgcatcagccggcccatggacatgtatgacaggagcctggacaatgagtgggaccgggactatggccggcccctggatgagcaggagagccagttccgggagcgggacatccccagcctgccccccctgccccccctgccccccctgccccccctggaccgctacagagatgaccgctggagggaggagaggaaccgggagcacggctatgaccgggacttccgggacagaggagagctgcgcatccgggagtacccagagcggggggacacctggagggagaagagggactatgtgcctgacaggatggactgggagcgggagcggctgagtgaccgctggtaccccagtgatgtggacagacacagccccatggccgagcacatgcccagcagccaccacagcagcgagatgatgggcagtgatgccagcctggacagcgaccagggcctgggcggcgtgatggtgctgagccagaggcagcacgagatcatcctgaaggccgcccaggagctgaagatgctgcgggagcagaaggagcagctgcagaagatgaaggactttggcagcgagccccagatggctgaccacctgcccccccaggagagccggctgcagaacaccagcagccggcccggcatgtacccacctcctggcagctacagacctcctccacccatgggcaagcccccaggcagcatcgtgcggcccagcgcccccccagcccggagctctgtgcctgtgaccaggcctcctgtgcccatccccccacctcctcctcctccacccctgcccccacctcctcctgtgatcaagccccagaccagcgctgtggagcaggagcgctgggatgaagattccttctacggcctgtgggacaccaatgatgagcagggcctgaacagcgagttcaagtcagaaacagctgccatccccagcgcccctgtgctgcccccacctcctgtgcacagcagcatccccccacctggccctgtgcccatgggcatgccacccatgagcaagcccccacctgtgcagcagacagtggactatggccacggccgggacatcagcaccaacaaggtggagcagatcccctatggagagcgcatcaccctgcggccagaccccctgcctgagaggagcacctttgaaacagagcacgccggccagagggacagatatgaccgggagcgggaccgggagccctactttgaccggcagagcaatgtgattgctgaccaccgggacttcaagagggaccgggagacccaccgggaccgggaccgggacagaggagtgattgattatgaccgggacagatttgaccgggagcggcggcccagagatgaccgggcccagagctacagagacaagaaggaccacagcagcagccggcggggcggctttgaccggcccagctatgacaggaagagtgacaggcctgtgtatgagggccccagcatgtttggaggagagaggaggacctacccagaggagaggatgcccctgcctgcccccagcctgagccaccagcccccaccagccccccgggtggagaagaagccagagagcaagaatgtggatgacatcctgaagcccccaggccgggagagcaggcctgagcgcatcgtggtgatcatgaggggcctgcccggcagcggcaagacccacgtggccaagctgatccgggacaaggaggtggagtttggaggccctgccccccgggtgctgagcctggatgactacttcatcacagaggtggagaaggaggagaaggaccctgattctgggaagaaggtgaagaagaaggtgatggagtatgaatatgaggccgagatggaggagacctaccgcacctccatgttcaagaccttcaagaagaccctggatgatggcttcttccccttcatcatcctggatgccatcaatgacagagtgcgccactttgaccagttctggagcgctgccaagaccaagggctttgaggtgtacctggccgagatgtctgctgacaaccagacctgtgggaagaggaacatccacggcaggaagctgaaggagatcaacaagatggctgaccactgggagacagcccccaggcacatgatgaggctggacatccgcagcctgctgcaggatgctgccatcgaggaggtggagatggaggactttgatgccaacatcgaggagcagaaggaggagaagaaggatgctgaggaggaggagagcgagctgggctacatccccaagagcaagtgggagatggacaccagcgaggccaagctggacaagctggatggcctgaggacaggcaccaagaggaagagggactgggaggccatcgccagcaggatggaggactacctgcagctgcctgatgattatgacacccgggccagcgagcccccccggcccaggggggccagcctgtgtgtgaccctgctgccccgcttcagcagctgctttgtgtccacagccctggtgttcttcaaggtgctgcagtgcccccaggaggtgctggagagctgctgcacccaggcccggaggtag

SEQ ID NO: 201823 - DNA, 5469 bp, Artificial Sequence
  derived and/or modified sequence
atgtaccccaactggggccggtacggcggcagcagccactaccccccaccaccggttccacctccgccccctgtggcgcttcccgaggcgagtccagggcctggatattcttcaagtactacacctgccgccccatcgtcttccggttttatgagctttagggagcaacacctcgcacagctgcagcagttgcaacagatgcatcaaaaacagatgcagtgtgttcttcagcctcaccaccttccccctccccctcttcctcctcctcccgtcatgccagggggaggctatggcgattggcagcccccgccgccacctatgccaccccctccaggccctgcactcagctaccagaaacagcagcagtacaagcatcagatgctgcaccaccagcgtgacggaccaccaggcctggtccccatggaactcgagagtccccctgaatctcccccagtgccaccaggatcctacatgccaccatcacagagttacatgcctcctcctcagccaccaccgagctactatccaccgactagttcacagccctacctgcctccagctcagccaagccccagccagagtcctccttcccagtcctacctggccccaaccccatcatactctagttcttcatcgtctagccaaagctatcttagtcacagtcagtcctatctgccgtctagccaagcatctccctccaggccctcacagggtcattccaagtcccagctccttgcacctcctccccccagcgcacccccagggaataagaccacagtgcagcaggagccgcttgagagtggtgctaaaaacaaaagcacagaacagcaacaggcagctccagaaccggatccctcaaccatgacaccccaggagcaacagcagtactggtataggcagcacctgctgtctctgcagcagcgcaccaaagtccacctccctggacataagaaggggcccgtcgttgccaaagacacacctgagccagtgaaggaagaagtgacagtaccagccacctcccaggtgccagagagcccctccagcgaggaacctccattgcctccgcccaacgaagaagtgcctccccccctgcctcccgaagaaccccaatctgaggatcctgaggaggacgctaggctgaaacagcttcaggccgccgccgcacattggcagcagcaccaacagcaccgggtggggtttcagtatcagggtataatgcaaaagcacacccaactacagcagatactgcaacagtaccagcagattattcagcccccacctcacatacaggccacgactcccccaccaggcatcccacccccaggtgttcctcagggaatcccccctcagctgactgcagctccagtaccgccagcatcctccagccagtcctcccaggtacccgagaagcctcgtcccgccctgctgcccacaccggttagcttcggttccgcaccacctacaacttatcacccgcctctccagagcgcagggccttcagagcaagtgaattcaaaggcacccctgtctaaatccgcgctcccttattccagcttcagctcagaccagggactgggggagtcctctgcggccccttcccagcctatcacagccgttaaagatatgccagttagatcgggcggactgctgcccgacccccccagaagttcatacctggagtcccctaggggtcctaggttcgatggacctcgccgatttgaagatctgggatcccggtgcgaaggcccgaggccgaaaggtcctcgattcgagggcaacaggcccgatgggcccaggcctaggtacgaggggcatccagccgagggcacgaagagtaagtgggggatgatccctcgcggacctgcatcccagttctatataactccctccacgtctctcagccctcgacagagcggcccacaatggaaaggcccaaaacccgcattcggtcagcagcaccagcagcagccaaaatctcaggccgaacccttgagcggaaataaagaacccctggccgatacttcctctaaccagcagaaaaattttaagatgcagagcgccgcgttctctattgcagcggacgtgaaagacgttaaagcagcacagtcaaatgaaaacctgagcgacagtcagcaggaaccccctaaaagcgaagtgtctgaaggccctgtggaaccatctaattgggatcagaatgtccagtcaatggagacccagattgacaaggcacaggccgtcacccaacccgtcccactcgctaacaagcccgtcccagctcagtctacttttccgagtaaaacaggaggaatggagggagggactgcagtggcaacctcctcgctgacagctgataatgactttaaaccagtggggatcggattgcctcactccgaaaataatcaggataaggggctccccaggcctgacaacagggataatagactggagggcaacagagggaacagttcgagctaccgcgggcctggccagagcaggatggaggacacacgcgacaaaggtctggtcaatcgtggccgcggtcaggccatctcccgggggcccggtctggtgaagcaggaggattttcgggacaaaatgatgggaagacgagaggactcccgcgaaaagatgaacagaggagaaggatcacgggaccggggcctggtgcgcccgggttcttcaagggaaaaagtccccggcggccttcaaggctcacaggacaggggggcagcaggcagccgggaaagggggcctcctagaagagccggaagccaggagagggggcctctgcggagggcaggatcacgtgagaggataccacctaggagggccggctccagagagcggggccccccgcgcggtcctgggagtagagaacgcggtctggggcgcagtgactttggcagagacaggggaccctttcggcctgaacctggcgatggaggtgagaaaatgtatccataccaccgggacgagcctccaagggcaccttggaatcacggcgaagagcggggccatgaggagtttccattggatggcagaaacgcccctatggagcgggagcgactggacgattgggatcgggagagatactggcgcgagtgcgagcgggactatcaggatgacacgctcgaactatataaccgtgaggatcgtttcagtgctccaccaagccgttcacacgacggagaccggagaggcccctggtgggacgactgggaacgggaccaagatatggatgaggactataatcgcgagatggagcgcgacatggatcgcgatgtcgatcggattagccgccccatggacatgtatgacagatcacttgataatgagtgggatagagactatggacggcccctggatgagcaggagagtcagttccgggagcgagacatcccaagtctgccacccctgccaccactgcctcccctccctccactggaccgatatagagacgataggtggcgggaagaacgaaacagggagcatgggtacgacagagactttcgggacagaggcgaattaagaataagagaatatccagaacggggagatacatggcgcgaaaaacgtgattatgtgcctgacagaatggactgggagcgggagcggctctcagacaggtggtatccatctgacgtagatagacacagccctatggcggaacatatgcctagctcccatcactcctcggagatgatgggaagtgacgcttccctcgattctgatcaagggctcgggggcgtgatggttttatcccagaggcagcatgagatcatactcaaggccgcgcaggagctgaagatgttacgagaacagaaagaacagttgcaaaaaatgaaagatttcgggtctgaaccacagatggctgatcatctgccccctcaggaatccagactccagaatacatctagcaggcctggcatgtaccctcctcctgggtcctaccgtccaccaccaccaatggggaagcctcctggcagcatagtgcggccctccgctccaccagcccgcagcagtgtccccgtcacacgacccccagttcccattccgccccccccccccccccctcctctccctcctcccccgcccgtgatcaagcctcagacatccgccgtagagcaggagcgctgggatgaggattctttttatgggctgtgggatactaatgatgagcaagggcttaacagcgagttcaaatctgaaacagcggcaatcccttctgctccagtgctcccccccccccccgtccattctagcataccgccaccaggtcctgtccccatggggatgcctcccatgagcaaacctccacctgtgcagcagaccgtggactacggtcatggccgggacatttcaaccaacaaggtcgagcaaatcccttatggcgagcggatcaccctgaggcccgaccctctccccgaaaggtccacgttcgagaccgagcacgctgggcagagagaccggtatgatcgggaacgcgatcgagaaccttactttgaccggcagagcaacgtcatagccgaccatagagacttcaagagggaccgggagactcatcgggaccgggaccgggaccgcggtgtcatcgattacgacagagacaggtttgatcgcgagcgacgcccccgtgacgatagagctcagtcataccgtgataaaaaagatcatagttccagtcggcgcggaggattcgatcgaccaagttacgaccggaaaagcgacaggccagtttatgagggtcctagtatgtttgggggagaacgacgaacgtatcccgaagaacggatgcccctgcctgccccatcactgtcacaccaacccccacccgccccccgcgttgagaaaaagccagaaagcaagaatgtggacgacatcctgaagccacctggtagagagtcaaggcccgagcgtatcgtggttatcatgcggggactgccggggtccgggaaaactcacgttgccaaactgatccgagtgatggagtacgagtacgaggcagaaatggaggaaacataccggacctccatgtttaaaacatttaagaaaacactggacgatggcttcttcccttttattatcctggacgctattaatgatcgagtgaggcatttcgatcagttctggtctgccgctaagaccaaaggctttgaagtatatttagcagagatgagtgccgacaatcagacttgtggtaaacgaaacatccacggacgcaagctgaaggaaatcaacaaaatggctgatcattgggagaccgctcccagacatatgatgcgcctggacatcagaagcctacttcaggacgctgctatcgaagaggtggagatggaggacttcgacgcaaatattgaggagcaaaaggaggagaagaaggacgccgaagaggaggagagtgagctggtgggggatcggcccaccacacttaattcagtgtcattactgaaattcttaaaaaaggtttag

SEQ ID NO: 201824 - DNA, 6441 bp, Artificial Sequence
  derived and/or modified sequence
atgtaccccaactggggccggtacggcggcagcagccactacccccctccccccgtcccccccccccccccagtggcactgccggaagcatcccccggcccaggctacagctcatcaacaacacccgcagctcctagttcctcaggattcatgtctttcagggaacaacatctcgctcagctgcaacagttgcaacagatgcaccagaagcagatgcagtgcgtgctgcagccacatcacctgccccctccacctctgccccctcctcccgttatgcccggcggcggatacggcgattggcaacctccacctccacccatgccgcccccgcccggccccgccctgtcctaccagaagcaacaacagtacaagcatcagatgctacaccatcagcgagacggcccccctggcctcgtcccaatggagctggaaagcccacctgagagccccccagtgccgccgggctcttacatgccaccctcacaatcctatatgcctccaccacaacctcctcctagctactaccctcctacctcatcccagccgtacctgccacctgcccaaccctcaccgtctcagtcacctccgtcgcagagttacctcgcgccgacgccttcttattcaagtagctcctcaagtagtcagagctatctttcacactcacagtcctacctgcctagctctcaagctagcccttcccggccctctcaggggcatagcaagtctcagttgctggctcccccgcccccctcggcgccaccgggaaacaagacaacagtccaacaggaaccgctcgagtcgggagctaaaaacaaaagcactgagcagcaacaggccgctcctgagccagaccctagcaccatgacaccacaagagcagcagcaatactggtacagacagcacctcttgtccctccaacagcgtactaaggtgcacctgcccggccataaaaagggtccggtggtggcaaaagatacacctgagcctgttaaggaagaggttaccgtgccagctacctctcaagttcctgagagtccttcgtccgaagaaccacccctgcccccacccaacgaggaagtgccccctccattaccaccagaggagccacaatctgaggatcctgaagaagatgcccgactgaagcagttacaagctgctgccgcccattggcaacaacatcagcaacaccgagttggcttccagtaccagggtataatgcaaaagcatacccaattgcagcagatcttgcagcagtaccagcagattatccagcccccaccacacatccagaccatgtcagtggacatgcagctcagacattatgaaatgcagcaacaacagttccaacacttgtatcaagaatgggaaagagaatttcagctatgggaggaacagctccatagctacccgcacaaagatcagctacaggagtacgagaaacagtggaagacgtggcagggccatatgaaggcgactcagtcctacctgcaggagaaggtgaactcttttcagaatatgaagaatcagtacatgggcaatatgagcatgcctccacccttcgtgccctacagccagatgcctcctccactgccaacaatgcctccaccagtcctgccccctagcctcccacctccggtgatgcctccggcactcccggccacagttcccccaccaggcatgcctcctcctgtgatgcccccatctctgcctacgtcagttcctcctcctggaatgcctccttcactgagcagcgcgggcccgccccccgtactgccgccgccctccctaagttccgccggcccgcctcctgtgttaccacctccatcccttagttcgaccgcacctcctcccgtgatgcctctgcctcccctgagcagtgccaccccccctccaggaattccccctcccggagtcccccaaggaattcctccacaactgactgccgcacctgtccctcctgccagtagctctcaaagctctcaagtcccagagaaacctcgccctgctctgctgcccactccagtgtccttcggtagtgctccccctaccacatatcacccaccactgcagagcgccggacctagcgaacaggtgaacagtaaagcccccctgtcaaaaagtgccctgccatactccagctttagctcagaccagggtcttggtgagagcagtgccgcccctagccaacccattactgccgtcaaggatatgccagtgcggtcaggaggattacttccagaccccccccgctccagttacctcgagagccctcgcggaccgaggtttgacgggcctagacgatttgaggacctgggatcaagatgcgaaggcccacggccgaaagggcctagattcgaaggcaaccggccagatggcccacgacctcgctatgaaggccatcccgccgaggggacaaagtcaaaatggggaatgattcctcggggtccggcatcccagttttacatcacaccctccacatccctttccccaagacagagcgggccccagtggaagggcccaaagcccgcatttggacagcaacaccagcagcagcccaagagtcaggcggagccactttccggcaataaagagccactggccgatacatcctcaaatcagcaaaaaaacttcaagatgcagtcagctgctttctccatcgcggcagatgtcaaagatgtcaaggccgcccaatccaatgagaacttgagtgattcccaacaggagcctccaaaaagcgaggtctcagaaggccccgtagaaccttccaactgggatcagaacgtccagagcatggagacccagatcgataaagctcaggcggtcacacagccagtcccgctggctaacaagccagtgccagctcaaagcacctttccatctaagacaggtgggatggaaggcggtactgctgttgccacctcctccctgacagccgacaacgactttaagcctgtgggaattggcctgccccacagcgagaataatcaagacaaggggctcccccgccctgataatcgtgataataggctagaggggaacaggggtaactcttcatcatataggggccccggtcagtcaagaatggaagacacccgggataaaggcttagtcaacagaggtagaggccaggccatctcacgcggacccggccttgtaaaacaggaagatttccgggataaaatgatgggacggcgcgaggactcaagagagaagatgaatcgcggtgagggatctagggataggggattggtgcggcccggctcaagcagggaaaaagtgccgggggggctgcaaggaagccaggaccgtggagccgctggatccagagagcggggaccaccccggcgcgccgggagccaggaacgcgggccactgagacgggcaggcagcagagagcgcatcccccctcgccgggcaggcagccgcgaacgaggtcccccccggggaccgggatccagagaacgaggtctcggcagatccgactttggtagagacaggggcccgtttcggcctgagccaggggacggcggggaaaagatgtatccatatcacagagacgagcctcctagagccccctggaaccacggagaggaacgcggacatgaggagtttccactagacggacgcaacgcaccaatggagagggaaaggttagatgactgggaccgtgaaagatactggagggaatgcgagagagactatcaggacgatactctggagttgtacaaccgcgaggacaggttttcagcgcctccctcacgtagtcacgatggtgaccgccgcggcccttggtgggatgattgggaaagggatcaagacatggacgaagactacaatcgggaaatggaaagagacatggatcgagacgtggatagaatctcccgtccgatggatatgtatgatagatcacttgataatgaatgggatcgcgactatggcagaccacttgatgagcaggagtcacagtttcgtgaaagggatattccgtctttaccccccctaccgccactgcctccccttcctcctctcgatcggtacagggacgataggtggagggaagagcgcaacagagagcacggctacgatagagacttcagggacaggggagagctgcgcattcgagagtatccagaaaggggggatacttggcgggaaaagagagactatgtcccggatcgaatggattgggaacgcgaacgcctgagtgatcgatggtatccctccgatgtggaccgacactcccccatggccgaacacatgcctagttcccaccacagcagcgagatgatgggaagcgatgcctcattagatagcgaccagggcttaggtggtgtgatggttctcagtcagaggcaacacgagataattttaaaggcagctcaagagctgaagatgcttcgcgaacagaaggaacagcttcaaaagatgaaggactttggttccgaaccacagatggcggaccatctgcccccacaggagtctcggctgcaaaacacatccagccggccaggcatgtatccaccgccaggtagctatcggcccccccctccaatgggcaagccacccggaagcattgtgagaccgagcgcccctccagcaagaagctccgtgccagtcactcggccccctgtccctatacctccgccgccaccaccccctccgttacccccaccacctccagttataaaaccacagacctctgccgttgaacaggagcggtgggacgaagatagcttctatggcctctgggatactaatgatgaacaggggctcaactcagaatttaagtccgagacagccgcaatcccatccgctcccgtcctgcctccccctccagtgcactctagtatcccccctcccggacctgtccccatgggcatgccacccatgtccaaacccccccccgtgcaacagactgtagattatggccatggcagagatatttccactaacaaggtggagcagatcccatacggagagaggataaccctccgccctgatcctctccctgagcggtccacctttgagactgagcacgccggccagagggaccgctatgatcgtgaacgcgacagggagccatacttcgaccgacagtctaatgttattgcagaccaccgcgactttaagagggatcgcgagacccatagggaccgagaccgggataggggtgtcatagattacgatcgcgaccgctttgatagagaaagacggcctcgggatgaccgcgcccagagttaccgcgataaaaaggatcattcaagctcacgacggggtggatttgataggccatcatacgataggaagtcagatcgtccggtctatgaggggccatctatgttcgggggtgaaaggcgcacttacccggaagagcgcatgccattgcccgcccctagtctgtctcatcaaccaccacctgctccgcgagtcgagaagaagcctgagtctaagaacgtggatgacatcctgaaacccccaggccgtgaatcgcgtccagagagaattgtcgtgatcatgagaggcctcccagggtcgggaaaaacccacgttgccaaactgatccgcgataaggaagtggaatttggcggacccgcaccccgggtcctgtcactcgatgactatttcattacagaggtggagaaagaggagaaagaccccgattcgggtaagaaagtgaagaagaaggtgatggagtacgaatacgaggcagaaatggaagagacatacaggacaagtatgttcaaaacgtttaagaaaacactggacgatggcttttttccattcattatcctggatgcaataaacgatagggtccgccatttcgatcaattttggtctgccgccaagacaaaagggttcgaagtgtacttagccgaaatgtcggcagataatcagacctgtggaaagaggaatattcacggcagaaaacttaaagagataaacaaaatggcggaccactgggagacagcgccccggcacatgatgcgtttagatattcggagcctgttacaggacgccgctattgaggaggtggagatggaggacttcgatgcaaatatcgaggagcagaaagaggagaaaaaggacgctgaagaggaagagtctgaactgggatacatccccaaaagcaagtgggaaatggatacatcagaggcaaagttagataaattggacgggctcaggacaggcacaaagcggaagcgagactgggaggccattgctagccggatggaggactacctccaactgcctgatgactacgatactcgtgccagcgagccaggcaaaaagagagtgcggtgggcagatctggaagagaaaaaggacgccgacaggaagcgcgcgatcggcttcgtcgtgggccagaccgattgggagaaaatcactgatgagtccgggcatctcgcagagaaagccctgaataggaccaagtacatttag

SEQ ID NO: 201825 - DNA, 5565 bp, Artificial Sequence
  derived and/or modified sequence
atgaccccccaggagcagcagcagtactggtaccggcagcacctgcttagccttcagcagagaacaaaggttcatctacccgggcataagaaggggcccgtcgttgccaaggacacacctgagcctgtgaaagaggaggtcaccgttccggctactagccaggtccccgagtctccctcatccgaggaaccccccctccctccccctaatgaggaagtcccccccccgctgccacccgaggaaccacagagcgaggatcccgaagaagacgcacgccttaaacaattgcaagctgctgccgcccactggcaacagcaccagcagcacagggtagggtttcagtaccagggcatcatgcagaagcatacgcaactgcaacagattctgcaacagtaccagcaaattatccagcctcctccacatattcagactatgagcgtagatatgcaattacgccactacgagatgcagcagcagcagtttcagcatttataccaagagtgggaaagagaatttcagctctgggaggaacagctgcactcctatccgcacaaagatcagttgcaggaatacgaaaagcagtggaagacctggcagggccatatgaaggccactcagtcgtacctgcaggagaaagttaatagtttccagaatatgaagaatcagtatatggggaacatgtctatgccaccaccatttgtgccttacagtcagatgcctccacctctccccaccatgcctccaccagtgctgccaccatcgctgccaccgccagtaatgccgcccgccttgcctgcgaccgtaccgcctcctggtatgccgccgccagtcatgcccccgtccttgcctacaagtgttcctcctcccgggatgcccccctcgctgtcaagtgccggacctccccccgtgttgcctcctcctagtttgagttccgccggacctccccccgtgttgccccctccttctctttcaagcaccgccccccctcctgtcatgcctctgcctccactgtctagcgccactccaccacccggtattccgcctcctggagtacctcaggggatcccaccccagttgaccgcagccccagtgccaccagcatcctcaagccagagcagccaggtgcccgaaaaacctcgccccgctctgctgcccaccccagtgtcctttgggagtgcccctcctaccacatatcaccccccccttcagtctgcgggacccagcgaacaggtgaattccaaggccccactgtcaaagtccgcgctcccctactccagcttttcctctgaccagggcttaggtgaatccagtgcagcaccatcacagcccatcacagcagtgaaggatatgccggtgcgatctggaggactcctccccgaccccccaaggagctcctatcttgagtcccctcgcggccctcgcttcgatgggccccgccgtttcgaggatctaggatcaaggtgcgaaggtccacgtccaaaaggcccacgttttgaaggtaacaggcccgacggacccaggccacggtatgagggccatccggccgagggcaccaagagtaagtgggggatgatccccagaggtcctgcctcgcagttctatatcacgccgtctacatccctgagcccacgacagtctggtccccagtggaagggccccaagcctgcatttggccagcaacatcagcaacagcccaagagccaagccgagcccctgagcggaaataaagagcccctggctgatacatccagtaaccaacagaagaacttcaaaatgcagtctgccgccttttcgatagccgctgacgtgaaagacgtaaaggctgctcagtctaacgaaaacctttctgattctcaacaggagcctccaaaatccgaagtatccgaagggcccgtggaaccctccaattgggatcagaatgtccagtccatggagacccagatcgacaaggcccaagctgtaacccagcctgtgcccctggcgaataaacccgtccctgcgcagtcgacttttcctagcaagaccggcggaatggaggggggaaccgctgtagcaacttcatcactgacagccgacaatgatttcaaaccagtcggaattggcctgccccacagtgaaaacaaccaggacaaagggctaccgagacccgacaatcgtgataatcggttggagggcaatcgtggcaactcatcttcctataggggccccggacaaagtagaatggaagatactcgcgacaaagggctcgtaaacagggggcgcgggcaggccatctcccgggggcctgggctcgtgaagcaggaagacttccgtgataaaatgatggggcggagggaagatagccgtgaaaagatgaatcgaggcgaggggagccgtgatcgggggctggtacgcccgggctccagcagggaaaaggttcctggaggactccaggggtctcaagaccggggagctgcgggcagtagagagcgcggcccacccagaagagctggatcccaggagcggggccccctgcgacgagccggctctcgtgaacgcatccccccaaggagagccggtagcagggagaggggcccaccaagaggccccggatccagagaaagggggctggggcgaagcgacttcggccgagaccgtggcccttttagacctgagcccggcgacgggggggaaaagatgtatccctatcatagagatgagccacccagggctccctggaatcacggcgaggagaggggtcatgaggagtttcctctcgacggcaggaacgcacccatggaacgcgaaaggctggatgattgggacagggaacggtattggcgggagtgcgagagagactaccaagatgacacactggaactctacaatcgcgaggataggttttctgcaccaccctcccggtcacatgacggtgataggcgagggccatggtgggacgactgggagcgcgaccaggatatggatgaggattacaacagggagatggagcgagatatggacagggatgtggaccggatttccaggcctatggatatgtatgaccgctctctggataacgaatgggaccgagattatggccgccctctggacgagcaggaatcccagttccgagagagggatattcccagtttgccccctttgcctccattgcccccccttccaccactggatcgctaccgcgacgaccggtggagagaggagagaaacagggagcatgggtacgatagagactttcgagaccgcggcgagcttaggatcagagagtaccctgaacggggcgatacttggagagaaaagagagattatgttcctgacagaatggactgggagagagagcggctttccgaccgatggtatccatcagatgtcgatcgtcactccccaatggccgagcacatgccctcttcccaccactcttctgaaatgatggggagtgacgccagcctggacagtgaccaggggctggggggcgtgatggtgttgagtcagagacagcacgagatcattttgaaagcagcccaggagctgaagatgctccgcgagcagaaagagcagctgcagaagatgaaggacttcggtagtgaacctcagatggctgatcatctgcccccacaagagtcaaggctgcagaatacatcctcaaggccgggaatgtatcctcccccgggttcttacagaccgcccccccctatgggaaaacccccaggaagcattgtacgcccttctgccccaccggccaggagtagcgtgccagtaacccgtcctccagttccaattccaccaccccccccaccaccgcccctgcccccgccgccaccggtgatcaagcctcagaccagcgcggtagagcaagaaaggtgggacgaagacagtttttacggcctgtgggacacgaacgacgagcaaggcctcaactctgaattcaaaagcgaaaccgccgccattccaagtgcccccgtcctacccccgccacctgtgcactcatctattccaccaccagggccagtccctatgggaatgccccctatgtccaagccccctcccgtgcaacaaaccgtggactatggccacggtagagatatttctacgaacaaagttgagcaaatcccttacggcgagcggataacactgcgccctgacccacttccggagaggagtacgttcgaaacagagcatgctggccagcgggaccgctatgacagggagagagaccgagagccttactttgacagacagtctaatgtcatcgcggaccaccgagacttcaaaagagaccgggagactcatcgagacagggaccgggacaggggcgtgattgactatgaccgggaccggttcgatcgtgagagacgacctagggacgaccgagcccagtcctatagggacaagaaagaccacagttccagccggcgcggtgggtttgacaggccttcctatgatagaaagtccgatcggcccgtatacgaaggaccctcaatgtttggcggggagaggcgtacctaccctgaggagaggatgccgctacccgccccgagcctgagccaccagcctccgccggctccccgagtggagaaaaagcccgaatccaaaaatgtggatgatattctaaaaccacctggacgtgaatcccggcccgaacgtatcgtagtcattatgagaggacttcctggatcaggcaagactcacgtggccaaacttatcagagacaaagaggtcgagttcggtggtcctgcgccccgtgttctgagtctggatgactatttcattacagaagttgaaaaggaggagaaggatccagactccggaaagaaggtgaagaagaaggtaatggaatatgagtatgaggcggagatggaggagacttatcgtacatccatgttcaaaacctttaaaaaaacattggacgacggcttcttcccgttcattattctcgatgccattaatgatcgtgtgaggcatttcgatcaattctggtccgccgcaaagacaaaggggttcgaggtctatctggccgagatgtccgctgataatcagacctgtgggaaacgcaacattcacggcagaaaattgaaggagattaacaaaatggcagatcactgggagacggcccccagacacatgatgcggttagacattagatccctactgcaggacgccgccatagaggaagtggagatggaggatttcgacgctaatatcgaagagcagaaagaagaaaagaaagatgcagaagaagaagaatcagagttaggttatatcccaaagtctaagtgggagatggacacaagtgaggcaaaactggacaaactggacggacttcgcaccggaactaaaagaaaaagggattgggaagcgatcgcctctcgcatggaagattatctgcagcttcctgatgactacgacacccgagcatctgagcccccccggcccagaggagccagcctgtgtgtgacgctgctgccaaggttctcatcctgtttcgttagtacagccctggtctttttcaaagtattgcagtgtcctcaggaagtgctcgagagttgttgtactcaagcaagaagatag

SEQ ID NO: 201826 - DNA, 5469 bp, Artificial Sequence
  derived and/or modified sequence
atgtaccctaactgggggagatacgggggatcatcacattacccacccccaccagtccctcctccacccccagtggcactacctgaggcatctcctgggcctggctacagctcgagtaccacacctgcggctccatctagctccggttttatgtcgttcagggagcagcacttagcacaactgcagcagctccagcaaatgcatcagaagcaaatgcaatgcgtgttacagccccatcatctcccaccgcctcctctgccaccacctccagtgatgcccggaggaggctatggagattggcagccgccaccaccgccaatgccaccccctcccggtcccgcactcagctatcaaaagcaacaacagtataagcaccaaatgctacaccaccagcgcgatggcccaccaggcctagttcctatggagcttgagtcccctcctgaatcgcctcctgtgccacctgggagttacatgcccccatctcaatcctatatgccgccaccccagcctccaccaagttactaccccccaacctcatcccagccttatcttcctcctgcccagccgagtccttcccagtcaccccctagccaaagttacctggcgcctaccccctcatacagctctagttcatctagttcccaatcttacctttcacacagtcagtcgtatctaccaagttctcaagcttcaccttctagaccttcccaggggcatagcaaatcccaactactggctccccctccacccagtgcccctcccggaaataagactacagtccagcaggaaccacttgagtcaggagcaaaaaacaagtctactgaacagcagcaggcggctcccgagcccgatccctctacaatgactcctcaggagcaacagcaatactggtaccggcaacatttgctcagcctgcagcagcggaccaaggtgcatttacctggccacaaaaagggaccggtagtcgccaaagacactccagaaccagtgaaagaggaagtgacggtcccagccaccagtcaagtgccggaatctcctagcagtgaggagccccctctcccaccgcctaacgaggaggtgccgcctccacttccccctgaagagccccagagtgaggatcccgaagaagatgccagactcaagcaattgcaagccgcagccgctcactggcagcagcatcagcagcatcgcgtgggtttccagtaccagggcattatgcagaagcatacccagcttcagcagatcctgcagcagtaccaacaaatcatccaaccacccccacatattcaggcgacgacccctccaccaggtattcctccgccaggtgttccccaaggcattcctccccagctgactgctgctcctgttccacccgcatccagcagccagagttcgcaggtcccagaaaagccccgtccggcactcctgccaaccccagtctcctttggttccgcaccaccaaccacataccacccccctctccaaagcgcaggtccgtctgagcaggtgaacagtaaagcaccacttagtaagagtgcacttccctacagctccttcagttcggatcagggattaggcgaatcttcagctgctccttcacaacctatcacagccgtgaaggacatgcccgtaaggtctgggggacttctgccagatccccctcggtcgtcctatctggagtctccacgtgggccacggtttgatggcccacgaagatttgaagacttgggatcgaggtgcgaaggacctcgtcccaaagggcctagatttgaaggtaatagacctgatggaccccgaccgagatatgagggacacccggcagaaggcacaaaatcgaagtggggaatgataccgcgtggcccagcttctcagttttacatcacaccctcaacaagtctttctccccgacagtcaggccctcaatggaagggaccaaaacctgcctttgggcagcagcaccagcagcaacctaaaagccaggcagaacctttgtccggaaacaaggaacccctggccgacacttcatctaaccagcaaaagaatttcaagatgcagagcgctgctttcagcatcgcggcagatgtcaaagacgtcaaggcagcacagtcaaatgaaaatctctccgacagccagcaggagcctccgaagagcgaagtgtccgagggaccagtcgagccctccaattgggatcagaatgtacagagtatggaaacacagatagataaggctcaagccgtgacccagccagtacccttagccaacaagcccgttcccgcacagagtacattcccctctaaaactggcggtatggaaggaggtactgccgtggcaacctccagtcttacagctgacaatgatttcaaaccagttggaatcggcctcccgcatagtgagaacaaccaagacaaaggcctgcccaggcctgacaacagagacaaccgcctggaggggaacagaggtaactcgagcagctataggggtccgggacagagccgaatggaggacaccagggataagggactggttaaccgaggtcgcggtcaggccatttcccgcggacctgggctggtcaaacaggaggattttagggacaagatgatggggagacgggaggacagcagagagaagatgaatcggggtgagggttctagggaccggggtctggtgagaccagggtcatctcgtgagaaagtccccggtggccttcagggcagccaagatcgcggagcagccggatcccgggagagggggccacccagaagggctggatcacaggagagggggccactccgcagagccggtagcagagaacgtatccctccacggcgtgccggatcccgcgagcgcggaccccctcgcggaccgggatcacgcgagaggggtttgggcagaagtgactttgggagggatagggggccttttaggcccgagcctggtgacggaggggaaaaaatgtatccatatcaccgcgacgaacctccaagggccccttggaatcatggagaggagcggggacacgaagaatttcctctggatggacggaacgcacctatggagcgggagcgacttgacgactgggaccgcgagagatattggagggagtgtgagcgtgattatcaagatgataccctcgaactctataaccgtgaggatcggttcagcgccccaccctctagaagtcacgacggcgataggagggggccatggtgggacgactgggaaagagatcaggacatggacgaagactacaatcgcgaaatggagagggatatggatcgtgacgtggacagaataagccggccaatggacatgtacgatagatctctcgataacgaatgggatagggactacggtaggccccttgacgaacaggagtctcagttccgagagcgagacattcctagcttgccccctctgcctcccttgccccctctccctcctctggaccgatacagggacgatcggtggagggaggaacggaaccgcgaacatggatatgacagggatttcagggatcggggagaactgagaatccgggaataccctgagcggggagacacctggcgcgaaaaaagagattacgtgcctgaccgcatggattgggagcgtgagcgcctttctgatagatggtaccccagtgatgtcgatcggcacagcccaatggccgagcatatgccaagctcacaccatagttcggaaatgatgggcagtgacgctagcttggatagtgatcagggcctgggcggagtgatggttttatctcagcgtcaacatgagataatcctgaaagccgcacaagagcttaagatgctccgggagcaaaaggagcaactgcagaagatgaaggatttcgggagcgagcctcagatggccgatcacctccctccccaggagtccagattgcagaataccagtagtcgcccagggatgtacccccctccaggatcataccgaccaccacccccaatggggaaacctccgggtagcatcgtgcgcccttcggccccacctgccagatcttccgtcccagttaccagaccgccagtgccaatcccaccacccccaccacctccacctctgccaccaccaccgccagtcataaagcctcagacgtccgcagttgagcaggagaggtgggatgaggattcattttacggcctctgggacacgaacgatgagcagggcctcaattctgagtttaaatccgaaaccgctgccataccttcagctccagtgctgcccccaccccctgttcatagttccattcccccaccagggccagtaccaatggggatgcctcctatgtctaagcccccaccagtccaacagaccgtggactatggacacgggagggacatttcaactaataaagttgagcagatcccgtatggggagcgcatcaccttgagacccgacccactgcctgagcgcagcacctttgagacagagcatgcagggcaacgtgatcgatacgaccgggagcgggaccgcgagccgtactttgacagacagtccaacgtcatcgctgatcatagagactttaaaagagacagggaaacccacagagatcgggatagagaccgaggcgtgatcgattacgacagggacagattcgaccgcgaacggagacctagagatgacagagcccagtcctaccgggataagaaggaccacagctccagccgaaggggtggcttcgaccgcccttcctatgaccggaaatccgataggcctgtttacgaaggtccctcgatgttcggcggtgagcggaggacataccctgaggaacggatgcccctccctgccccatccctctctcaccaaccaccaccagctccccgagtcgaaaagaaaccagagtctaaaaatgtggatgacattctgaaacccccaggcagggagtcgcgccctgaaaggatcgttgtcattatgagaggcctgccgggatctggcaaaacccacgtcgctaaactgataagagtgatggagtacgaatacgaggctgaaatggaggagacctacagaacaagcatgttcaagacgttcaagaagacactggacgacggcttctttccttttataatcctcgatgctattaacgaccgggtccgtcactttgaccagttttggtcagccgctaagacaaagggcttcgaggtgtatctcgctgagatgagtgctgacaatcagacctgtggcaagcgcaatatccacgggagaaagcttaaagaaatcaataagatggccgatcactgggaaaccgcacctaggcatatgatgagactcgacatccggagccttttacaggacgcagctattgaggaagtagagatggaggattttgatgctaatatagaggagcagaaagaagaaaaaaaggacgctgaggaagaagagtcggagttagttggagatcggccaacaacactgaatagcgtgtccctactgaagtttctaaaaaaagtatac

SEQ ID NO: 201827 - DNA, 6440 bp, Artificial Sequence
  derived and/or modified sequence
atgtacccaaattggggtcggtacgggggatcctcccattatccacctccgcctgtcccaccacccccacctgtggcactgccagaggcatcacctgggcctggctactctagttcgaccactcctgccgcacctagctcttctggattcatgtcctttagagaacaacatttggctcagctgcaacaattgcaacagatgcaccagaaacagatgcagtgtgtcttacagcctcaccaccttccgcctcctccccttccgccaccaccggtcatgcctgggggaggttacggggactggcagcctccaccgccacctatgcccccacctccaggccctgccctaagctaccaaaagcagcaacagtacaagcatcaaatgctgcaccaccagcgagacgggccacctggccttgttcccatggagctcgagtctccacctgaaagtccacctgtgccacctggatcctatatgccgccatcccagtcttatatgccaccgcctcagcccccaccttcttattatccccctacctcctctcagccttatctgcctccagcgcaaccctccccttcccagagcccgccaagccaatcttacctagctcctacacctagctactcttcttcatcctcatctagccagtcatacctgtcacactctcaatcttatctgccttcatcgcaggcatctcctagcaggccctcccagggtcatagcaagtctcagctgcttgcgccacctcccccatccgcacctcctggcaataagaccactgtccagcaggagcctttggaatctggagccaagaataagtctacggaacagcaacaggccgcaccagagccagacccctccacaatgacaccgcaagaacagcagcaatactggtatagacagcacttgctgtctctgcagcagaggacaaaggtccacctgccaggccacaagaaaggcccagtcgtggccaaggatacacccgaaccagtgaaggaggaggttacagtgccagcaacgtcacaagtgccagagagcccatctagtgaagagccgccactgccgcctcccaatgaggaggttccaccccctctcccacccgaggaaccacagtccgaagatcctgaagaggatgctcgccttaagcagcttcaggcagccgctgcacattggcagcagcaccagcagcaccgagtcggcttccagtaccagggcattatgcagaagcacacgcagctgcagcagatccttcagcagtatcagcagatcatccaaccacccccacacatccagacgatgtctgtcgatatgcaactgcggcactacgaaatgcagcagcaacagttccagcacctttatcaggaatgggagagggagtttcagctgtgggaggagcagctacactcctatccacacaaggaccaactgcaggagtacgagaagcaatggaaaacttggcagggtcacatgaaggctacccagagctacctccaggaaaaggtgaattcgttccagaatatgaaaaaccagtacatgggaaatatgagcatgcctccccctttcgtcccatattctcaaatgcctccacctctccctacaatgccccctcctgtcctccccccaagcctgcccccaccagtcatgccacccgctctccccgctacggtgcccccaccagggatgcccccacccgtcatgccccctagtctcccaacgagtgtaccccctccaggcatgccaccctcactgtcgagcgccggtccacctcctgtactcccaccccctagcctgagcagcgcgggtcctccacctgtactgccccctccttcactatcctctactgcaccaccccctgtcatgcctctgcctcctctatcctcagccacaccgccacctggcattcctccccctggagtgccacaaggtatacctccgcagcttacagccgctcctgtgccgccagcctcaagcagccagtcaagccaggtcccagaaaagccaagaccagctctcctccctaccccagttagctttggttctgccccaccaaccacataccaccctcctcttcaatctgcaggcccatctgaacaggtaaactcgaaggcccctctgtccaaatctgctctcccttactcctccttttcttccgaccagggactcggggagagttctgcagcaccatcgcagcccatcaccgcggttaaagatatgcccgttcggtccggtggcttactgcctgatccaccacggtcttcttacctggagtcacctcggggtccacgattcgatggccctcgcagattcgaggatctggggtccaggtgtgagggccctcgcccaaagggaccgcgtttcgaggggaaccggccagacggccctagacccaggtacgaggggcaccctgctgaagggacaaagagtaaatggggaatgattccgcgagggccagcatcccaattttatattaccccctccacttccctgagccccagacagtctgggccacaatggaaggggcctaagccagcctttgggcagcaacaccaacagcagccgaagagccaggccgaaccactctctgggaacaaagaacctctagctgatacgtctagtaaccagcaaaagaattttaaaatgcagtccgccgcattctctatcgccgcagacgtgaaagatgtaaaagccgcacagagtaatgagaacctatctgacagccagcaggaaccccctaagtccgaagtgtccgaaggacccgtcgaaccgagcaattgggatcagaatgtgcagtctatggaaacccaaatcgacaaagcacaggcagtgacccaacctgtccccctcgctaacaaaccagtgcccgctcaatcaacattcccatccaagactggaggaatggaaggcggaaccgcagtcgccacctcaagcctgacagccgacaatgacttcaagcccgtgggaatcggcttacctcactccgaaaataatcaggacaagggcctgccacggccagataatcgcgataaccgtctggagggcaacagaggaaattccagttcttatcggggtcctgggcagtctagaatggaggacacacgagacaagggcctcgtgaatagaggcagaggacaggccatcagtaggggccctggcctcgtaaaacaggaagactttcgggacaagatgatggggcgacgcgaggatagcagggaaaaaatgaacaggggtgagggaagcagagacaggggcctcgttcgtcccggaagctccagggagaaggtgcctggcggactgcagggctctcaggatcgaggagccgctggcagccgcgaacgcggacctccgaggagggccggaagccaagagcggggtcctctgcgaagggccggatcccgcgagcggattcctccaaggcgagcaggttcaagggaaaggggacccccacggggaccgggatcccgtgagaggggactcggccgttcagatttcggtagagatagaggccctttcagaccagagcctggggacggcggtgaaaagatgtacccctatcacagagatgaacccccacgcgcaccctggaaccacggtgaggaacgcggacacgaggaatttccgctggatggaagaaatgcccctatggaacgggaacgcttggacgactgggatagggaacggtattggcgcgagtgtgagagggactatcaggatgacactctggagctctataatagggaggaccgattttccgctccccctagcagatcacatgacggtgacaggaggggaccatggtgggatgactgggagagagatcaggacatggatgaggactacaatcgcgaaatggaaagagacatggatagggacgtcgataggatcagtcgcccaatggacatgtacgatagatcactggataacgaatgggatcgcgactatggtaggcctctggacgaacaagaatcgcagttccgggaaagagacatcccaagcctccctccgctaccacccttaccccctctgcccccactggataggtaccgggatgataggtggcgagaggaaaggaatcgtgaacacggatacgatagggattttagggatagaggcgaactccggattcgcgagtacccagaacggggagacacttggcgcgagaagagggactacgttcccgaccgcatggactgggagagagaacgtctgtctgatcgttggtacccaagtgacgtcgacaggcacagccctatggccgaacatatgccttcaagtcaccattcctccgaaatgatgggctcagacgcatccttggatagtgatcaaggcttgggcggagtgatggtcctgtctcagcgacaacacgagatcatcttaaaggcagctcaagaacttaaaatgctgcgcgaacaaaaggagcaattgcaaaagatgaaagattttggaagcgaaccgcagatggctgaccacctccccccacaggaatcacgcctccaaaatacttcctcccgccctgggatgtacccccctccaggatcctacaggcccccacctcctatgggcaaaccacccggatccatcgtgcgtccgtcagcaccaccagccaggtccagcgtccccgttactagaccaccagtgcctattccccctccaccgccaccaccacccctgcctccccctcctccggtgattaagccgcagacttctgcggtcgagcaggagcgatgggacgaggattctttttatggcctctgggataccaatgatgagcagggactgaattctgaattcaagagcgaaaccgctgccatacccagcgcacctgtgttgccacctccacctgtgcacagcagtatcccaccccctggtcccgtgccaatggggatgcccccaatgagtaagccgccacccgtgcagcagaccgtcgattatggacacggccgagatatcagcacaaacaaggtggaacagattccttacggagaacgtatcaccctaaggccagatccacttccagagcgtagtacctttgaaacagagcacgctggccagcgggaccggtatgatcgggagcgggatcgtgaaccatacttcgatcggcagagcaacgtaatcgccgaccatagggattttaaacgcgaccgcgaaacccaccgcgatcgtgatcgagacaggggcgtgattgattacgaccgggacagattcgatcgcgaacggcgaccacgagatgatagagctcagtcataccgggataaaaaagaccacagtagcagccggcgagggggattcgatcgtcccagctatgatcggaagtctgaccggcctgtgtatgagggtccctctatgtttggaggggagaggcgcacctaccccgaagagcgaatgccactgccagcaccttctctgtcgcaccaaccaccccctgctccaagggtcgagaaaaagcctgaaagcaaaaatgtggatgatatacttaaaccacctgggagggagagcaggccagaaaggattgtcgtgattatgaggggcttgcccggatcaggcaaaactcacgtggccaagctgatccgcgataaggaggtggagtttggaggcccagccccacgcgtcttatcactggacgactatttcattactgaggtggaaaaagaagaaaaggatccagactccggcaaaaaggtgaagaagaaggtaatggagtatgagtatgaggctgagatggaggagacctatcggacctccatgttcaagactttcaaaaaaacgctggatgacggtttcttcccatttataattctggacgccattaacgatagggtgaggcatttcgaccagttttggtcagccgctaaaactaaaggctttgaagtatatctggccgagatgagtgcagacaatcagacctgcgggaagcgcaatattcatgggagaaagctgaaagagattaataagatggccgaccactgggagactgcaccaagacatatgatgaggttggacatccggtcactgcttcaggatgctgcaattgaggaggtggaaatggaagacttcgatgctaatattgaggaacagaaagaggagaaaaaagacgcagaggaagaggaaagtgagctcggctacattccaaagagtaagtgggagatggacacgagcgaagctaaacttgacaagttggatggcctccggactggcactaaacggaagagagactgggaagccattgcctctcggatggaggactatctgcagcttccagacgattacgacaccagggcctcagagcctggtaaaaaaagggtacgctgggcagacctagaggagaagaaggacgcagacaggaaaagggcaatcggctttgtggtggggcaaacagactgggaaaaaattactgatgagagcggccatctggccgagaaggcactaaatcgtaccaaatacatcta

SEQ ID NO: 201828 - DNA, 5564 bp, Artificial Sequence
  derived and/or modified sequence
atgactccccaggaacaacagcagtattggtataggcaacacctcctgtccttgcagcaaaggactaaagtgcacctccccggacacaagaagggaccagtcgtggcgaaggacacgccagaaccagtgaaagaggaagtgacagtgccagccacttctcaggtgcctgaatctccctcttccgaggagccccctctgccacctcccaacgaggaagtccctccaccattaccgccagaggagccccagtccgaagacccagaggaagatgcgagattgaaacagcttcaagccgctgccgcacactggcaacagcaccagcaacatcgagttggctttcagtaccagggcatcatgcagaagcacacgcaactgcagcagattcttcaacagtaccaacagataattcaacctcccccacatattcaaacaatgagtgtggacatgcagctgcgccattacgaaatgcagcagcagcagttccaacatctgtatcaggagtgggaaagagagtttcagctctgggaggagcaactgcactcttatccacacaaggatcagttacaggagtacgagaagcagtggaagacgtggcagggacacatgaaggccacacagtcctacctgcaggagaaagtgaatagctttcaaaacatgaaaaatcaatatatgggcaacatgagtatgccaccccctttcgtgccgtacagccagatgccacctccgctccctacaatgccccctccagtcctgccgccttccttgcccccaccagtcatgccacccgctctgcccgctacagttcctccacctggaatgcctcccccagtcatgccccctagcctgcccacttcagtacctccgcctgggatgcccccatcactctccagtgccggtccaccccctgttctgccccctccctccctctcatcggctggaccgccacctgtcctgccaccacctagcttatctagcacagcccctcctcccgtaatgcccctccctccactgtcgagcgccacacccccacctggaataccgccacccggtgtgcctcagggcattccacctcagctgacagctgccccagtcccacctgctagctcatcccaaagctctcaggtgcctgagaaacctcggccagctctccttcctacccctgtctcatttggctccgcaccaccgaccacttatcacccaccgctacaatctgcaggtccttcagagcaagtcaatagcaaagccccactgagtaaaagtgcgttaccttactcgtctttctcttctgaccagggactgggagaatcatcagcagcgccttcccagcctatcaccgcagtgaaggatatgcccgttcgaagcggaggcctgctgcctgatccaccacgaagctcctacttggagagcccacgcggtcccagattcgatgggcctcggagatttgaggatttgggcagtcggtgtgaaggaccccgtccgaaaggcccaagatttgaggggaaccggccagacgggccacgcccacgttacgaaggccatccggcagaaggaacaaaaagcaagtgggggatgataccccgagggcctgcatctcagttctacattacaccatctacctcgctttcccccaggcaatcgggacctcagtggaagggacctaagccggcattcggccagcagcatcagcagcagccaaagagccaggccgagcccttgagcgggaataaggaaccgctcgctgacacgtctagtaaccagcagaaaaattttaaaatgcaatccgccgctttttcaatagcggcagatgtaaaagacgtaaaggcagcgcagtcaaatgagaacctttcagacagtcaacaagagccacctaagagcgaagtctccgagggccctgtagaacccagtaattgggaccagaacgtacagtcgatggaaacccagattgataaggctcaagcagtgacacagcccgtgccactggccaataagccagttcccgcacagagcaccttcccaagtaagactggaggcatggaaggtggcacggcggtagcaacgagttctctcaccgctgataacgatttcaaaccagtcgggataggactgccacattccgagaataatcaagacaaggggctgcctaggcctgataatcgggataataggctggaaggaaacaggggcaatagctccagttaccgtgggccaggacaatcgcgaatggaggacactcgggacaaaggcctggtgaaccggggtcgcggacaggcaatcagcaggggacctgggctcgtgaagcaggaggacttccgagacaaaatgatggggagaagggaggattcacgggagaaaatgaatcggggtgaaggctcacgagatcggggactggtccgaccagggagttccagagaaaaggtaccagggggtctacaagggtcacaggacaggggggcagctggatccagggaaagaggtcctccacgcagagctgggtcacaagaaagaggacccctgcggagggccggaagccgggaaaggatccccccacgtagggccggaagtcgggaacgaggcccacctagaggacccggatcacgagaaaggggtctgggccgttctgactttggcagggatagaggcccattcaggcctgagccaggtgacgggggtgagaagatgtacccctatcaccgcgatgagccaccaagagcaccttggaaccatggagaagagcgcggtcatgaggagttccccctggatggtcgaaatgctccgatggaaagggagcgtctggatgactgggatcgggagcgttattggagggaatgcgagagggattaccaggacgataccttggagctgtataaccgcgaagaccgcttcagcgccccaccgagccgctctcatgacggggatcgaagagggccatggtgggacgactgggagcgcgatcaggatatggacgaagattacaacagggagatggagcgcgatatggatcgggacgtggatcgcatcagtcgaccaatggacatgtacgatagaagcctagataatgagtgggaccgtgactatggtagaccactggatgagcaggagtcccaattcagggagagagatatcccttctctccctcctctgccaccactgcccccattgcctcccctcgacagatatagagatgatcgatggcgggaggagagaaatcgcgaacatggatacgacagggactttcgagaccggggtgaactccggatcagagagtaccctgagcgcggtgacacctggcgagagaagcgggactacgttccggaccggatggactgggagagagaaagactaagtgatcgctggtatcctagcgacgtggatcgacattctccaatggccgagcatatgccatcaagtcaccatagctcggaaatgatgggctctgatgcatctctcgatagcgaccagggactgggcggagtgatggtcctctcccagagacagcacgagatcatcctgaaggctgcacaggagctcaagatgctgcgcgaacagaaggagcagctgcagaagatgaaagacttcgggtcggagccccagatggccgatcatctgccacctcaggagtctcgcctgcagaacacgagctcaaggcccggtatgtatcctccccctggcagctacaggcctcccccaccgatggggaagccaccgggaagcatcgtacgccctagtgccccaccagcgcgatcctccgtccctgtgacgcgaccaccagtgcctatccctccccctcccccaccaccccctttgccacctccaccccctgttatcaagccccagacatctgccgtggaacaggagaggtgggatgaggactcattttatggcctctgggataccaacgacgaacagggcctgaattccgaatttaagtccgagaccgccgctataccaagcgcaccggtcttacctcctccgccagtgcactcaagcataccccctcctgggccagtgccgatgggcatgccccctatgtcgaagcctccacctgtacaacagactgtcgattacggacacggtagagacattagcaccaataaggtagagcagatcccatacggcgagagaatcacactcagaccagacccattaccggagagatcaaccttcgaaacggagcacgcaggccaacgggacaggtatgatagagaacgtgatagagagccctactttgatcgtcagagcaatgtgattgctgatcaccgagactttaagcgcgatcgggagactcaccgtgaccgggatcgcgacagaggcgtgatcgattacgaccgggatcgatttgatagggaacgtaggcccagagatgatcgcgctcagagctaccgcgataaaaaagaccacagttcctctcgaagggggggattcgaccggccaagctatgaccgaaagtcagaccggcctgtttatgagggacccagtatgtttggcggagagcgaaggacttatcctgaggaacgaatgcccctccccgcaccatccctgtcacaccagcccccaccagcaccaagggtggagaaaaagcccgagagcaaaaacgttgatgatattcttaagcccccaggacgagagtcacgaccggagaggatcgttgtgatcatgcgcggtctgcctgggtccggcaaaacccacgtcgcgaaactaatccgcgacaaggaggttgaattcggtgggccagcaccaagagttttgagcttggatgactattttatcaccgaagtggagaaggaggagaaggatccagactcaggcaaaaaagtgaagaaaaaggtcatggaatacgagtatgaggcagagatggaggagacctaccggacctctatgttcaaaaccttcaagaagacacttgacgacggcttcttccctttcattatactcgatgctataaacgatcgggtacgacactttgatcagttctggagcgccgcaaaaactaaggggttcgaggtttaccttgctgaaatgtcagccgacaaccaaacttgtggtaaacgcaatatccacggacgaaagttaaaagagataaataaaatggccgaccactgggaaaccgccccacgccacatgatgaggcttgacatccgctctcttctgcaagacgcagcaatcgaggaggtggagatggaggactttgatgctaatatagaagagcagaaagaggagaaaaaggatgccgaggaggaagaatccgagctgggatatatcccgaagtcaaagtgggaaatggacacatctgaggccaaattagacaaactggatggtctacgcaccggtacaaaacgcaagcgggattgggaagccatcgcgtcccgaatggaagactatcttcagctcccagacgactatgacacacgggctagcgaaccccctcgcccacgcggagccagcctatgcgtcaccctgctccctcgcttttcaagctgttttgttagtactgcacttgtttttttcaaggtgctgcagtgtccccaagaggtgttggagagctgctgtactcaggccagacgcta

SEQ ID NO: 201829 - DNA, 5593 bp, Artificial Sequence
  derived and/or modified sequence
gtttacacgctccggggcctgtaggcgccgcgagttccggctgtcgccgtcgccgccgcggctcctggaggtcggttgcgacgagtaacggcgccaggacgagccctgcgccttctttttcgatatgtacccgaattggggccggtatggcgggagcagccactatccgccgccaccggtcccaccgccgccgccagtggcgcttcctgaggcctcgccggggcccgggtactcgagctcgacgactcccgcggccccctcctcctcgggcttcatgagcttccgcgaacagcacttggcgcagctccagcagctgcagcagatgcaccagaagcaaatgcagtgcgtgcttcagccccaccaccttcctccgccccctctgccgcccccgccagtgatgccggggggcggctacggagactggcagccgccaccgccaccgatgcccccgccacccgggccggccctcagctatcagaagcagcagcagtacaaacaccagatgctccaccaccaacgagacgggcctcctggtttggttccaatggagctggaatccccccctgaatctccccctgtgccgcctgggtcctatatgcccccatctcagtcttacatgcccccacctcagccgccaccctcttactaccccccgacctcatctcagccctacctgcctcctgctcagccgtccccttcgcagtccccaccttcccaatcctacctggcgcccaccccttcttactcatcctcctcctcttcctcgcaatcctatttgagccattcccagtcctacttgccctcttctcaggcatctccttcccgcccctcccagggccattctaaatcccaactactagctccaccaccaccgtccgccccccctggaaataagacaactgtccagcaagagcctttggagagtggggccaaaaacaagagtactgaacagcagcaagccgcccctgagccagatccctctacgatgactccacaggaacagcagcagtattggtatcgacagcacttgcttagtttgcaacagaggacaaaagttcatttgccaggacacaaaaagggtcctgtggtagcaaaggatacaccagagccggtaaaagaagaagttacagtacctgccaccagtcaagttccagaatctccttcttctgaggagcccccattgccacctccaaatgaggaagtgccacctcctctcccacctgaggaaccccagtctgaggacccagaagaagatgccaggttaaagcagttgcaggctgcagcagcacactggcagcagcaccagcagcatcgagtcggtttccagtatcagggaataatgcagaagcacactcagttacagcagattctacaacagtatcagcagattatacagcccccaccacatatacaggcaactacacctcctccaggaatacctccccctggagttccacaagggatacctcctcagttaacagcagccccagttccaccagcctccagttcacagagctcgcaagttccagagaaacctagaccagcactgcttcctactcctgtgtcttttggttctgccccaccgacaacttaccatcctccgttgcaatcagctggtccatcagaacaagtgaattcaaaagctcctttgagcaagtctgctctgccatacagttcattctcatctgatcaaggacttggggagtcttcagctgctccatctcagccaatcactgcagtgaaggacatgccagtgagatcaggtggcctgcttccagatcctcctagaagtagttacttggaaagtccaagaggcccaagatttgatggtcctcgaagatttgaggatttagggtcaaggtgtgaaggaccgagacccaaagggcctcgttttgaaggaaatcgccccgatgggccaagacccagatatgaaggtcacccagcagagggcactaaaagcaagtggggaatgattccccgggggccagcatctcaattttatattacccccagtacatccctaagtcctcgacagagtggaccacagtggaaaggccccaaaccagcttttggacagcagcatcagcagcaacctaagtcacaagcagaacctctttcaggaaacaaagaaccattagcagacaccagtagtaaccagcagaagaattttaaaatgcaatcagctgcattttccattgctgcagatgtaaaggatgtcaaggcggctcagtcaaatgagaatctaagcgactctcaacaagagccacctaaaagtgaagtctcggaagggcccgtagagccctctaattgggaccagaatgttcaaagtatggagactcaaatcgacaaagcccaagctgttactcagcctgtaccccttgcgaataagcctgtacctgctcaatctacttttccttcaaaaacaggggggatggagggaggaacagcagtagcaacatcatcattaacagcagataatgattttaaacctgtgggtattggtctaccccattcagaaaacaaccaagataaaggcctgcctcggccagataatagagataatagattagaaggcaatagaggcaacagctcatcttacagaggtcctgggcaaagcagaatggaagacacacgggataaaggtctagtaaacagaggtcgcggccaggcaatcagtcgaggcccaggattggtcaagcaagaagactttcgggataagatgatgggtagaagagaagatagtcgagagaagatgaacagaggagaaggtagccgggacagagggttggtgaggcctggaagcagtcgggagaaagtgccaggtggtcttcaagggagccaggacaggggtgcagctggcagccgagaaaggggaccacctcggagggctggcagtcaggagaggggacctcttcgaagggctgggagtagagagagaataccaccccgaagagctgggagcagggagagaggaccacctcgagggcctggcagtcgagaaaggggactgggaagatcagattttggtcgtgatagaggtccattcagaccagaaccaggagatggtggggaaaaaatgtatccatatcaccgggatgagcctcctagggctccatggaaccatggagaagagcgagggcatgaagagtttccattagatggtagaaatgctccaatggaacgagaaagactcgatgactgggatagagagagatactggagagaatgtgaacgtgactatcaagatgatacactagagctctataacagagaggacaggttctcagcaccaccatctcggtctcatgatggagataggcgaggcccttggtgggatgattgggagagagaccaggatatggatgaggactacaatagggaaatggaaagggacatggacagggatgtggatcggatttcaagacctatggatatgtatgatagaagtttggataatgagtgggacagagattatgggagaccactggatgaacaagaatcacagtttcgtgaacgggatattccatctcttccacctttaccgcccctcccacctcttccacctttggatagatatcgggatgatagatggagagaagaaagaaatcgagagcatgggtatgatcgagatttccgtgataggggtgagttgaggattcgagagtatccagaaagaggagatacatggcgggaaaagcgagattatgttcctgacagaatggactgggaaagagaacggttgtcagacagatggtacccatctgatgtggatagacattcccccatggcggaacatatgccctcctcacatcattcctcagaaatgatggggtccgatgcaagcttagactctgaccaaggccttggaggggtaatggttctcagtcagaggcagcatgaaatcattttgaaagctgcacaagaactgaaaatgcttcgggaacagaaagaacagcttcaaaagatgaaagacttcgggtctgagccacagatggctgaccatctaccacctcaggaatcaagattgcagaatacatcttcaagacctggaatgtatccgcctccagggtcgtatagacctccccctcctatgggcaaaccaccaggttcaattgtaagaccctctgctccaccagcaagatcatctgttcctgtgaccaggccacctgtcccaataccaccacctccacctcctccacctctacctcctcctcctccagtgataaagccacaaacttcagctgtagaacaggaacgatgggatgaagattctttctatgggctctgggatacaaatgatgaacaaggactgaattcagaatttaagtcagaaactgcagcaattccatctgctccagtattaccacccccacctgttcactcttccattccccctcctggcccagtgcctatgggtatgccaccaatgtccaagccaccaccagtacaacagactgttgattatggccatggccgagatatatccactaataaagttgaacagataccttatggagaaagaataactctacgcccagatccactacctgaaagatcaacttttgagacagagcatgcaggccaacgtgatcgttatgatagagaaagagatcgtgagccttattttgatcgtcaaagtaatgtcatagcagatcatcgagattttaaaagggatcgtgagacacatagagatcgagaccgggatcgtggtgttattgactatgaccgggatcgatttgacagagaacgccgaccccgagatgatagagctcagtcatatcgagacaaaaaagaccattcctcatccagaagagggggttttgataggccatcctatgaccggaagtctgaccgaccagtctatgaaggaccatccatgtttggaggagaacgaaggacttatcctgaggagcgaatgcctctgccagctccttcactgagccaccagcctcctccagctccacgagtcgagaagaagcctgaatcaaagaatgtggacgatattttgaaaccaccgggccgggagagcagacctgagagaattgttgttataatgagaggattacctggcagtggaaagacacatgttgcaaaacttattcgagtaatggaatatgaatatgaagctgagatggaggagacttaccgcaccagcatgttcaaaactttcaaaaagactctggatgatggcttttttcccttcatcatcctggatgccatcaatgacagagttaggcattttgaccagttttggagtgcagcaaaaaccaagggatttgaggtatatttggctgaaatgagtgcagataaccagacttgtggcaagagaaatattcatggaagaaagcttaaagaaataaataagatggctgatcactgggaaactgcacctcgtcacatgatgcgtctagatattcgttctttgctgcaagatgctgctattgaagaggtagagatggaagattttgatgcaaatatcgaagaacagaaagaagaaaagaaagatgcagaggaagaggaaagcgaactggtaggagacagaccaaccactttgaacagtgtctctttattaaaattcttaaagaaggtttaa

SEQ ID NO: 201830 - DNA, 7017 bp, Artificial Sequence
  derived and/or modified sequence
gtttacacgctccggggcctgtaggcgccgcgagttccggctgtcgccgtcgccgccgcggctcctggaggtcggttgcgacgagtaacggcgccaggacgagccctgcgccttctttttcgatatgtacccgaattggggccggtatggcgggagcagccactatccgccgccaccggtcccaccgccgccgccagtggcgcttcctgaggcctcgccggggcccgggtactcgagctcgacgactcccgcggccccctcctcctcgggcttcatgagcttccgcgaacagcacttggcgcagctccagcagctgcagcagatgcaccagaagcaaatgcagtgcgtgcttcagccccaccaccttcctccgccccctctgccgcccccgccagtgatgccggggggcggctacggagactggcagccgccaccgccaccgatgcccccgccacccgggccggccctcagctatcagaagcagcagcagtacaaacaccagatgctccaccaccaacgagacgggcctcctggtttggttccaatggagctggaatccccccctgaatctccccctgtgccgcctgggtcctatatgcccccatctcagtcttacatgcccccacctcagccgccaccctcttactaccccccgacctcatctcagccctacctgcctcctgctcagccgtccccttcgcagtccccaccttcccaatcctacctggcgcccaccccttcttactcatcctcctcctcttcctcgcaatcctatttgagccattcccagtcctacttgccctcttctcaggcatctccttcccgcccctcccagggccattctaaatcccaactactagctccaccaccaccgtccgccccccctggaaataagacaactgtccagcaagagcctttggagagtggggccaaaaacaagagtactgaacagcagcaagccgcccctgagccagatccctctacgatgactccacaggaacagcagcagtattggtatcgacagcacttgcttagtttgcaacagaggacaaaagttcatttgccaggacacaaaaagggtcctgtggtagcaaaggatacaccagagccggtaaaagaagaagttacagtacctgccaccagtcaagttccagaatctccttcttctgaggagcccccattgccacctccaaatgaggaagtgccacctcctctcccacctgaggaaccccagtctgaggacccagaagaagatgccaggttaaagcagttgcaggctgcagcagcacactggcagcagcaccagcagcatcgagtcggtttccagtatcagggaataatgcagaagcacactcagttacagcagattctacaacagtatcagcagattatacagcccccaccacatatacagaccatgtctgtagatatgcagctgcggcattatgagatgcagcagcaacagtttcaacatctttaccaagaatgggagcgagagtttcagctatgggaggaacaactccattcctatcctcataaagatcagcttcaggagtatgagaagcagtggaaaacatggcagggacatatgaaagccactcagagctatctccaggagaaagtcaattcatttcagaacatgaagaaccagtatatggggaacatgtcaatgccacctccttttgttccatattctcagatgcctccacctctacctacaatgccccctccagtgttgcctccttcattgccaccaccagtgatgccccctgccctccctgctacagtgccaccacctggcatgcccccacctgttatgccaccttctctaccaacctctgttcccccaccagggatgcctccttctctctcttctgcagggccaccaccagttctccccccaccttccctgtcttctgcagggccaccaccagttcttcccccaccatctctctcttcaacagcacctccacctgtcatgcccctcccaccattgtcttcagctacacctcctccaggaatacctccccctggagttccacaagggatacctcctcagttaacagcagccccagttccaccagcctccagttcacagagctcgcaagttccagagaaacctagaccagcactgcttcctactcctgtgtcttttggttctgccccaccgacaacttaccatcctccgttgcaatcagctggtccatcagaacaagtgaattcaaaagctcctttgagcaagtctgctctgccatacagttcattctcatctgatcaaggacttggggagtcttcagctgctccatctcagccaatcactgcagtgaaggacatgccagtgagatcaggtggcctgcttccagatcctcctagaagtagttacttggaaagtccaagaggcccaagatttgatggtcctcgaagatttgaggatttagggtcaaggtgtgaaggaccgagacccaaagggcctcgttttgaaggaaatcgccccgatgggccaagacccagatatgaaggtcacccagcagagggcactaaaagcaagtggggaatgattccccgggggccagcatctcaattttatattacccccagtacatccctaagtcctcgacagagtggaccacagtggaaaggccccaaaccagcttttggacagcagcatcagcagcaacctaagtcacaagcagaacctctttcaggaaacaaagaaccattagcagacaccagtagtaaccagcagaagaattttaaaatgcaatcagctgcattttccattgctgcagatgtaaaggatgtcaaggcggctcagtcaaatgagaatctaagcgactctcaacaagagccacctaaaagtgaagtctcggaagggcccgtagagccctctaattgggaccagaatgttcaaagtatggagactcaaatcgacaaagcccaagctgttactcagcctgtaccccttgcgaataagcctgtacctgctcaatctacttttccttcaaaaacaggggggatggagggaggaacagcagtagcaacatcatcattaacagcagataatgattttaaacctgtgggtattggtctaccccattcagaaaacaaccaagataaaggcctgcctcggccagataatagagataatagattagaaggcaatagaggcaacagctcatcttacagaggtcctgggcaaagcagaatggaagacacacgggataaaggtctagtaaacagaggtcgcggccaggcaatcagtcgaggcccaggattggtcaagcaagaagactttcgggataagatgatgggtagaagagaagatagtcgagagaagatgaacagaggagaaggtagccgggacagagggttggtgaggcctggaagcagtcgggagaaagtgccaggtggtcttcaagggagccaggacaggggtgcagctggcagccgagaaaggggaccacctcggagggctggcagtcaggagaggggacctcttcgaagggctgggagtagagagagaataccaccccgaagagctgggagcagggagagaggaccacctcgagggcctggcagtcgagaaaggggactgggaagatcagattttggtcgtgatagaggtccattcagaccagaaccaggagatggtggggaaaaaatgtatccatatcaccgggatgagcctcctagggctccatggaaccatggagaagagcgagggcatgaagagtttccattagatggtagaaatgctccaatggaacgagaaagactcgatgactgggatagagagagatactggagagaatgtgaacgtgactatcaagatgatacactagagctctataacagagaggacaggttctcagcaccaccatctcggtctcatgatggagataggcgaggcccttggtgggatgattgggagagagaccaggatatggatgaggactacaatagggaaatggaaagggacatggacagggatgtggatcggatttcaagacctatggatatgtatgatagaagtttggataatgagtgggacagagattatgggagaccactggatgaacaagaatcacagtttcgtgaacgggatattccatctcttccacctttaccgcccctcccacctcttccacctttggatagatatcgggatgatagatggagagaagaaagaaatcgagagcatgggtatgatcgagatttccgtgataggggtgagttgaggattcgagagtatccagaaagaggagatacatggcgggaaaagcgagattatgttcctgacagaatggactgggaaagagaacggttgtcagacagatggtacccatctgatgtggatagacattcccccatggcggaacatatgccctcctcacatcattcctcagaaatgatggggtccgatgcaagcttagactctgaccaaggccttggaggggtaatggttctcagtcagaggcagcatgaaatcattttgaaagctgcacaagaactgaaaatgcttcgggaacagaaagaacagcttcaaaagatgaaagacttcgggtctgagccacagatggctgaccatctaccacctcaggaatcaagattgcagaatacatcttcaagacctggaatgtatccgcctccagggtcgtatagacctccccctcctatgggcaaaccaccaggttcaattgtaagaccctctgctccaccagcaagatcatctgttcctgtgaccaggccacctgtcccaataccaccacctccacctcctccacctctacctcctcctcctccagtgataaagccacaaacttcagctgtagaacaggaacgatgggatgaagattctttctatgggctctgggatacaaatgatgaacaaggactgaattcagaatttaagtcagaaactgcagcaattccatctgctccagtattaccacccccacctgttcactcttccattccccctcctggcccagtgcctatgggtatgccaccaatgtccaagccaccaccagtacaacagactgttgattatggccatggccgagatatatccactaataaagttgaacagataccttatggagaaagaataactctacgcccagatccactacctgaaagatcaacttttgagacagagcatgcaggccaacgtgatcgttatgatagagaaagagatcgtgagccttattttgatcgtcaaagtaatgtcatagcagatcatcgagattttaaaagggatcgtgagacacatagagatcgagaccgggatcgtggtgttattgactatgaccgggatcgatttgacagagaacgccgaccccgagatgatagagctcagtcatatcgagacaaaaaagaccattcctcatccagaagagggggttttgataggccatcctatgaccggaagtctgaccgaccagtctatgaaggaccatccatgtttggaggagaacgaaggacttatcctgaggagcgaatgcctctgccagctccttcactgagccaccagcctcctccagctccacgagtcgagaagaagcctgaatcaaagaatgtggacgatattttgaaaccaccgggccgggagagcagacctgagagaattgttgttataatgagaggattacctggcagtggaaagacacatgttgcaaaacttattcgagataaggaggtagaatttggaggacctgcacccagagttctaagcctggatgattacttcatcactgaagtggaaaaagaagaaaaagatccagattctggaaagaaagtgaaaaagaaggtaatggaatatgaatatgaagctgagatggaggagacttaccgcaccagcatgttcaaaactttcaaaaagactctggatgatggcttttttcccttcatcatcctggatgccatcaatgacagagttaggcattttgaccagttttggagtgcagcaaaaaccaagggatttgaggtatatttggctgaaatgagtgcagataaccagacttgtggcaagagaaatattcatggaagaaagcttaaagaaataaataagatggctgatcactgggaaactgcacctcgtcacatgatgcgtctagatattcgttctttgctgcaagatgctgctattgaagaggtagagatggaagattttgatgcaaatatcgaagaacagaaagaagaaaagaaagatgcagaggaagaggaaagcgaactgggttacattccgaaaagcaaatgggagatggacacatctgaggcaaagctagacaagttggatggcttgaggactggtactaaaaggaaacgtgactgggaggccattgccagcagaatggaggattatcttcagctccccgatgattatgatactcgtgcttctgagcctgggaagaagagggtcagatgggcagacctggaagagaagaaggatgcagataggaaaagggccataggttttgtggtcggacagactgattgggagaagatcacagatgaaagtggtcacctggctgaaaaagccctcaatcgaaccaaatatatatgagacttagtttttgaacggagtcattattcctctaaggtggttcgctttgaggtggtctgaagccaaggcctcgcggagcttctttgtgtgtcaccttgcttccacgtttcagttcttgttttgtttctactgctttagttttttttaaagttctccagtgtccccaagaggtattagaatcttgctgtacccaagcaagacgttaatttttcttttaactgttttggggagggagggagtgatagcttaactgctgaagccaggcgggggtctgctggaggattccaacagagagtatttcctccactgtacaatgtcacagactatctctatcatcattgctttgtggctgtttctgttttttactgtatgtaactggtagctgattgtactaggattaaaaacaataaactttcatgataaagccgatgagattcatgggctatacagca

SEQ ID NO: 201831 - DNA, 6550 bp, Artificial Sequence
  derived and/or modified sequence
gtttacacgctccggggcctgtaggcgccgcgagttccggctgtcgccgtcgccgccgcggctcctggaggtcggttgcgacgagtaacggcgccaggacgagccctgcgccttctttttcgatatgtacccgaattggggccggtatggcgggagcagccactatccgccgccaccggtcccaccgccgccgccagtggcgcttcctgaggcctcgccggggcccgggtactcgagctcgacgactcccgcggccccctcctcctcgggcttcatgagcttccgcgaacagcacttggcgcagctccagcagctgcagcagatgcaccagaagcaaatgcagtgcgtgcttcagccccaccaccttcctccgccccctctgccgcccccgccagtgatgccggggggcggctacggagactggcagccgccaccgccaccgatgcccccgccacccgggccggccctcagctatcagaagcagcagcagtacaaacaccagatgctccaccaccaacgagacgggcctcctggtttggttccaatggagctggaatccccccctgaatctccccctgtgccgcctgggtcctatatgcccccatctcagtcttacatgcccccacctcagccgccaccctcttactaccccccgacctcatctcagccctacctgcctcctgctcagccgtccccttcgcagtccccaccttcccaatcctacctggcgcccaccccttcttactcatcctcctcctcttcctcgcaatcctatttgagccattcccagtcctacttgccctcttctcaggcatctccttcccgcccctcccagggccattctaaatcccaactactagctccaccaccaccgtccgccccccctggaaataagacaactgtccagcaagagcctttggagagtggggccaaaaacaagagtactgaacagcagcaagccgcccctgagccagatccctctacgatgactccacaggaacagcagcagtattggtatcgacagcacttgcttagtttgcaacagaggacaaaagttcatttgccaggacacaaaaagggtcctgtggtagcaaaggatacaccagagccggtaaaagaagaagttacagtacctgccaccagtcaagttccagaatctccttcttctgaggagcccccattgccacctccaaatgaggaagtgccacctcctctcccacctgaggaaccccagtctgaggacccagaagaagatgccaggttaaagcagttgcaggctgcagcagcacactggcagcagcaccagcagcatcgagtcggtttccagtatcagggaataatgcagaagcacactcagttacagcagattctacaacagtatcagcagattatacagcccccaccacatatacagaccatgtctgtagatatgcagctgcggcattatgagatgcagcagcaacagtttcaacatctttaccaagaatgggagcgagagtttcagctatgggaggaacaactccattcctatcctcataaagatcagcttcaggagtatgagaagcagtggaaaacatggcagggacatatgaaagccactcagagctatctccaggagaaagtcaattcatttcagaacatgaagaaccagtatatggggaacatgtcaatgccacctccttttgttccatattctcagatgcctccacctctacctacaatgccccctccagtgttgcctccttcattgccaccaccagtgatgccccctgccctccctgctacagtgccaccacctggcatgcccccacctgttatgccaccttctctaccaacctctgttcccccaccagggatgcctccttctctctcttctgcagggccaccaccagttctccccccaccttccctgtcttctgcagggccaccaccagttcttcccccaccatctctctcttcaacagcacctccacctgtcatgcccctcccaccattgtcttcagctacacctcctccaggaatacctccccctggagttccacaagggatacctcctcagttaacagcagccccagttccaccagcctccagttcacagagctcgcaagttccagagaaacctagaccagcactgcttcctactcctgtgtcttttggttctgccccaccgacaacttaccatcctccgttgcaatcagctggtccatcagaacaagtgaattcaaaagctcctttgagcaagtctgctctgccatacagttcattctcatctgatcaaggacttggggagtcttcagctgctccatctcagccaatcactgcagtgaaggacatgccagtgagatcaggtggcctgcttccagatcctcctagaagtagttacttggaaagtccaagaggcccaagatttgatggtcctcgaagatttgaggatttagggtcaaggtgtgaaggaccgagacccaaagggcctcgttttgaaggaaatcgccccgatgggccaagacccagatatgaaggtcacccagcagagggcactaaaagcaagtggggaatgattccccgggggccagcatctcaattttatattacccccagtacatccctaagtcctcgacagagtggaccacagtggaaaggccccaaaccagcttttggacagcagcatcagcagcaacctaagtcacaagcagaacctctttcaggaaacaaagaaccattagcagacaccagtagtaaccagcagaagaattttaaaatgcaatcagctgcattttccattgctgcagatgtaaaggatgtcaaggcggctcagtcaaatgagaatctaagcgactctcaacaagagccacctaaaagtgaagtctcggaagggcccgtagagccctctaattgggaccagaatgttcaaagtatggagactcaaatcgacaaagcccaagctgttactcagcctgtaccccttgcgaataagcctgtacctgctcaatctacttttccttcaaaaacaggggggatggagggaggaacagcagtagcaacatcatcattaacagcagataatgattttaaacctgtgggtattggtctaccccattcagaaaacaaccaagataaaggcctgcctcggccagataatagagataatagattagaaggcaatagaggcaacagctcatcttacagaggtcctgggcaaagcagaatggaagacacacgggataaaggtctagtaaacagaggtcgcggccaggcaatcagtcgaggcccaggattggtcaagcaagaagactttcgggataagatgatgggtagaagagaagatagtcgagagaagatgaacagaggagaaggtagccgggacagagggttggtgaggcctggaagcagtcgggagaaagtgccaggtggtcttcaagggagccaggacaggggtgcagctggcagccgagaaaggggaccacctcggagggctggcagtcaggagaggggacctcttcgaagggctgggagtagagagagaataccaccccgaagagctgggagcagggagagaggaccacctcgagggcctggcagtcgagaaaggggactgggaagatcagattttggtcgtgatagaggtccattcagaccagaaccaggagatggtggggaaaaaatgtatccatatcaccgggatgagcctcctagggctccatggaaccatggagaagagcgagggcatgaagagtttccattagatggtagaaatgctccaatggaacgagaaagactcgatgactgggatagagagagatactggagagaatgtgaacgtgactatcaagatgatacactagagctctataacagagaggacaggttctcagcaccaccatctcggtctcatgatggagataggcgaggcccttggtgggatgattgggagagagaccaggatatggatgaggactacaatagggaaatggaaagggacatggacagggatgtggatcggatttcaagacctatggatatgtatgatagaagtttggataatgagtgggacagagattatgggagaccactggatgaacaagaatcacagtttcgtgaacgggatattccatctcttccacctttaccgcccctcccacctcttccacctttggatagatatcgggatgatagatggagagaagaaagaaatcgagagcatgggtatgatcgagatttccgtgataggggtgagttgaggattcgagagtatccagaaagaggagatacatggcgggaaaagcgagattatgttcctgacagaatggactgggaaagagaacggttgtcagacagatggtacccatctgatgtggatagacattcccccatggcggaacatatgccctcctcacatcattcctcagaaatgatggggtccgatgcaagcttagactctgaccaaggccttggaggggtaatggttctcagtcagaggcagcatgaaatcattttgaaagctgcacaagaactgaaaatgcttcgggaacagaaagaacagcttcaaaagatgaaagacttcgggtctgagccacagatggctgaccatctaccacctcaggaatcaagattgcagaatacatcttcaagacctggaatgtatccgcctccagggtcgtatagacctccccctcctatgggcaaaccaccaggttcaattgtaagaccctctgctccaccagcaagatcatctgttcctgtgaccaggccacctgtcccaataccaccacctccacctcctccacctctacctcctcctcctccagtgataaagccacaaacttcagctgtagaacaggaacgatgggatgaagattctttctatgggctctgggatacaaatgatgaacaaggactgaattcagaatttaagtcagaaactgcagcaattccatctgctccagtattaccacccccacctgttcactcttccattccccctcctggcccagtgcctatgggtatgccaccaatgtccaagccaccaccagtacaacagactgttgattatggccatggccgagatatatccactaataaagttgaacagataccttatggagaaagaataactctacgcccagatccactacctgaaagatcaacttttgagacagagcatgcaggccaacgtgatcgttatgatagagaaagagatcgtgagccttattttgatcgtcaaagtaatgtcatagcagatcatcgagattttaaaagggatcgtgagacacatagagatcgagaccgggatcgtggtgttattgactatgaccgggatcgatttgacagagaacgccgaccccgagatgatagagctcagtcatatcgagacaaaaaagaccattcctcatccagaagagggggttttgataggccatcctatgaccggaagtctgaccgaccagtctatgaaggaccatccatgtttggaggagaacgaaggacttatcctgaggagcgaatgcctctgccagctccttcactgagccaccagcctcctccagctccacgagtcgagaagaagcctgaatcaaagaatgtggacgatattttgaaaccaccgggccgggagagcagacctgagagaattgttgttataatgagaggattacctggcagtggaaagacacatgttgcaaaacttattcgagataaggaggtagaatttggaggacctgcacccagagttctaagcctggatgattacttcatcactgaagtggaaaaagaagaaaaagatccagattctggaaagaaagtgaaaaagaaggtaatggaatatgaatatgaagctgagatggaggagacttaccgcaccagcatgttcaaaactttcaaaaagactctggatgatggcttttttcccttcatcatcctggatgccatcaatgacagagttaggcattttgaccagttttggagtgcagcaaaaaccaagggatttgaggtatatttggctgaaatgagtgcagataaccagacttgtggcaagagaaatattcatggaagaaagcttaaagaaataaataagatggctgatcactgggaaactgcacctcgtcacatgatgcgtctagatattcgttctttgctgcaagatgctgctattgaagaggtagagatggaagattttgatgcaaatatcgaagaacagaaagaagaaaagaaagatgcagaggaagaggaaagcgaactgggttacattccgaaaagcaaatgggagatggacacatctgaggcaaagctagacaagttggatggcttgaggactggtactaaaaggaaacgtgactgggaggccattgccagcagaatggaggattatcttcagctccccgatgattatgatactcgtgcttctgagcctccaaggcctcgcggagcttctttgtgtgtcaccttgcttccacgtttcagttcttgttttgtttctactgctttagttttttttaaagttctccagtgtccccaagaggtattagaatcttgctgtacccaagcaagacgttaa

SEQ ID NO: 201832 - protein, 1943 aa, Artificial Sequence
  derived and/or modified sequence
MEENESQKCEPCLPYSADRRQMQEQGKGNLHVTSPEDAECRRTKERLSNGNSRGSVSKSSRNIPRRHTLGGPRSSKEILGMQTSEMDRKREAFLEHLKQKYPHHASAIMGHQERLRDQTRSPKLSHSPQPPSLGDPVEHLSETSADSLEAMSEGDAPTPFSRGSRTRASLPVVRSTNQTKERSLGVLYLQYGDETKQLRMPNEITSADTIRALFVSAFPQQLTMKMLESPSVAIYIKDESRNVYYELNDVRNIQDRSLLKVYNKDPAHAFNHTPKTMNGDMRMQRELVYARGDGPGAPRPGSTAHPPHAIPNSPPSTPVPHSMPPSPSRIPYGGTRSMVVPGNATIPRDRISSLPVSRPISPSPSAILERRDVKPDEDMSGKNIAMYRNEGFYADPYLYHEGRMSIASSHGGHPLDVPDHIIAYHRTAIRSASAYCNPSMQAEMHMEQSLYRQKSRKYPDSHLPTLGSKTPPASPHRVSDLRMIDMHAHYNAHGPPHTMQPDRASPSRQAFKKEPGTLVYIEKPRSAAGLSSLVDLGPPLMEKQVFAYSTATIPKDRETRERMQAMEKQIASLTGLVQSALFKGPITSYSKDASSEKMMKTTANRNHTDSAGTPHVSGGKMLSALESTVPPSQPPPVGTSAIHMSLLEMRRSVAELRLQLQQMRQLQLQNQELLRAMMKKAELEISGKVMETMKRLEDPVQRQRVLVEQERQKYLHEEEKIVKKLCELEDFVEDLKKDSTAASRLVTLKDVEDGAFLLRQVGEAVATLKGEFPTLQNKMRAILRIEVEAVRFLKEEPHKLDSLLKRVRSMTDVLTMLRRHVTDGLLKGTDAAQAAQYMAMEKATAAEVLKSQEEAAHTSGQPFHSTGAPGDAKSEVVPLSGMMVRHAQSSPVVIQPSQHSVALLNPAQNLPHVASSPAVPQEATSTLQMSQAPQSPQIPMNGSAMQSLFIEEIHSVSAKNRAVSIEKAEKKWEEKRQNLDHYNGKEFEKLLEEAQANIMKSIPNLEMPPATGPLPRGDAPVDKVELSEDSPNSEQDLEKLGGKSPPPPPPPPRRSYLPGSGLTTTRSGDVVYTGRKENITAKASSEDAGPSPQTRATKYPAEEPASAWTPSPPPVTTSSSKDEEEEEEEGDKIMAELQAFQKCSFMDVNSNSHAEPSRADSHVKDTRSGATVPPKEKKNLEFFHEDVRKSDVEYENGPQMEFQKVTTGAVRPSDPPKWERGMENSISDASRTSEYKTEIIMKENSISNMSLLRDSRNYSQETVPKASFGFSGISPLEDEINKGSKISGLQYSIPDTENQTLNYGKTKEMEKQNTDKCHVSSHTRLTESSVHDFKTEDQEVITTDFGQVVLRPKEARHANVNPNEDGESSSSSPTEENAATDNIAFMITETTVQVLSSGEVHDIVSQKGEDIQTVNIDARKEMTPRQEGTDNEDPVVCLDKKPVIIIFDEPMDIRSAYKRLSTIFEECDEELERMMMEEKIEEEEEEENGDSVVQNNNTSQMSHKKVAPGNLRTGQQVETKSQPHSLATETRNPGGQEMNRTELNKFSHVDSPNSECKGEDATDDQFESPKKKFKFKFPKKQLAALTQAIRTGTKTGKKTLQVVVYEEEEEDGTLKQHKEAKRFEIARSQPEDTPENTVRRQEQPSIESTSPISRTDEIRKNTYRTLDSLEQTIKQLENTISEMSPKALVDTSCSSNRDSVASSSHIAQEASPRPLLVPDEGPTALEPPTSIPSASRKGSSGAPQTSRMPVPMSAKNRPGTLDKPGKQSKLQDPRQYRQANGSAKKSGGDFKPTSPSLPASKIPALSPSSGKSSSLPSSSGDSSNLPNPPATKPSIASNPLSPQTGPPAHSASLIPSVSNGSLKFQSLTHTGKGHHLSFSPQSQNGRAPPPLSFSSSPPSPASSVSLNQGAKGTRTIHTPSLTSYKAQNGSSSKATPSTAKETS

SEQ ID NO: 201833 - DNA, 5832 bp, Artificial Sequence
  derived and/or modified sequence
atggaggagaacgagagccagaagtgcgagccctgcctgccctacagcgccgacagaagacagatgcaggagcagggcaagggcaacctgcacgtgaccagccccgaggacgccgagtgcagaagaaccaaggagagactgagcaacggcaacagcagaggcagcgtgagcaagagcagcagaaacatccccagaagacacaccctgggcggccccagaagcagcaaggagatcctgggcatgcagaccagcgagatggacagaaagagagaggccttcctggagcacctgaagcagaagtacccccaccacgccagcgccatcatgggccaccaggagagactgagagaccagaccagaagccccaagctgagccacagcccccagccccccagcctgggcgaccccgtggagcacctgagcgagaccagcgccgacagcctggaggccatgagcgagggcgacgcccccacccccttcagcagaggcagcagaaccagagccagcctgcccgtggtgagaagcaccaaccagaccaaggagagaagcctgggcgtgctgtacctgcagtacggcgacgagaccaagcagctgagaatgcccaacgagatcaccagcgccgacaccatcagagccctgttcgtgagcgccttcccccagcagctgaccatgaagatgctggagagccccagcgtggccatctacatcaaggacgagagcagaaacgtgtactacgagctgaacgacgtgagaaacatccaggacagaagcctgctgaaggtgtacaacaaggaccccgcccacgccttcaaccacacccccaagaccatgaacggcgacatgagaatgcagagagagctggtgtacgccagaggcgacggccccggcgcccccagacccggcagcaccgcccaccccccccacgccatccccaacagcccccccagcacccccgtgccccacagcatgccccccagccccagcagaatcccctacggcggcaccagaagcatggtggtgcccggcaacgccaccatccccagagacagaatcagcagcctgcccgtgagcagacccatcagccccagccccagcgccatcctggagagaagagacgtgaagcccgacgaggacatgagcggcaagaacatcgccatgtacagaaacgagggcttctacgccgacccctacctgtaccacgagggcagaatgagcatcgccagcagccacggcggccaccccctggacgtgcccgaccacatcatcgcctaccacagaaccgccatcagaagcgccagcgcctactgcaaccccagcatgcaggccgagatgcacatggagcagagcctgtacagacagaagagcagaaagtaccccgacagccacctgcccaccctgggcagcaagaccccccccgccagcccccacagagtgagcgacctgagaatgatcgacatgcacgcccactacaacgcccacggccccccccacaccatgcagcccgacagagccagccccagcagacaggccttcaagaaggagcccggcaccctggtgtacatcgagaagcccagaagcgccgccggcctgagcagcctggtggacctgggcccccccctgatggagaagcaggtgttcgcctacagcaccgccaccatccccaaggacagagagaccagagagagaatgcaggccatggagaagcagatcgccagcctgaccggcctggtgcagagcgccctgttcaagggccccatcaccagctacagcaaggacgccagcagcgagaagatgatgaagaccaccgccaacagaaaccacaccgacagcgccggcaccccccacgtgagcggcggcaagatgctgagcgccctggagagcaccgtgccccccagccagcccccccccgtgggcaccagcgccatccacatgagcctgctggagatgagaagaagcgtggccgagctgagactgcagctgcagcagatgagacagctgcagctgcagaaccaggagctgctgagagccatgatgaagaaggccgagctggagatcagcggcaaggtgatggagaccatgaagagactggaggaccccgtgcagagacagagagtgctggtggagcaggagagacagaagtacctgcacgaggaggagaagatcgtgaagaagctgtgcgagctggaggacttcgtggaggacctgaagaaggacagcaccgccgccagcagactggtgaccctgaaggacgtggaggacggcgccttcctgctgagacaggtgggcgaggccgtggccaccctgaagggcgagttccccaccctgcagaacaagatgagagccatcctgagaatcgaggtggaggccgtgagattcctgaaggaggagccccacaagctggacagcctgctgaagagagtgagaagcatgaccgacgtgctgaccatgctgagaagacacgtgaccgacggcctgctgaagggcaccgacgccgcccaggccgcccagtacatggccatggagaaggccaccgccgccgaggtgctgaagagccaggaggaggccgcccacaccagcggccagcccttccacagcaccggcgcccccggcgacgccaagagcgaggtggtgcccctgagcggcatgatggtgagacacgcccagagcagccccgtggtgatccagcccagccagcacagcgtggccctgctgaaccccgcccagaacctgccccacgtggccagcagccccgccgtgccccaggaggccaccagcaccctgcagatgagccaggccccccagagcccccagatccccatgaacggcagcgccatgcagagcctgttcatcgaggagatccacagcgtgagcgccaagaacagagccgtgagcatcgagaaggccgagaagaagtgggaggagaagagacagaacctggaccactacaacggcaaggagttcgagaagctgctggaggaggcccaggccaacatcatgaagagcatccccaacctggagatgccccccgccaccggccccctgcccagaggcgacgcccccgtggacaaggtggagctgagcgaggacagccccaacagcgagcaggacctggagaagctgggcggcaagagcccccccccccccccccccccccccagaagaagctacctgcccggcagcggcctgaccaccaccagaagcggcgacgtggtgtacaccggcagaaaggagaacatcaccgccaaggccagcagcgaggacgccggccccagcccccagaccagagccaccaagtaccccgccgaggagcccgccagcgcctggacccccagccccccccccgtgaccaccagcagcagcaaggacgaggaggaggaggaggaggagggcgacaagatcatggccgagctgcaggccttccagaagtgcagcttcatggacgtgaacagcaacagccacgccgagcccagcagagccgacagccacgtgaaggacaccagaagcggcgccaccgtgccccccaaggagaagaagaacctggagttcttccacgaggacgtgagaaagagcgacgtggagtacgagaacggcccccagatggagttccagaaggtgaccaccggcgccgtgagacccagcgacccccccaagtgggagagaggcatggagaacagcatcagcgacgccagcagaaccagcgagtacaagaccgagatcatcatgaaggagaacagcatcagcaacatgagcctgctgagagacagcagaaactacagccaggagaccgtgcccaaggccagcttcggcttcagcggcatcagccccctggaggacgagatcaacaagggcagcaagatcagcggcctgcagtacagcatccccgacaccgagaaccagaccctgaactacggcaagaccaaggagatggagaagcagaacaccgacaagtgccacgtgagcagccacaccagactgaccgagagcagcgtgcacgacttcaagaccgaggaccaggaggtgatcaccaccgacttcggccaggtggtgctgagacccaaggaggccagacacgccaacgtgaaccccaacgaggacggcgagagcagcagcagcagccccaccgaggagaacgccgccaccgacaacatcgccttcatgatcaccgagaccaccgtgcaggtgctgagcagcggcgaggtgcacgacatcgtgagccagaagggcgaggacatccagaccgtgaacatcgacgccagaaaggagatgacccccagacaggagggcaccgacaacgaggaccccgtggtgtgcctggacaagaagcccgtgatcatcatcttcgacgagcccatggacatcagaagcgcctacaagagactgagcaccatcttcgaggagtgcgacgaggagctggagagaatgatgatggaggagaagatcgaggaggaggaggaggaggagaacggcgacagcgtggtgcagaacaacaacaccagccagatgagccacaagaaggtggcccccggcaacctgagaaccggccagcaggtggagaccaagagccagccccacagcctggccaccgagaccagaaaccccggcggccaggagatgaacagaaccgagctgaacaagttcagccacgtggacagccccaacagcgagtgcaagggcgaggacgccaccgacgaccagttcgagagccccaagaagaagttcaagttcaagttccccaagaagcagctggccgccctgacccaggccatcagaaccggcaccaagaccggcaagaagaccctgcaggtggtggtgtacgaggaggaggaggaggacggcaccctgaagcagcacaaggaggccaagagattcgagatcgccagaagccagcccgaggacacccccgagaacaccgtgagaagacaggagcagcccagcatcgagagcaccagccccatcagcagaaccgacgagatcagaaagaacacctacagaaccctggacagcctggagcagaccatcaagcagctggagaacaccatcagcgagatgagccccaaggccctggtggacaccagctgcagcagcaacagagacagcgtggccagcagcagccacatcgcccaggaggccagccccagacccctgctggtgcccgacgagggccccaccgccctggagccccccaccagcatccccagcgccagcagaaagggcagcagcggcgccccccagaccagcagaatgcccgtgcccatgagcgccaagaacagacccggcaccctggacaagcccggcaagcagagcaagctgcaggaccccagacagtacagacaggccaacggcagcgccaagaagagcggcggcgacttcaagcccaccagccccagcctgcccgccagcaagatccccgccctgagccccagcagcggcaagagcagcagcctgcccagcagcagcggcgacagcagcaacctgcccaacccccccgccaccaagcccagcatcgccagcaaccccctgagcccccagaccggcccccccgcccacagcgccagcctgatccccagcgtgagcaacggcagcctgaagttccagagcctgacccacaccggcaagggccaccacctgagcttcagcccccagagccagaacggcagagcccccccccccctgagcttcagcagcagcccccccagccccgccagcagcgtgagcctgaaccagggcgccaagggcaccagaaccatccacacccccagcctgaccagctacaaggcccagaacggcagcagcagcaaggccacccccagcaccgccaaggagaccagctag

SEQ ID NO: 201834 - DNA, 5832 bp, Artificial Sequence
  derived and/or modified sequence
atggaagaaaacgagtctcaaaaatgcgaaccctgcctgccctactcagctgacaggcggcagatgcaagaacagggcaagggtaacttgcacgtaactagtccggaggacgcagagtgccgccgtactaaggagcgactcagtaatgggaacagccgaggaagtgtctctaaatcctctcgcaacattcctaggcggcacaccctcggtgggccaagatcgtcaaaagagattttagggatgcagactagtgaaatggaccgcaaaagagaagctttcctcgagcacctgaaacagaaatatccccatcatgctagtgcaatcatgggccatcaggagaggctccgagatcagacaaggtccccaaagcttagccacagccctcagcctcctagtctcggcgatccagttgagcatttatccgagacttctgccgattcattggaggccatgagcgaaggggacgcccccactcctttctctcgcgggtccaggacaagagcttcattgcccgtcgtgcgcagcacaaatcaaaccaaagagaggtccctgggagttctgtacctgcagtatggagacgagaccaaacagctgcgcatgcccaatgagattacatccgccgataccataagggccctatttgtgtctgcctttcctcagcagctgacgatgaaaatgcttgaatccccttctgtggcaatttatattaaagatgaatcgagaaatgtctattacgaactgaatgatgttaggaacatccaggatagatcactactcaaagtctacaacaaagatcctgcccatgccttcaatcatacacccaaaactatgaacggcgacatgagaatgcaaagggagctggtgtacgccaggggtgatgggcccggagctccccgcccaggtagcaccgcgcatcccccacatgcaatccctaatagccctccgtctacacccgtgccacacagcatgccaccttcaccctccaggatcccatacggcggaacccgtagcatggtcgtaccaggcaacgccactataccacgcgatcgtatatcttccctgcccgtctctcggccaatctccccaagcccgtccgctatcctggagcggagggatgttaagcctgatgaggacatgtctgggaaaaatattgcaatgtaccgaaacgaaggtttttacgctgatccttatctctaccacgaaggacggatgagtatcgcttcctcccacgggggccatcccttggatgtgccagaccacatcatcgcctatcataggactgcaatacggagcgcctcagcttattgcaacccttccatgcaagctgagatgcacatggagcagtcattatatcggcagaaaagtaggaagtaccctgactcgcacctgcccacactcggctctaaaactcctcctgcctcaccacaccgggtgagtgatcttaggatgattgacatgcacgcacactataacgctcatggcccacctcacacgatgcagccagatagagccagcccgagcaggcaggcctttaagaaggaacctggtacgcttgtatacatcgagaaaccccggagcgccgccgggttatcgtcacttgtggatctgggcccaccacttatggagaagcaggtgtttgcttacagcacggctacaatccctaaggatcgagaaactagagaaagaatgcaggccatggaaaaacaaatcgcatctcttaccggtctggtgcaatccgccttgtttaagggtccaatcacaagttacagtaaggacgcctcttctgaaaaaatgatgaagacgaccgctaatcgtaaccacacggactcagctggcacaccacatgtgtccgggggcaaaatgctttccgcattggagtcgactgttccacccagtcagccgcctcccgtggggacaagcgctatccatatgagtttgctcgaaatgcgaagatccgttgccgagcttcgtctgcaactgcagcaaatgcggcagctgcagctacaaaaccaagagctgctgcgcgccatgatgaagaaggcagagctcgagatatcaggaaaagtcatggaaaccatgaagcgtcttgaggatcctgtgcagcgccagcgcgtgctcgtcgagcaagagcgccagaagtatctgcatgaggaggagaaaattgtcaagaagctgtgcgagctggaggattttgtggaagatctgaagaaagatagcacagccgccagccgcttggttacgctgaaggacgtggaggacggagcatttttgctcaggcaggtcggcgaagcagtcgccacactcaagggcgagttccccaccttacagaacaaaatgcgagccattcttcgaatcgaagtggaagctgtccgctttctcaaggaggaaccccataagctggattccctattgaagcgggttcgtagcatgactgatgtcctgaccatgttgcgacggcacgtcactgatggcctgctgaagggaactgacgccgcccaagctgcccagtacatggcaatggaaaaagcgaccgcagccgaggtcctcaaatcccaggaagaagcagcccatacctccggacaaccttttcattcaacaggagcgcccggggatgctaagagcgaggtggtcccgctcagcggaatgatggtgagacatgctcagtcttctccagtcgtgatacagccgagccagcacagcgtcgctcttttgaatcccgcccagaatcttccacacgtggcttccagcccagctgtcccgcaggaggccacatccactctccagatgtcacaagctccccagagcccccagattcccatgaatggcagcgccatgcagtcgctgtttattgaggagatccacagcgtctcggcaaaaaaccgtgcagtgtctatcgagaaagccgaaaagaagtgggaagagaagaggcagaatctcgaccactacaacggtaaagaatttgaaaaattgctggaggaggcccaggctaacattatgaagagcatcccgaacctcgaaatgcctcccgcgaccgggccactgccaagaggtgatgctcccgtagacaaagtcgagctctccgaggattctcctaatagtgaacaggatctggagaagttaggtgggaaaagtcctccgccccctcctccaccacccaggcggtcttacttacccggcagcgggctgactacgacgcgctccggggacgtcgtgtatactggcagaaaagagaacattacagcaaaagctagctcggaggacgctgggccttctcctcaaacgcgagccaccaagtaccctgccgaagagccggccagcgcatggacacccagcccaccccccgtgacaacctcctcttccaaggatgaagaggaggaagaggaagagggagataagatcatggccgagctgcaggcttttcagaagtgctcttttatggatgtcaactcgaacagtcatgccgaaccatccagagctgactctcatgtgaaggacaccagaagcggtgctacggtgccccctaaagaaaagaaaaacctagagtttttccacgaggacgttcgaaagagcgacgtggaatatgagaacggtccacagatggaattccagaaggtgacaaccggcgcggttcggccttccgatccccctaagtgggagcggggcatggaaaatagcatcagtgatgctagccggaccagcgagtataagacagagattattatgaaggaaaatagcatatctaatatgagcctgttgcgggatagtaggaactattcccaggaaaccgtccccaaagcgagcttcggtttttctgggatttctccactggaagacgagatcaataagggcagtaagatcagtggattgcaatacagcattcccgacaccgagaatcagactctcaattacggtaagactaaagagatggaaaaacaaaataccgacaagtgtcacgtgtcatcacatacgcgactgacggagtcatcagttcacgacttcaagactgaagatcaggaggtgattacgacggattttggccaggtggttctgcgacccaaggaagcccggcacgcgaatgttaatcccaacgaagacggagagtcaagcagcagtagccccaccgaggagaatgctgccaccgataacatagcgttcatgattactgaaacaacggtgcaggtactgagctcgggggaagttcatgatattgtgagccaaaagggcgaggatatacaaaccgtcaacatcgacgcacgaaaagaaatgacaccaagacaggaggggacggataatgaagatcccgttgtatgtttggacaagaaaccagtcattatcatatttgatgagcccatggatattagaagcgcttataaaagactgagtacaattttcgaggagtgcgatgaggagttggagcgaatgatgatggaagaaaaaatcgaagaagaggaggaggaggagaatggtgacagtgtggtgcagaataacaacacttcgcagatgtcccataaaaaggtggcacctgggaacctaagaaccggacagcaggtcgaaactaagtcccagcctcacagcttggcaactgaaacgagaaaccctggcggccaggaaatgaacaggacagaacttaataagttttcccacgtggactccccaaattccgaatgcaaaggcgaggatgccaccgacgaccagtttgaaagcccaaagaaaaaatttaagtttaaattccccaagaagcagctggcagcccttactcaggccatcagaacgggcaccaagactggaaagaaaacactacaggtcgtcgtctatgaagaggaggaggaagatgggacactgaaacaacataaagaggctaagcgcttcgaaatagcaagatcgcagccagaggacaccccagaaaatactgtaaggcgacaagaacagcccagtatcgaatcgacttcaccaatttctaggaccgatgaaatacgcaagaacacttacagaaccttggatagtctagagcaaactatcaagcagctggaaaacacgatcagcgaaatgtctcctaaggccttggttgatacaagttgttcgagcaacagagatagtgtggcctcttcatctcatattgctcaggaagccagcccccgccctctgctggtgccagatgagggccccacagcactggagccacccacatccataccatcggcctcccggaagggaagctcaggtgctccgcagacgagcagaatgcctgtgcctatgagtgcaaaaaataggcccgggacattggataaacccggaaagcagagcaagttgcaagatcccaggcagtacagacaggcaaatgggtccgccaaaaagtcaggcggagacttcaagccaacttccccgtcattaccagctagcaagattcctgcgctgtccccatctagcgggaagagttcttccctgccttcatcttctggcgatagctcaaacctgcccaacccacccgccaccaaaccgtccattgccagtaaccctctctccccccagaccgggcctcccgctcactctgcctcactaatcccatctgtctcgaacggctccctgaaatttcaaagcctaacacatactggtaaaggccaccatctctcctttagtccccagagtcagaatggacgcgcacctccccccctatctttctcatctagtcctccgagcccggcttcctcagtgagtctcaatcagggggcaaaaggtaccaggacaatccacactccgtctctaacctcctataaagctcagaatggttcatcttcaaaagccacccccagcacagcgaaagagaccagctag

SEQ ID NO: 201835 - DNA, 7381 bp, Artificial Sequence
  derived and/or modified sequence
agcgaggagcttttgcggcaggcagagacaatggaagaaaatgaaagccagaaatgtgagccgtgccttccttactcagcagacagaagacagatgcaggaacaaggcaaaggcaatctgcatgtaacatcaccagaagatgcagaatgccgcagaaccaaggaacgcctttctaatggaaacagtcgtggttcagtttccaagtcttcccgcaatatcccaaggagacacaccctaggggggccccgaagttccaaggaaatactgggaatgcaaacatctgagatggatcggaagagagaagcgttcctagaacatctgaagcagaagtacccccaccacgcctctgcaatcatgggtcaccaagagaggctgagagaccagacaaggagccccaaactgtctcacagtcctcaaccacccagtctgggtgacccggtcgagcatttatcagagacgtccgctgattctttggaagccatgtctgagggggatgctccaacccctttttccagaggcagccggactcgtgcgagccttcctgtggtgaggtcaaccaaccagacgaaagaaagatctctgggggttctctatctccagtatggagatgaaaccaagcagctcaggatgccgaatgaaatcacaagtgcagacacaatccgtgctctcttcgtaagtgcctttccacagcagctcaccatgaaaatgctggaatcgcccagtgtcgccatttacatcaaagatgaaagcagaaatgtctattatgaattaaatgatgtaaggaacattcaagacagatcactcctcaaagtgtacaacaaggatcctgcacatgcgtttaatcacacaccaaaaactatgaatggagacatgaggatgcagagagaacttgtttatgcaagaggagatggccctggggcccctcgccccggatctactgctcatccaccccatgcgattccaaattccccaccgtctactccagtgccccattccatgcccccctccccgtccagaattccttatgggggcacccgctccatggttgttcctggcaatgccaccatccccagggacagaatctccagcctgccagtctccagacccatctctccaagcccaagcgccattttagaaagaagagatgtcaagcctgatgaagacatgagtggcaaaaacattgcaatgtacagaaatgagggtttctatgctgatccttacctttatcacgagggacggatgagcatagcctcatcccatggtggacacccactggatgtccccgaccacatcattgcatatcaccgcaccgccatccggtcagcgagtgcttattgtaacccctcaatgcaagcggaaatgcatatggaacaatcactgtacagacagaaatcaaggaaatatccggatagccatttgcctacactgggctccaaaacaccccctgcctctcctcacagagtcagtgacctgaggatgatagacatgcacgctcactataatgcccacggcccccctcacaccatgcagccagaccgggcctctccgagccgccaggcctttaaaaaggagccaggcaccttggtgtatatagaaaagccacggagcgctgcaggattatccagccttgtagacctcggccctcctctaatggagaagcaagtttttgcctacagcacggcgacaatacccaaagacagagagaccagagagaggatgcaagccatggagaaacagattgccagtttaactggccttgttcagtctgcgctttttaaagggcccattacaagttatagcaaagatgcgtctagcgagaaaatgatgaaaaccacagccaacaggaaccacacagatagtgcaggaacgccccatgtgtctggtgggaagatgctcagtgctctggagtccacggtgcctcccagccagcctccacctgtgggcacctcagccatccacatgagcctgcttgagatgaggcggagcgtggcggaactcaggctccagctccagcagatgcggcagctccagctgcagaaccaggagttgctgagggcaatgatgaagaaggccgagctggaaatcagtggcaaagtgatggaaacaatgaagagactggaggatcccgtgcagcgacagcgcgtcctagtggagcaagagagacaaaaatatcttcatgaggaagagaagatcgtcaagaagttgtgcgagttggaagactttgttgaagacttgaagaaggactccacggcagccagccgattggttactctgaaagacgtggaagacggggctttcctcctgcgtcaagtgggagaggctgtagctaccctgaaaggagaatttccaaccttacaaaacaagatgcgagccatcctgcgcatagaagtggaggccgtgcggtttctgaaggaggagccacacaagctggacagtctcctgaagcgtgtgcgcagcatgacagacgtcctgaccatgctgcggagacatgtcactgatgggctcctgaaaggcacggacgcagcccaagccgcacagtacatggctatggaaaaggccacagccgcagaagtcctgaagagtcaggaggaggcagcccacacctccggccagcccttccacagcacaggtgcccctggcgatgcgaagtcggaagtggtgcctttgtccggcatgatggttcgccacgcgcagagctcccctgtggtcatccagccctcccagcactccgtggccctgctgaaccctgctcagaacttgcctcacgtggccagctccccagccgtcccccaggaagcaacctccactctgcagatgtcgcaggctccgcagtccccacagatacccatgaatgggtctgccatgcagagcttgttcattgaagaaatccacagtgtgagtgccaagaacagggcagtgtctatcgagaaagcagaaaagaaatgggaggaaaaaaggcaaaatctggatcactataatgggaaagagtttgagaagctcctagaagaagctcaggccaatatcatgaagtcaataccaaatctggagatgccgccagccacaggcccactgccaaggggagatgccccagtggacaaggtggaactttcagaagattctccaaattcggaacaggacttggaaaagctggggggaaagtcgccccctcctcctccgccacctcctcgtcgaagctacctgccaggatcgggactcaccaccacgaggtcaggcgatgtggtctacaccggcagaaaggagaacatcaccgctaaggcaagcagtgaagatgctggaccaagcccacagaccagagctacaaaatatccagcagaggagcctgcttcagcctggaccccatccccaccgcctgtcaccacctcctcctcaaaggatgaggaggaagaagaagaagaaggagacaaaataatggcagaactccaggcattccagaagtgttcctttatggatgtaaattcaaacagtcatgctgagccatcccgggctgacagtcacgttaaagacactaggtcgggcgccacagtgccacccaaggagaagaagaatttggaatttttccatgaagatgtacggaaatctgatgttgaatatgaaaatggcccccaaatggaattccaaaaggttaccacaggggctgtaagacctagtgaccctcctaagtgggaaagaggaatggagaatagtatttctgatgcatcaagaacatcagaatataaaactgagatcataatgaaggaaaattccatatccaatatgagtttactcagagacagtagaaactattcccaggaaactgtgcctaaggccagtttcggtttctctggcattagtccattagaagatgaaataaacaaagggtctaaaatctcaggcctgcaatactctatacctgacaccgagaaccagacgctgaattacggaaagacaaaggagatggaaaagcaaaatacggataagtgtcacgtttcctctcacactagactaacagaatcaagcgtgcatgattttaaaacagaagatcaagaggttatcacgacagattttggccaagttgttctaagacccaaggaggcaaggcatgctaacgtgaaccctaatgaggatggagaatcaagttcaagttctcccactgaagaaaatgcagccactgacaatattgccttcatgattaccgaaaccactgtccaggttctttccagtggggaggtgcatgatattgttagccaaaagggagaagacatacagacggttaatatcgatgccagaaaagagatgaccccccgacaagaagggactgacaatgaggatccagtcgtgtgcctggacaagaaaccagtgatcatcattttcgatgagcccatggacatccggtctgcctataagagactttcaactatctttgaggaatgtgatgaggaattagagagaatgatgatggaggaaaagatagaggaggaggaagaggaggaaaatggggattctgtagtccagaataataacacttcccagatgtctcataagaaggtggccccaggcaatcttagaaccggacaacaggtggaaacaaagtcacagccacactccctggccacagagaccagaaacccaggaggacaggaaatgaacagaacggagctgaacaagttcagccacgtggattctccaaattcggaatgcaagggtgaggacgcgaccgatgaccagtttgaaagccccaagaaaaagtttaaattcaaattccctaagaagcaactcgccgctctcactcaagccattcgcaccggaactaaaacagggaagaagactttgcaagtggtagtctatgaagaagaggaagaggatggcaccctgaaacagcacaaagaagccaagcgcttcgaaatcgctaggtctcaacctgaagacacccctgaaaacacagtgaggaggcaagagcagcccagcatcgagagtacatctccgatttcaagaactgatgaaattagaaaaaacacctacagaacattggatagcctggagcagaccattaaacagctcgaaaatacaatcagtgaaatgagtcccaaagccctagttgatacctcatgttcttccaacagagattctgttgcaagttcatcccacatagcccaagaggcctctccccgacccttgctagttccggatgaaggtcccactgccctagagccccctacgtcgataccttcagcttcacgtaagggctccagcggggccccacagacgagcaggatgcctgtccccatgagtgccaagaacagacccggaaccctggacaaacccggcaagcagtccaaactgcaggatccccgccaatatcgtcaggctaatggaagtgctaagaaatctggtggggactttaagcctacttccccctccttacctgcttctaagattccagccctttctcccagctctgggaaaagcagttctctgccctcttctagtggtgacagctctaacctccctaatccacctgctactaaaccatcgattgcttctaaccctctcagcccccaaacaggaccacctgctcactctgcctccctcatcccttctgtctctaatggctctttgaagtttcagagcctcactcatacaggtaaaggtcaccatctttcattctcaccgcagagtcaaaatggccgagcaccccctcctttgtcattttcctcctcccctccttctcctgcctcctccgtctcactgaatcaaggtgccaagggcaccaggaccatccatactcccagcctcaccagctacaaggcacagaatggaagttcaagcaaagccaccccatccacagcaaaagaaacctcttaaaggtcaaatcctattaggcacaagtcggagttacatttaaaaaaaattaacagtctacaacaactgttttcacaagagaatgtaacatattgctgtatcgtttgaggcttaatgctaaatatgtgctaaatactggattaatagatttcagtaaagctcgttcgttttgtttggttttctttttacctagttgctatagtgtctacagtctatactcaatacctataaaatgcagtaagcatgtgttacagaaagaggttctggtgggagagaaaggtgcgtgtgagacaggagaattgtcttaagcatataaaacatgtatgattccagaattttagtatgttttgtataaaactatttttcattacggagactagaagtgaacagagaattacacaagtgtgactatacaaattgtaaaacagatactataatatttccttttattttagtgttatttagctttattacagatttctatttttgtcaaaacttcatggttcctttcaagatcttttttgccaaaacattttgatactatagcattgtacatttgaaagtagtgttctagactataaaaccaatgaacttctacatgagccctacagacaggcatgtgtagaaggcaatttatcaaacctattgcactgccatgaaaagtgtgtataataatttgctagcccaagcaagctagttttctttgcttgcttcttttctttcttttttccttccttttttttttttttttcttttttaacatgttgagattctctagttgttttctttggcgtatctaaccccttcttttgttttctgagacctggtaacccacgctcttgcattgtggattttaaaatgtatactctgtacggttctgtaaaccgaaaaacttttgtaaatatataaatatacatagacataaaaatactgtatgtgacagcacatagagtagttttcccacaccaaagttaatttttatgcatgctttaaaagtatatatcgggaccggcagaaatggaagtatccatacatttttaaaaagcaacaagtttgcacagctagagtgtttttgtaaataaatgtatttgtataacacagtcatgtaatatacagaactataagcagagactttgcaaaactaaataaagggctgcatgcttattattttttgtaccttgtcactataactacttcctagtcaaagaacgaaatgtaactgttaccgagttaaatgtttttccgctttgagggatgtaaccacatccactcagaggacactacttttctgaaagctctggggtgactaatgatgagttcctaataaattaattgcaagtgtggtgccttggatgtggcctgttggctcgctttcttctctgtggcttatcaaggtgtagatgacagaaagcaaacctggatacagagtttccaccctcagttcctggaggggctcttattattttctctctttttaaaaaacttccagtagaagtaaagtggaaataaaatgtctttatca

SEQ ID NO: 201836 - DNA, 5832 bp, Artificial Sequence
  derived and/or modified sequence
atggaggagaatgaaagccagaagtgtgagccctgcctgccctacagcgctgaccggcggcagatgcaggagcagggcaaaggaaacctgcacgtgaccagcccagaagatgctgaatgtagaaggaccaaggagcggctgagcaatggaaacagccggggctctgtgtccaagagcagcaggaacatccccaggaggcacaccctgggcggccccaggagcagcaaggagatcctgggcatgcagaccagcgagatggacaggaagcgggaggccttcctggagcacctgaagcagaagtacccccaccacgccagcgccatcatgggccaccaggagcggctgcgggaccagaccaggagccccaagctgagccacagcccccagccccccagcctgggggaccctgtggagcacctgtctgagaccagcgctgacagcctggaggccatgtctgaaggagatgcccccacccccttcagccggggcagcaggacccgggccagcctgcctgtggtgcgcagcaccaaccagaccaaggagaggagcctgggcgtgctgtacctgcagtatggagatgagaccaagcagctgaggatgcccaatgagatcaccagcgctgacaccatccgggccctgtttgtgtctgccttcccccagcagctgaccatgaagatgctggagagccccagcgtggccatctacatcaaggatgagagcagaaatgtgtactatgagctgaatgatgtgaggaacatccaggacaggagcctgctgaaggtgtacaacaaggaccctgcccacgccttcaaccacacccccaagaccatgaatggagacatgaggatgcagcgggagctggtgtatgcccggggagatggccctggggccccccggcccggcagcacagcccaccccccccacgccatccccaacagcccccccagcacccctgtgccccacagcatgccacccagccccagccgcatcccctacggcggcaccaggtccatggtggtgcctggaaatgccaccatcccccgggaccgcatcagcagcctgcctgtgtcccggcccatcagccccagccccagcgccatcctggagaggagagatgtgaagccagatgaggacatgtctgggaagaacatcgccatgtacagaaatgaaggcttctacgccgacccctacctgtaccacgagggccgcatgagcatcgccagcagccacggcggccaccccctggatgtgcctgaccacatcatcgcctaccacaggacagccatccgcagcgccagcgcctactgcaaccccagcatgcaggccgagatgcacatggagcagagcctgtaccggcagaagagcaggaagtacccagacagccacctgcccaccctgggcagcaagaccccaccagccagcccccaccgggtgtctgacctgaggatgattgacatgcacgcccactacaatgcccacggccccccccacaccatgcagcctgaccgggccagccccagccggcaggccttcaagaaggagcccggcaccctggtgtacatcgagaagcccaggtctgctgctggcctgagcagcctggtggacctgggcccccccctgatggagaagcaggtgtttgcctacagcacagccaccatccccaaggaccgggagacccgggagaggatgcaggccatggagaagcagatcgccagcctgaccggcctggtgcagagcgccctcttcaagggccccatcaccagctacagcaaggatgccagcagcgagaagatgatgaagaccacagccaacagaaaccacacagacagcgctggcacccctcatgtgtctgggggcaagatgctgagcgccctggagagcacagtgccccccagccagcccccacctgtgggcaccagcgccatccacatgagcctgctggagatgagaagatctgtggccgagctgcggctgcagctgcagcagatgaggcagctgcagctgcagaaccaggagctgctgcgggccatgatgaagaaggccgagctggagatcagcggcaaggtgatggagaccatgaagaggctggaggaccctgtgcagaggcagagggtgctggtggagcaggagcggcagaagtacctgcacgaggaggagaagatcgtgaagaagctgtgtgagctggaggactttgtggaggacctgaagaaggacagcacagctgccagccggctggtgaccctgaaggatgtggaggatggagccttcctgctgcggcaggtgggggaggccgtggccaccctgaagggggagttccccaccctgcagaacaagatgagggccatcctgagaattgaggtggaggccgtgcgcttcctgaaggaggagccccacaagctggacagcctgctgaagagggtgcgctccatgacagatgtgctgaccatgctgcggcggcacgtgacagatggcctgctgaagggcacagatgctgcccaggccgcccagtacatggccatggagaaggccacagctgctgaggtgctgaagagccaggaggaggccgcccacaccagcggccagcccttccacagcactggagcccctggagatgccaagtctgaggtggtgcccctgagcggcatgatggtgagacatgcccagagcagccctgtggtgatccagcccagccagcacagcgtggccctgctgaacccagcccagaacctgccccacgtggccagcagccctgctgtgccccaggaggccaccagcaccctgcagatgagccaggccccccagagcccccagatccccatgaatggaagtgccatgcagagcctcttcatcgaggagatccacagcgtgtctgccaagaacagagctgtgtccattgagaaggccgagaagaagtgggaggagaagaggcagaacctggaccactacaacgggaaggagtttgagaagctgctggaggaggcccaggccaacatcatgaagagcatccccaacctggagatgcccccagccaccggccccctgcccagaggagatgcccctgtggacaaggtggagctgtctgaggacagccccaacagcgagcaggacctggagaagctgggcggcaagagccccccacctcctcctcctcctccaagaagaagctacctgcccggcagcggcctgaccaccaccaggtctggagatgtggtgtacacaggcaggaaagaaaacatcacagccaaggccagcagtgaagatgctggccccagcccccagacccgggccaccaagtacccagctgaggagcccgccagcgcctggacccccagccccccacctgtgaccaccagcagcagcaaggatgaggaggaggaggaggaggagggggacaagatcatggccgagctgcaggccttccagaagtgcagcttcatggatgtgaacagcaacagccacgccgagcccagcagagctgacagccacgtgaaggacaccaggtctggggccaccgtgccccccaaggagaagaagaacctggagttcttccatgaagatgtgaggaagagtgatgtggagtatgaaaatggcccccagatggagttccagaaggtgaccactggagctgtgcggcccagcgacccccccaagtgggagcggggcatggagaacagcatcagtgatgccagcaggaccagcgagtacaagacagagatcatcatgaaggaaaattccatcagcaacatgagcctgctgcgggacagcaggaactacagccaggagaccgtgcccaaggccagctttggcttcagcggcatcagccccctggaggatgagatcaacaagggcagcaagatcagcggcctgcagtacagcatcccagacacagagaaccagaccctgaactacggcaagaccaaggagatggagaagcagaacacagacaagtgccacgtgagcagccacacccggctgacagagagctctgtgcatgacttcaagacagaggaccaggaggtgatcaccacagactttggccaggtggtgctgcggcccaaggaggcccggcatgccaacgtgaaccccaatgaagatggagagagcagcagcagcagccccacagaggagaatgctgccacagacaacatcgccttcatgatcacagagaccaccgtgcaggtgctgagcagtggagaggtgcatgacatcgtgtcccagaagggggaggacatccagacagtgaacattgatgccaggaaggagatgaccccccggcaggagggcacagacaatgaagatcctgtggtgtgcctggacaagaagcctgtgatcatcatctttgatgagcccatggacatccgcagcgcctacaagaggctgagcaccatctttgaggagtgtgatgaggagctggagaggatgatgatggaggagaagattgaggaggaggaggaggaggagaatggagacagcgtggtgcagaacaacaacaccagccagatgagccacaagaaggtggcccctggcaacctgaggacaggccagcaggtggagaccaagagccagccccacagcctggccacagagaccagaaatcctgggggccaggagatgaacagaacagagctgaacaagttcagccacgtggacagccccaacagtgaatgtaaaggagaagatgccacagatgaccagtttgagagccccaagaagaagttcaagttcaagttccccaagaagcagctggccgccctgacccaggccatcagaacaggcaccaagacaggcaagaagaccctgcaggtggtggtgtatgaggaggaggaggaggatggcaccctgaagcagcacaaggaggccaagagatttgaaattgcccggagccagcctgaggacaccccagaaaatacagtgcggcggcaggagcagcccagcattgagagcaccagccccatcagcaggacagatgagatcaggaagaacacctaccgcaccctggacagcctggagcagaccatcaagcagctggagaacaccatcagcgagatgagccccaaggccctggtggacaccagctgcagcagcaacagagattctgtggccagcagcagccacatcgcccaggaggccagcccccggcccctgctggtgcctgatgagggccccacagccctggagccccccaccagcatccccagcgccagcaggaagggcagcagcggggccccccagaccagcaggatgcctgtgcccatgtctgccaagaaccggcccggcaccctggacaagccaggcaagcagagcaagctgcaggacccccggcagtaccggcaggccaacggcagcgccaagaagagcggcggggacttcaagcccaccagccccagcctgcctgccagcaagatcccagccctgagccccagcagcggcaagagcagcagcctgcccagcagcagcggggacagcagcaacctgcccaaccccccagccaccaagcccagcatcgccagcaaccccctgagcccccagacaggccccccagcccacagcgccagcctcatccccagcgtgtccaatggcagcctgaagttccagagcctgacccacacaggcaagggccaccacctgtccttcagcccccagagccagaatggccgggcccccccacccctgtccttcagcagcagcccccccagccctgccagctctgtgtccctgaaccagggcgccaagggcaccaggaccatccacacccccagcctgaccagctacaaggcccagaatggcagcagcagcaaggccacccccagcacagccaaggagaccagctag

SEQ ID NO: 201837 - DNA, 5832 bp, Artificial Sequence
  derived and/or modified sequence
atggaggagaacgagagccagaagtgcgagccctgcctgccctactctgccgaccggcgccagatgcaggagcagggaaagggtaacctgcacgtaacatctccagaggatgccgaatgtcggcgtacgaaggagcgattgtccaatggcaatagtcgggggtccgtcagcaaatcttccaggaacataccgcggcgtcacaccctgggcggacccagatcctcaaaggagatcctgggcatgcagacatccgaaatggatcggaaacgggaagctttcctcgagcatctcaagcagaaatacccccatcatgcatctgccataatggggcatcaggagcgtctgagggatcagaccagatctccaaaattgagtcactcaccccaacccccttcactgggagaccccgtggaacacctgagtgaaacctcggccgactctctcgaggcaatgtcagagggagacgctcctactccatttagccggggctctagaacacgagcgagtctgccagtcgtgaggtccacaaatcagaccaaagagcgttcccttggtgttctctatctgcaatatggagacgagacaaagcagctgcgcatgccgaacgaaatcactagcgcagacactattagggctctgtttgtttcagccttcccccaacagctcacaatgaaaatgttggaaagcccttccgtcgctatttacatcaaggacgaatcacgaaacgtctattacgaacttaacgatgtcagaaatattcaggacaggtccttactgaaggtatataacaaagaccctgcacatgcgttcaaccacaccccaaagacaatgaatggggacatgagaatgcagcgagaacttgtttacgctagaggcgatggcccaggcgctccccggcctgggtcaactgcacatcccccacacgccattcccaactcaccaccgtcaacacctgtcccccactctatgcccccttcccctagccgtattccctacggaggtacacggtccatggtggttccagggaacgccactatcccgcgggaccggatcagcagcctccccgtatctcggcctatttcaccctcgccatcggctatcctcgagcgccgcgatgtcaaaccggatgaagacatgtctgggaaaaacatcgctatgtaccgaaatgagggattctacgcagatccatacctgtatcatgagggaaggatgagcattgcctcatctcacggcggacatcctctggacgtcccagaccacataatagcgtaccaccggacagctatacggagtgcctcggcatactgtaacccctctatgcaggcagagatgcacatggagcagtccctgtaccgacaaaaatccaggaagtatccagactctcacttgcccactttggggtcaaagacaccccccgccagccctcaccgtgtctccgacctgagaatgatagatatgcacgctcattacaacgcccatgggccgccacacactatgcagccagaccgggcctctcctagccgccaggcttttaaaaaagagccggggaccctcgtctacattgagaagccgagatccgcagctgggctctcctcactggtcgacttggggccaccgctgatggagaagcaggtattcgcgtattccaccgccaccatccccaaggatagggagactcgcgagcggatgcaggcgatggaaaagcagatagcgtctttaacaggactggtccaaagcgccctattcaagggccctattacttcttattcaaaagatgcatcatctgagaagatgatgaagaccacagcaaaccggaatcatacagattcagctggaaccccgcacgtcagcggaggtaaaatgctgtctgccctcgagagcaccgttccaccgagccagccccctcctgtgggcacctcagccatacacatgagtctgctggagatgcgtagaagtgttgcagagctgcgccttcaattgcaacagatgaggcagctgcagctccagaaccaggagcttcttcgagcaatgatgaagaaggccgagttggagatctctgggaaggtgatggaaacgatgaaacgtctggaggacccagtacaaagacaacgagtgctggtcgaacaggagaggcagaagtacctgcatgaagaagaaaagattgtcaagaagctctgtgaactcgaagatttcgtcgaagacctcaaaaaagatagcaccgctgcgagtcgcctggtcacactgaaggatgttgaggacggggctttcctgctgcgacaagtcggggaggcggtggccaccctgaagggggaattccctacactgcaaaataagatgagagccatcctgagaatcgaggttgaggccgtcagatttctgaaagaagagcctcacaagttagacagtctgctgaagcgcgtgcgttccatgactgacgtgttgaccatgctcagacgacatgttacagacggcctgttaaaaggcaccgacgccgcccaggccgcccagtacatggctatggaaaaggcaacggctgccgaagttctgaaaagccaggaagaggcagctcatacatccgggcaacctttccatagcactggggctccaggagatgctaaaagcgaggtagttccactatctggcatgatggtgaggcacgcccaaagctcaccggtggttatccagcccagccaacactcagtggccttgctgaacccagcccagaacctgccccacgttgcgtcatcaccggctgttcctcaagaagcgacgtcaacgttgcagatgtctcaggcccctcagagtcctcagattcccatgaacgggagcgccatgcagagcctgtttattgaggagattcacagtgtgtctgctaagaatagagcagtgtcaatcgaaaaagcggagaagaagtgggaggaaaaaagacagaatctcgaccactacaatggcaaagaattcgagaaactactcgaggaagcacaggcgaacatcatgaagagtatccccaacctcgagatgccaccggccacagggccattgccccgcggggacgctccagtggataaagttgaattgagcgaagattcgcccaactccgaacaggatttggagaagcttggcggcaaaagccctcctccacccccgccaccccctaggcgatcttatcttcccggctctggtctcaccactactcgctctggcgacgtggtgtacacaggccgcaaggaaaacatcacagcaaaagcctcctctgaggacgctgggccctctccacagacacgggctaccaaatatccggccgaggagccagctagcgcttggactccgtcgcccccccctgttaccacatcatcgtctaaggatgaggaggaagaggaggaagagggggataaaattatggctgagctgcaggcgttccagaaatgttccttcatggatgtgaattccaacagtcatgcagagcccagccgcgctgactcacatgtgaaagataccagatccggggccactgtacccccaaaagaaaagaagaatcttgaattctttcatgaagatgtgaggaaatccgatgtcgagtatgagaatgggccacagatggaattccagaaggtgaccactggagccgtgcgaccttctgatccacctaagtgggaacgtggcatggagaactcaatttctgacgcaagccgaacctcagagtataagaccgaaattatcatgaaagaaaattccatctcaaatatgtcacttctgcgagattccagaaattatagtcaggagacagtccccaaagcctcatttggattctcgggcatatctcctttagaggacgagataaacaagggctctaagatttctggtctccagtactccattcctgatacagaaaaccagacccttaactacgggaagacgaaggagatggagaaacagaacaccgacaagtgtcacgtctcttcccacacaaggttgactgaatccagtgtgcatgattttaagaccgaggaccaagaggtgataaccaccgactttgggcaggtggtgctgcggcccaaggaggcaaggcacgccaacgtgaacccaaacgaggatggcgagtccagctcctctagtccgactgaagaaaacgctgctacagacaacatagcctttatgattactgagacaaccgtgcaagttttgtcgtctggagaggtgcatgacatcgtttcccagaagggggaggacatacagacagtcaatatcgacgcgcgcaaggagatgacccctcgccaagagggaacagacaacgaagaccccgtcgtgtgcctggataaaaaacctgtaattattattttcgacgaacccatggacattagaagcgcctacaaaagactgtccacgatcttcgaagaatgtgacgaggaattagagcggatgatgatggaggagaaaatcgaagaggaagaagaagaggagaatggcgattccgtcgtccagaacaacaacacctcacagatgtcccacaaaaaggtggcccccggaaatctcaggacggggcagcaggtggaaacgaaatcccagcctcacagcctagctactgagacacgaaatcccggcggtcaggagatgaacagaactgagctcaacaaatttagccatgtggactctccgaacagcgagtgcaaaggagaggatgccacagacgaccagttcgaatctcctaaaaagaagtttaaatttaaatttcctaaaaagcagctggccgcccttacccaggccataagaactggcaccaagacaggcaagaaaaccttgcaagtggttgtgtatgaagaggaagaagaagacggcacgctgaagcagcacaaggaggctaagcgatttgaaatagcccgctcccagcctgaagatacccccgagaacacagtgcgacgccaggagcagccgtcaattgaatctacgtctcccataagtcgcaccgacgagatccgtaagaatacgtacagaacactcgatagccttgaacagactatcaagcagctggaaaacacaatttctgagatgagtccaaaagccctcgtggacactagttgtagctctaaccgggacagcgttgcctcttcatcacatatagctcaagaggcttctcccagacccctcctggtgcccgacgaaggccccacagcactcgaaccacccactagcattccctctgcatcccgcaaaggctcctctggtgcccctcagacaagtagaatgcctgtgcccatgagtgccaaaaatcgccctggcacgctcgataaacctgggaaacagtcaaagctacaggatcctcgacagtatcgacaagcaaacggcagcgccaagaagtcagggggggacttcaagcccacgtcaccctctttgcctgctagtaaaatccccgctcttagcccctcctccgggaagtcctcctcactgccatcttccagtggggacagctccaacctgccgaaccctcccgccactaaaccgtccatcgcctctaatcccctgagcccccagaccggtccccccgctcattcggcaagcctgatccctagtgttagtaacggtagcctgaagtttcagtccttaacccatactgggaaaggtcatcacctctcgttttcaccacaatcgcagaacggccgggcgcccccgcctctaagttttagctctagcccacccagcccagcctctagtgtatctctgaaccagggcgctaaggggactcggacaattcacactccaagtttgacctcctataaagcacaaaatggctcttcctcaaaagcaaccccgagtacagctaaagagaccagttag

SEQ ID NO: 201838 - DNA, 5831 bp, Artificial Sequence
  derived and/or modified sequence
atggaggaaaacgagtcacaaaagtgtgagccatgtctcccctactccgcagaccgcaggcagatgcaggagcagggaaaagggaacttacacgtcacgagccccgaggatgcggagtgtcgccgtaccaaggagcgattgtcgaacggcaattcacgaggctctgtgagcaagtccagtcggaacattccgaggcggcatacccttggcggtcccaggagttccaaagagattcttggcatgcagacttcagagatggatcggaagagggaggctttcctcgaacatctaaaacagaagtaccctcatcatgcgtctgctataatgggccatcaggagcgcctgagagaccagactaggtctcctaaactgtctcactcgccgcagccaccctccctgggcgatcccgtggagcatctatcggaaaccagcgctgactctttagaggcgatgtcagaaggcgatgctcctacaccctttagccggggaagtagaacccgggcttccctgccagtggtgcggtcaacaaatcagacgaaagaacggtctttgggtgtattgtatttgcagtatggagacgaaacaaagcagcttcgaatgcccaacgaaattacatctgccgacaccattagagccctgtttgtgtccgcctttccccagcagttgacaatgaaaatgctggagagccccagcgttgctatttatatcaaagatgagagtcgcaatgtctactacgaattaaacgacgtgaggaacattcaagatcggtcactgcttaaggtgtataacaaagaccccgcacatgcctttaaccacactcccaagacgatgaacggggacatgcggatgcagcgtgaacttgtgtacgcccgaggtgacggacccggtgccccaaggcctggttcgaccgcgcacccaccacacgcaatccctaattccccgccatccacacccgtgccacactccatgccacctagtcccagtcgcattccttatggtggaacccgcagcatggtggttccgggaaacgctacaatccctcgagatcgcatctcatctctacctgtaagcagaccaattagtccgagtccgagcgccatcctcgagcggagggacgtgaagccagacgaagatatgagcggcaagaatattgccatgtatagaaatgaagggttctatgccgatccttacctttatcacgaagggagaatgtcgatcgcctcctcccatggcggacatcctctggacgtccccgatcacattatcgcttatcataggacggccattaggtccgcctcggcatattgcaatccatctatgcaggctgagatgcatatggaacagtccctctacagacaaaaatcccgcaagtatccagattcccacctgcccactctgggatcaaagactccgcctgccagcccccaccgagtctctgacttaagaatgatagacatgcatgctcattacaacgcacatggcccaccgcataccatgcaacctgatagagcatcgcccagccgacaagcatttaagaaagaaccaggtacccttgtctatattgagaagccacgctccgcagcaggactgtccagtctcgtggatctcggtcctcctttgatggagaaacaggtgtttgcatactcaacggcaaccatccccaaagatcgcgaaaccagagagagaatgcaggccatggagaaacagattgcttctctgactgggcttgtccagagtgccctatttaagggccctatcacaagctactcaaaagatgcctctagtgaaaaaatgatgaagaccacagccaatcggaaccacacagatagcgccggaacaccccacgtttctggaggcaagatgctgtcagccctggagtctacagtccctccatcccagccacccccagtgggaacttcagcaatccatatgtcccttctcgagatgcgacgatctgtagctgagctgcgcctgcagttgcagcagatgcgccagctgcagttgcagaatcaggaacttctgagagctatgatgaagaaggcagaattagagatttcagggaaagttatggagaccatgaaacgccttgaggacccagtacaacgacagagagtgcttgtggagcaggaacgacagaagtatttgcacgaagaagagaagatagtgaagaaactctgtgagctagaggattttgttgaggatcttaaaaaggactcaactgcagcatcacgactcgttacattgaaagatgtagaagacggggctttcctgctgaggcaggttggcgaagccgtggctacgctcaaaggagagtttccaactctccagaataagatgcgggctatcttacgcatagaggtcgaagctgttcgcttcttaaaagaagaaccacataagctcgattccctactgaagcgtgtccgcagcatgaccgatgtgctcactatgttaaggagacatgtgactgatggtttactgaagggaaccgacgccgctcaggcagcccagtacatggctatggagaaagccacagcagcagaagttctgaagagccaggaggaggcagcacacacctctggccagccgtttcactccaccggagcgcctggcgatgcaaaatcagaggtagtgcctctttccgggatgatggtgagacatgctcagagcagcccggtggtaatacagccttcccagcactccgtagccctgcttaaccctgctcaaaatctcccacatgtcgcttcatcccccgctgttccacaggaggctacttcgacgctccagatgagtcaagcgcctcaaagccctcagatccccatgaacggctccgctatgcagtccctctttattgaggaaatccattcagtttccgcaaagaaccgagccgtctctatcgaaaaagccgagaaaaaatgggaagagaagagacagaacctggaccattacaatgggaaggaattcgagaaactgctggaagaggctcaggccaacattatgaagtcaattcccaacctggagatgccccctgcgaccggccctttgcctcgaggtgacgcaccagttgataaggtagagctgtctgaggattcccccaattctgagcaagacctagaaaagctgggcggaaaaagtccaccaccacctccacctccaccacggagatcctatctgcccggttcgggacttactaccacgcgctctggtgacgtggtgtacacaggcagaaaagagaatattaccgccaaagctagcagtgaggatgcgggaccgagccctcaaacacgagctacaaagtaccctgccgaggaacctgcctctgcctggactccttcacctcccccagtgactacatctagcagcaaggatgaagaggaggaagaagaagagggtgacaaaattatggccgagctccaggcctttcagaagtgttcttttatggacgtgaacagtaattcccatgctgagccttcacgtgctgatagccacgtgaaagatacacgctcaggggcaactgtgccaccgaaagagaagaaaaacttagagttttttcatgaagacgtgcgcaagagcgacgtggagtatgagaatggtccgcagatggaattccaaaaggtcacgacaggcgctgtccgtcctagtgatccgcctaagtgggaaagaggtatggagaattcaatttcagacgcctcccgcactagcgagtataagaccgaaataatcatgaaggaaaatagcatcagtaatatgtctctgttaagggactccagaaattactcacaggaaaccgtacccaaggcaagctttggattctcgggcattagccctctcgaggacgagattaataagggttcaaaaatctccggactacagtatagtatacccgatacagaaaaccagaccctcaattatggcaaaaccaaagagatggaaaaacagaatacagataaatgtcacgttagtagccatacacgcctcaccgaatcttcagtgcatgacttcaagacggaggaccaggaagtcattactacggattttggtcaagtggtcctcaggcctaaggaggcccgtcacgcgaatgtgaatcctaacgaagacggagagagctcaagctccagccccacagaagagaatgccgcaaccgataatatcgcctttatgatcaccgagacaactgtgcaggtcttatcctctggagaggtgcatgacatcgtttcccagaagggcgaggacattcagactgtgaatattgatgctcgaaaagagatgactcccaggcaagagggaaccgataacgaagaccctgtcgtgtgtctagataagaaaccggtgatcattatattcgacgagccgatggatattcgcagcgcatacaagagactgtctactatttttgaggagtgcgacgaggaactcgagcgcatgatgatggaggaaaagatcgaagaggaggaagaagaggaaaatggggacagtgtggttcagaacaacaacacatctcagatgtctcacaaaaaagtcgctcccggtaatttaaggaccggccagcaggttgagactaagagccagccacactccctggcgaccgaaaccagaaatcctggtgggcaggagatgaatcggacggagctgaataaattctcccatgttgattctccaaactcagagtgcaagggggaggacgctaccgacgatcaatttgaatcaccaaagaaaaagtttaagttcaagttccctaagaaacaactcgccgcattgacccaggccatacgcacagggaccaaaacagggaagaagaccctccaggtcgtagtctacgaagaagaggaagaggacggaacattaaagcagcacaaggaagcaaagagatttgagatcgcacgttcccagcccgaggacacccccgaaaacaccgtgcggaggcaggaacaaccttccatcgaatctactagtcctatctctaggacagatgagattaggaaaaatacctatcgcactctggatagcctggaacaaacgatcaaacagttggagaataccatctccgagatgagtcctaaggcgctagtggatacaagctgctcatcaaacagagattctgtggcttcatcttcccacattgcccaagaggccagtcctaggccattgcttgtgccggatgagggccctacggctctggaacctccaacttctatccccagcgccagccgcaagggctcctcaggcgctccacagacatcccgaatgcccgtccccatgagtgcgaagaaccggccaggtaccctcgacaagcctggtaagcaatcaaaactgcaggacccacggcagtacaggcaagccaatggctcggcgaaaaagagcgggggagacttcaagcccacctccccctccttgccagctagcaagatcccagccctgagcccaagctctggaaagtcctctagtcttcctagtagctccggcgatagtagcaacttgccaaatcccccagcaaccaagccgagtattgcttccaatcctctcagcccccagaccggaccacctgctcacagtgcctcccttatacctagcgtcagtaatggctcgctgaaatttcaaagcctcacgcatactggtaaaggccatcaccttagtttctctcctcagtcccagaatggacgcgcacctccaccactgtctttcagttcaagcccaccctcccccgctagcagcgtatcactcaaccagggggctaaggggactaggacgatccatactcctagcctgactagctacaaagctcagaacgggagctcttccaaagctaccccttccactgctaaggaaacatccta

SEQ ID NO: 201839 - protein, 181 aa, Artificial Sequence
  derived and/or modified sequence
MSGIGNKRAAGEPGTSMPPEKKAAVEDSGTTVETIKLGGVSSTEELDIRTLQTKNRKLAEMLDQRQAIEDELREHIEKLERRQATDDASLLIVNRYWSQFDENIRIILKRYDLEQGLGDLLTERKALVVPEPEPDSDSNQERKDDRERGEGQEPAFSFLATLASSSSEEMESQLQERVESS

SEQ ID NO: 201840 - protein, 975 aa, Artificial Sequence
  derived and/or modified sequence
MSGIGNKRAAGEPGTSMPPEKKAAVEDSGTTVETIKLGGVSSTEELDIRTLQTKNRKLAEMLDQRQAIEDELREHIEKLERRQATDDASLLIVNRYWSQFDENIRIILKRYDLEQGLGDLLTERKALVVPEPEPDSDSNQERKDDRERGEGQEPAFSFLATLASSSSEEMESQLQERVESSRRAVSQIVTVYDKLQEKVELLSRKLNSGDNLIVEEAVQELNSFLAQENMRLQELTDLLQEKHRTMSQEFSKLQSKVETAESRVSVLESMIDDLQWDIDKIRKREQRLNRHLAEVLERVNSKGYKVYGAGSSLYGGTITINARKFEEMNAELEENKELAQNRLCELEKLRQDFEEVTTQNEKLKVELRSAVEQVVKETPEYRCMQSQFSVLYNESLQLKAHLDEARTLLHGTRGTHQHQVELIERDEVSLHKKLRTEVIQLEDTLAQVRKEYEMLRIEFEQTLAANEQAGPINREMRHLISSLQNHNHQLKGEVLRYKRKLREAQSDLNKTRLRSGSALLQSQSSTEDPKDEPAELKPDSEDLSSQSSASKASQEDANEIKSKRDEEERERERREKEREREREREKEKEREREKQKLKESEKERDSAKDKEKGKHDDGRKKEAEIIKQLKIELKKAQESQKEMKLLLDMYRSAPKEQRDKVQLMAAEKKSKAELEDLRQRLKDLEDKEKKENKKMADEDALRKIRAVEEQIEYLQKKLAMAKQEEEALLSEMDVTGQAFEDMQEQNIRLMQQLREKDDANFKLMSERIKSNQIHKLLKEEKEELADQVLTLKTQVDAQLQVVRKLEEKEHLLQSNIGTGEKELGLRTQALEMNKRKAMEAAQLADDLKAQLELAQKKLHDFQDEIVENSVTKEKDMFNFKRAQEDISRLRRKLETTKKPDNVPKCDEILMEEIKDYKARLTCPCCNMRKKDAVLTKCFHVFCFECVKTRYDTRQRKCPKCNAAFGANDFHRIYIG

SEQ ID NO: 201841 - protein, 145 aa, Artificial Sequence
  derived and/or modified sequence
MSGIGNKRAAGEPGTSMPPEKKAAVEDSGTTVETIKLGGVSSTEELDIRTLQTKNRKLAEMLDQRQAIEDELREHIEKLERRQATDDASLLIVNRYWSQFDENIRIILKRYDLEQGLGDLLTERKALVVPEPEPDSDSNQERKDD

SEQ ID NO: 201842 - protein, 99 aa, Artificial Sequence
  derived and/or modified sequence
MSGIGNKRAAGEPGTSMPPEKKAAVEDSGTTVETIKLGGVSSTEELDIRTLQTKNRKLAEMLDQRQAIEDELREHIEKLERRQATDDASLLIVNRYWSQ

SEQ ID NO: 201843 - DNA, 546 bp, Artificial Sequence
  derived and/or modified sequence
atgtccggcatcgggaacaaacgcgcagcgggggagccgggaactagcatgcctcccgagaagaaggcagcagtggaagactcaggtaccacagtggaaaccatcaagcttggaggcgtgtcttctaccgaggagctggacattaggactctccagaccaaaaaccgcaaactcgcagagatgttagatcagagacaagcaatagaagatgaactcagagagcacatcgagaaattggaaaggagacaggcgactgacgacgcatccctgctgattgtgaaccgttactggagtcagttcgacgaaaatatcagaattattcttaagcggtatgacttagaacaggggctgggcgaccttctgacggagcgtaaagcactggtcgtgccagagccagaacctgacagcgactctaatcaagagcgaaaggatgacagggagcgcggcgaggggcaagagcccgctttcagttttttggccacactagccagttcttccagtgaggaaatggagtctcagctgcaggagcgggttgagagctcctag

SEQ ID NO: 201844 - DNA, 2928 bp, Artificial Sequence
  derived and/or modified sequence
atgagtgggatagggaacaaacgcgctgctggagaaccaggtaccagtatgccaccagagaagaaagcagcggtggaggattccggaacgacagtggaaaccatcaaactgggaggcgtaagcagcacagaagagctcgatatcaggacactgcagactaagaaccggaaattagctgagatgctcgaccaacggcaggcaatcgaggatgagttgagggaacatatcgagaagctggagcgccgacaggccactgatgatgccagcctccttatcgttaaccggtactggtcccagttcgacgaaaatatcagaatcatcctgaaaagatacgacctagagcaggggctgggagatctgctgacagaacggaaggccctggtagttcccgaacctgagccagattcagattccaaccaggaaaggaaagacgatagggaaagaggggaaggacaagagcccgccttttcattcctcgccacccttgccagcagctcctcagaagagatggagtctcagctgcaggagagagtcgaatccagcaggagggccgtcagccagatcgtcacagtctacgacaagctacaagagaaagttgagttactgtcccggaagctcaactccggtgataacctaattgtggaagaagccgtgcaagaactgaattccttccttgcccaggaaaatatgagactccaagaactcacagacctgctgcaagaaaagcatcggacgatgtcacaagaattttcaaagctgcagagtaaagtcgagaccgccgagtcacgggtgagtgtactggagtcgatgattgacgatctgcaatgggacatcgataagatccgtaaacgcgaacagcgccttaacaggcacctcgcagaggtgctggagagggtgaattcgaaaggatacaaagtgtatggtgccgggagttccctctatggtggaaccataacaatcaatgctcgaaagtttgaagaaatgaatgcagagctggaggagaataaagaattggcccagaacagactgtgtgagctagaaaaactgcgacaggactttgaggaagtaactactcagaacgagaaattaaaggtcgaacttagatctgccgtggagcaggtggtcaaagaaacacccgagtatcgttgtatgcagagccaattctctgtcttgtataacgagtccctccagttaaaggctcacctagacgaagcgcggaccttgctccacgggaccagagggacgcatcagcaccaggttgagctgattgagcgggacgaagtcagcctgcacaaaaagcttcgaactgaagtcatccagctagaggacacacttgcccaggtgcggaaggaatacgagatgctcagaatcgaattcgagcagactctggcagccaatgagcaagcgggccctattaaccgggaaatgcgacacctgatttcttccctgcagaatcataatcatcagctcaaaggggaagtgctgagatataagaggaagttgagagaagcacagtccgacctgaacaagacccggctgcgttcgggcagtgccctgctgcaaagccagagctcaacagaggacccaaaggacgaacccgctgagctgaaaccagactctgaagacctgagctcacagtctagcgcaagcaaggcatctcaagaagacgccaacgaaattaagagcaagagggacgaagaggagcgggaaagggagagacgcgaaaaggaaagagaacgcgagcgggagagggagaaggaaaaggagcgtgagcgtgagaagcagaagctgaaggagagtgagaaagagagggactccgccaaggataaggagaaagggaagcatgacgacggtagaaaaaaggaggcagagatcattaaacagctgaagatcgagctgaagaaggcacaagaatcccaaaaggaaatgaagctactgctggatatgtatcggtcagctcctaaggaacagcgcgacaaagtacagctgatggctgctgagaaaaaatccaaagcagagctagaggacttacggcaacgtctcaaagatttagaggacaaggagaagaaggaaaataaaaagatggcagatgaggatgccttacggaagatccgcgcagtcgaggagcagatagagtatttacagaagaagttagcaatggctaagcaagaggaggaagccctgctaagcgaaatggacgttactggccaggccttcgaagatatgcaggaacaaaatattcggctgatgcaacagctccgggagaaggacgatgctaatttcaagttgatgagtgagcgcattaagagcaatcagattcacaagctgctcaaggaggaaaaggaagaattggctgatcaggtcttgacactgaaaacacaagtggacgcgcagctccaggtagtccggaagttagaagagaaggagcacctgttgcagagcaatatcggaactggggagaaggagctaggacttaggacacaggccctcgagatgaataaacgaaaagccatggaagctgcacagttggctgatgatctgaaagcccagctggagttggcgcaaaaaaagctccacgacttccaggatgagattgtggaaaatagtgttacaaaggagaaggacatgttcaactttaaacgggcccaagaggacatctctaggctgcggcgtaaactcgaaacgacaaagaagcccgataatgtgccaaaatgtgacgagattctgatggaagaaatcaaagattacaaggccaggctcacctgcccttgctgtaatatgcggaagaaagacgccgttctaacaaagtgctttcatgtgttttgcttcgagtgtgtgaaaacacgctacgatacgagacagcggaagtgccctaaatgcaacgccgcattcggtgctaacgactttcatcgaatttatatcggttag

SEQ ID NO: 201845 - DNA, 438 bp, Artificial Sequence
  derived and/or modified sequence
atgtcggggattggcaacaaaagagccgccggggagcccggaacatcaatgccaccggagaagaaggccgccgtggaagactccggaaccaccgtagaaaccatcaaactgggcggggtgagctcaacagaagagctggatatccgtacattacagaccaagaaccggaagctggccgagatgctagatcagcgccaggcaattgaagacgagttgcgcgagcacatcgagaagctcgagagacgccaggccaccgatgatgccagcctgctgatcgtgaatcggtattggagccagttcgacgagaacattagaattatcctgaaacgctatgacctcgagcagggcttgggtgatcttctgacggagagaaaagcccttgttgtcccagagccagaaccggatagcgactctaaccaggaaagaaaagacgactag

SEQ ID NO: 201846 - DNA, 300 bp, Artificial Sequence
  derived and/or modified sequence
atgagcggaatcggaaataagagggctgccggcgaacccggcacgtctatgccccctgaaaaaaaagcggcagtggaagattcaggtacaacggtggagaccatcaagctcggtggtgtgagctccactgaagagctggacatcagaacactgcagactaagaaccgaaagttagccgagatgctagatcagaggcaggctatcgaggatgagctgcgagagcacatagagaaactggaaaggcgacaggcaactgacgatgccagcctcctcatcgtcaaccggtattggtctcagtag

SEQ ID NO: 201847 - DNA, 546 bp, Artificial Sequence
  derived and/or modified sequence
atgagcggcatcggcaacaagagagctgctggggagcccggcacctccatgcctcctgagaagaaggctgctgtggaggacagcggcaccaccgtggagaccatcaagctgggcggcgtgagcagcacagaggagctggacatccgcaccctgcagaccaagaacaggaagctggccgagatgctggaccagaggcaggccattgaagatgagctgcgggagcacatcgagaagctggagcggcggcaggccacagatgatgccagcctgctgattgtgaaccgctactggagccagtttgatgagaacatccgcatcatcctgaagagatatgacctggagcagggcctgggggacctgctgacagagaggaaggccctggtggtgcctgagcctgagccagacagcgacagcaaccaggagaggaaggatgaccgggagcggggggagggccaggagcccgccttctccttcctggccaccctggccagcagcagcagcgaggagatggagagccagctgcaggagcgggtggagagcagctag

SEQ ID NO: 201848 - DNA, 2928 bp, Artificial Sequence
  derived and/or modified sequence
atgagcggcatcggcaacaagagagctgctggggagcccggcacctccatgcctcctgagaagaaggctgctgtggaggacagcggcaccaccgtggagaccatcaagctgggcggcgtgagcagcacagaggagctggacatccgcaccctgcagaccaagaacaggaagctggccgagatgctggaccagaggcaggccattgaagatgagctgcgggagcacatcgagaagctggagcggcggcaggccacagatgatgccagcctgctgattgtgaaccgctactggagccagtttgatgagaacatccgcatcatcctgaagagatatgacctggagcagggcctgggggacctgctgacagagaggaaggccctggtggtgcctgagcctgagccagacagcgacagcaaccaggagaggaaggatgaccgggagcggggggagggccaggagcccgccttctccttcctggccaccctggccagcagcagcagcgaggagatggagagccagctgcaggagcgggtggagagcagccggcgggctgtgtcccagatcgtgacagtgtatgacaagctgcaggagaaggtggagctgctgagcaggaagctgaacagcggggacaacctgattgtggaggaggccgtgcaggagctgaacagcttcctggcccaggagaacatgaggctgcaggagctgacagacctgctgcaggagaagcacaggaccatgagccaggagttcagcaagctgcagagcaaggtggagacagctgagagccgggtgtctgtgctggagagcatgattgatgacctgcagtgggacatcgacaagatcaggaagcgggagcagaggctgaacagacacctggccgaggtgctggagcgggtgaacagcaagggctacaaggtgtatggagctggcagcagcctgtatggaggcaccatcaccatcaatgccaggaagtttgaggagatgaatgctgagctggaggagaacaaggagctggcccagaaccggctgtgtgagctggagaagctgcggcaggactttgaggaggtgaccacccagaatgagaagctgaaggtggagctgcggtctgctgtggagcaggtggtgaaggagaccccagagtaccgctgcatgcagagccagttctctgtgctgtacaatgaaagcctgcagctgaaggcccacctggatgaggcccggaccctgctgcacggcacccggggcacccaccagcaccaggtggagctgattgaaagagatgaggtgtccctgcacaagaagctgaggacagaggtgatccagctggaggacaccctggcccaggtgaggaaggagtatgagatgctgagaattgaatttgagcagaccctggccgccaatgagcaggccggccccatcaaccgggagatgaggcacctgatcagcagcctgcagaaccacaaccaccagctgaagggggaggtgctgcgctacaagaggaagctgcgggaggcccagagcgacctgaacaagacccggctgcggagcggcagcgccctgctgcagagccagagcagcacagaggaccccaaggatgagcctgctgagctgaagccagacagcgaggacctgagcagccagagcagcgccagcaaggccagccaggaggatgccaatgagatcaagagcaagagagatgaggaggagcgggagcgggagcggcgggagaaggagcgggagcgggagcgggagcgggagaaggagaaggagcgggagcgggagaagcagaagctgaaggagagcgagaaggagcgggacagcgccaaggacaaggagaagggcaagcatgatgatggcaggaagaaggaggccgagatcatcaagcagctgaagattgagctgaagaaggcccaggagagccagaaggagatgaagctgctgctggacatgtaccgcagcgcccccaaggagcagagggacaaggtgcagctgatggctgctgagaagaagagcaaggccgagctggaggacctgcggcagaggctgaaggacctggaggacaaggagaagaaggagaacaagaagatggctgatgaagatgccctgaggaagatccgggctgtggaggagcagatcgagtacctgcagaagaagctggccatggccaagcaggaggaggaggccctgctgtctgagatggatgtgacaggccaggcctttgaggacatgcaggagcagaacatccggctgatgcagcagctgcgggagaaggatgatgccaacttcaagctgatgtctgagcgcatcaagagcaaccagatccacaagctgctgaaggaggagaaggaggagctggccgaccaggtgctgaccctgaagacccaggtggatgcccagctgcaggtggtgaggaagctggaggagaaggagcacctgctgcagagcaacatcggcaccggggagaaggagctgggcctgcggacccaggccctggagatgaacaagaggaaggccatggaggccgcccagctggctgatgacctgaaggcccagctggagctggcccagaagaagctgcatgacttccaggatgaaattgtggagaacagcgtgaccaaggagaaggacatgttcaacttcaagagggcccaggaggacatcagccggctgcggaggaagctggagaccaccaagaagccagacaacgtgcccaagtgtgatgagatcctgatggaggagatcaaggactacaaggcccggctgacctgcccctgctgcaacatgaggaagaaggatgctgtgctgaccaagtgcttccacgtgttctgctttgaatgtgtgaagaccaggtatgacacccggcagaggaagtgccccaagtgcaatgctgccttcggggccaatgacttccaccgcatctacatcggctag

SEQ ID NO: 201849 - DNA, 438 bp, Artificial Sequence
  derived and/or modified sequence
atgagcggcatcggcaacaagagagctgctggggagcccggcacctccatgcctcctgagaagaaggctgctgtggaggacagcggcaccaccgtggagaccatcaagctgggcggcgtgagcagcacagaggagctggacatccgcaccctgcagaccaagaacaggaagctggccgagatgctggaccagaggcaggccattgaagatgagctgcgggagcacatcgagaagctggagcggcggcaggccacagatgatgccagcctgctgattgtgaaccgctactggagccagtttgatgagaacatccgcatcatcctgaagagatatgacctggagcagggcctgggggacctgctgacagagaggaaggccctggtggtgcctgagcctgagccagacagcgacagcaaccaggagaggaaggatgactag

SEQ ID NO: 201850 - DNA, 300 bp, Artificial Sequence
  derived and/or modified sequence
atgagcggcatcggcaacaagagagctgctggggagcccggcacctccatgcctcctgagaagaaggctgctgtggaggacagcggcaccaccgtggagaccatcaagctgggcggcgtgagcagcacagaggagctggacatccgcaccctgcagaccaagaacaggaagctggccgagatgctggaccagaggcaggccattgaagatgagctgcgggagcacatcgagaagctggagcggcggcaggccacagatgatgccagcctgctgattgtgaaccgctactggagccagtag

SEQ ID NO: 201851 - DNA, 596 bp, Artificial Sequence
  derived and/or modified sequence
agagctggaatctctgcacgggccttggaaaacgactgtcttcttctgccaaaatgtcaggaattggaaataaaagagcagctggagaacctggcacctccatgcctcctgagaagaaggcagctgttgaagattcagggaccacagtggaaacaattaagctaggaggtgtctcttcaacggaggaactagacattagaacactgcaaaccaaaaatcgcaagctggcagaaatgttggatcagcggcaggccattgaagatgaacttcgtgagcacattgaaaaactggaacgacgacaggccactgatgatgcctcactattgattgtcaaccgatactggagtcagtttgatgaaaacatccgtatcatccttaaacgttatgatctggagcagggcttgggagacctactcacagaacgaaaagcccttgttgtgcctgaaccagaaccagactctgatagcaatcaggagcgtaaagatgaccgagagagaggggaagggcaagagccagctttctctttccttgctactttggccagcagttccagtgaagagatggagtctcagctgcaggaacgtgtggagtcttcc

SEQ ID NO: 201852 - DNA, 3936 bp, Artificial Sequence
  derived and/or modified sequence
ggaagttctgccttgtctccgccgcgggtcaggggtgagagctggaatctctgcacgggccttggaaaacgactgtcttcttctgccaaaatgtcaggaattggaaataaaagagcagctggagaacctggcacctccatgcctcctgagaagaaggcagctgttgaagattcagggaccacagtggaaacaattaagctaggaggtgtctcttcaacggaggaactagacattagaacactgcaaaccaaaaatcgcaagctggcagaaatgttggatcagcggcaggccattgaagatgaacttcgtgagcacattgaaaaactggaacgacgacaggccactgatgatgcctcactattgattgtcaaccgatactggagtcagtttgatgaaaacatccgtatcatccttaaacgttatgatctggagcagggcttgggagacctactcacagaacgaaaagcccttgttgtgcctgaaccagaaccagactctgatagcaatcaggagcgtaaagatgaccgagagagaggggaagggcaagagccagctttctctttccttgctactttggccagcagttccagtgaagagatggagtctcagctgcaggaacgtgtggagtcttcccgccgagccgtgtcccagattgtgactgtttatgataaattgcaagaaaaagtggagctcttatcccggaagctaaacagtggagataatctgatagtggaggaagcagtgcaggagctgaactctttcctcgcacaggagaatatgaggctacaggaattgacagatcttcttcaggaaaagcatcgcaccatgtctcaggagttctccaagttgcagagtaaagtggagacagccgaatcacgagtgtctgtcctggagtccatgattgatgacctgcagtgggatattgacaaaattcgaaagagggaacagcgactcaaccgacacttagcagaagtcctagaacgggtgaattccaaaggttataaggtgtatggagcggggagcagtctgtatggcggcacaatcactatcaatgctcggaagtttgaggaaatgaatgcagagcttgaggagaacaaagagttggctcagaaccgtctctgtgagctggagaaacttcggcaagactttgaggaggtcactacacaaaatgaaaagctgaaggtggaattgcggagtgcagtggagcaagtcgttaaggaaactccagaatatcgctgcatgcagtcacagttctccgtcttgtataatgagagcctacagttgaaagcacacttggatgaggctcggaccctgcttcatggcaccagaggaacccaccagcaccaggttgagcttattgagcgagatgaggttagtcttcataagaagctgaggactgaagtaattcagctagaagatacattggcccaggtccgcaaggagtatgaaatgctgaggatagaatttgagcagacccttgctgccaatgaacaagcaggccctataaacagggagatgcgccacctcatcagtagcctccagaatcacaatcaccagctgaaaggggaggtcctgagatataagcggaaattgagagaagcccagtctgacctgaacaagacacgcctgcgtagtggtagtgccctcctgcagtcccagtctagtactgaggacccgaaggatgagcctgcggagctaaaaccagattctgaggacttatcctcccagtcctcagcttcaaaggcatctcaggaggatgccaatgaaatcaagtctaaacgggatgaagaagaacgagaacgagaaaggagggagaaggagagggaacgagaaagagaacgggagaaggagaaggagagagaacgagagaagcagaagctaaaagagtcagaaaaagagagagattctgctaaggataaagagaaaggcaaacatgatgatggacggaaaaaggaagcagaaattatcaaacaattgaagattgaactcaagaaggcacaggagagccaaaaggagatgaaactattgctggatatgtaccgttctgccccaaaggaacagagagacaaagttcagctgatggcagctgagaagaagtctaaggcagagttggaagatctaaggcaaagactcaaggatctggaagataaagagaagaaagagaacaagaaaatggctgatgaggatgccttgaggaagatccgggcagtggaggagcagatagaatacctacagaagaagctagccatggccaagcaggaagaagaagcactcctctctgaaatggatgtcacaggccaggcctttgaagacatgcaggagcaaaatatccgtttgatgcagcaattgcgggagaaggatgatgcaaatttcaagctcatgtcagagcgtatcaagtccaatcagatccataagttgcttaaagaagagaaggaggagctggcagaccaggtgttgactctgaagactcaggttgatgcccagctacaggtagtaaggaaactggaagagaaggagcatctgttacagagcaacattggcacaggggagaaagagctgggtcttaggacccaagccttagagatgaataaacgcaaggcaatggaggcagcccagcttgcagatgacctcaaagcacaactggagttggctcagaagaagctacatgattttcaggatgagatcgtggagaacagtgttaccaaagaaaaggacatgttcaatttcaaacgagcccaggaggacatctctagacttcgcaggaagctggagaccacaaagaaaccagacaatgtacccaagtgtgatgagattctgatggaagagattaaggattacaaggcacgcttgacctgtccgtgctgtaacatgcgtaaaaaggatgctgttcttactaagtgttttcatgtcttctgctttgagtgtgtgaagacacgctatgacacccgccagcgcaaatgtcccaagtgtaatgctgcttttggtgccaatgattttcatcgcatctacattggttgatctaagtcaagagaagaagaggagctggctagtcaggaacttattcattaaccaccaaacctctacctcttctctccttgactgtcacctgtaggacagtttatcagtcaactacctttcctccagactttacttccaggctctcctcttcagtagctggatgactttagcagaaaggactggtaaatacaagccttgggtttcagaatgaattagaaacaaataactcttactgtcttccctcccagctttgtttattttgtgcttttagacttttcagtgttttctttttccagcccactgtataaacttggattgtccattcctcctgaagaaatcaagttggtatttttgatgtggaaaagggaacaaaagtggaaacatggctacttttggggagtgatattttaaaaaataagttgtctatgggcacaaagttttcttcatttgtgtagcaaacttcttgtgaatgtggattacaaaatggtataattgtgctactctcccctgggtggtttgcagccctaatgaaattatgtctaggatgattcagtctatttcccatttactagcagagtaacttgttaagatcagctggctttcttgttaaagttatttaagttttgaatgctctactacttcaagtctttaaatttcttgagactagaataattttaaataatatgaccctttgtcttctaatgaaataaagattgaagaggttgagtcaggactgagctggtgaagaaatcttgtgggtattctggaaatttgatacggagagaacttggtgagctatgaattactctcagtctcctttttacagggttgttgtgatccctcttttccagaaaattctgtggaatgtttctgtaggactttgttctccacaagcttgaattaaagcaggattcagtt

SEQ ID NO: 201853 - DNA, 784 bp, Artificial Sequence
  derived and/or modified sequence
gcttagggcccaacaggactgtgccaggcctcaggagtctccaccctctccagttttggggccgtcagtctcctgggcctgcaattatccacgctgaggctgaggtctttggcttttagcgagttggattgcagccttgttctgcttctgtgtcttctctctccaggcgaggtcctactgaggttgttgccagcgatagtcctctcctggagcttgaattggaagcagagtagtcttgttagtctcggtgatggctgcgttgtttcctgaagtagccaaagtgctttagcatccattccgcctcctttgagcaccctgggaggaaaacgactgtcttcttctgccaaaatgtcaggaattggaaataaaagagcagctggagaacctggcacctccatgcctcctgagaagaaggcagctgttgaagattcagggaccacagtggaaacaattaagctaggaggtgtctcttcaacggaggaactagacattagaacactgcaaaccaaaaatcgcaagctggcagaaatgttggatcagcggcaggccattgaagatgaacttcgtgagcacattgaaaaactggaacgacgacaggccactgatgatgcctcactattgattgtcaaccgatactggagtcagtttgatgaaaacatccgtatcatccttaaacgttatgatctggagcagggcttgggagacctactcacagaacgaaaagcccttgttgtgcctgaaccagaaccagactctgatagcaatcaggagcgtaaagatgacc

SEQ ID NO: 201854 - DNA, 387 bp, Artificial Sequence
  derived and/or modified sequence
acgggccttggtgagtaactgctgcgagttctgttcccgcgcggcgccagttcaaagaacttaggaaaacgactgtcttcttctgccaaaatgtcaggaattggaaataaaagagcagctggagaacctggcacctccatgcctcctgagaagaaggcagctgttgaagattcagggaccacagtggaaacaattaagctaggaggtgtctcttcaacggaggaactagacattagaacactgcaaaccaaaaatcgcaagctggcagaaatgttggatcagcggcaggccattgaagatgaacttcgtgagcacattgaaaaactggaacgacgacaggccactgatgatgcctcactattgattgtcaaccgatactggagtcag

SEQ ID NO: 201855 - DNA, 546 bp, Artificial Sequence
  derived and/or modified sequence
atgagcggcatcggcaacaagcgggccgccggcgagcccggcaccagcatgcctccagagaagaaggcagccgtggaagattctggaacaaccgttgagaccattaaactgggaggcgtttcctcaactgaagagctggatatacgcactctccagactaaaaaccggaaactagcagaaatgctcgaccagcggcaagctattgaggatgagttgagggagcacatcgagaagctggaacgacgtcaagccacggatgatgcttcccttttaatagtgaaccggtactggtctcagttcgatgagaacattagaataatcctgaaacgatatgaccttgagcagggcctgggggacctactaactgagcggaaagccttggtagtaccagaaccagaaccagattccgactccaatcaggagcgcaaggacgatcgtgaaagaggggagggccaggagccggctttttcgttcttggctactctggcatcttcttcatctgaagagatggaatctcagttgcaagagagagtcgagtcaagttag

SEQ ID NO: 201856 - DNA, 2928 bp, Artificial Sequence
  derived and/or modified sequence
atgagcggcatcggcaacaagcgggccgccggcgagcccggcacctcgatgccacctgagaagaaagctgctgtggaggattctggcaccacagtcgaaactattaagttggggggagtgtcctccaccgaagaactcgatatcagaacactgcagactaagaaccggaagctggccgagatgttggatcagaggcaggccattgaagacgaactccgagagcatattgagaaattggaacgtcggcaggcaaccgatgacgcgtccctcttaatcgtaaacagatactggtcccagttcgacgagaacatcagaattatactcaaaaggtatgaccttgaacagggtctgggggatctgcttacagagagaaaagcactggtcgtccctgagcccgaaccagacagcgatagcaaccaggagaggaaggacgaccgggagagaggagagggacaggaacccgctttttcctttctcgcaactctggctagtagttctagcgaagaaatggagtctcagctgcaggaacgggtcgaaagctcacggagagcagtcagccagattgtaacagtgtatgacaagcttcaagagaaggtcgaactgttgtcccggaagttgaattctggggataacctgattgtagaagaggccgtgcaggagctgaactcttttctggctcaagagaatatgaggcttcaggaactgaccgaccttctgcaggaaaaacacaggacgatgagccaagaatttagcaaattgcagagcaaggttgaaacagccgaaagccgtgtcagcgtgctggagagcatgatagacgacctccaatgggatattgataagatccgtaagagagagcagaggctgaatcggcatctggccgaggtgctggagagggtgaatagcaagggctacaaggtgtacggggccggctcctccctttacgggggaaccattacaattaatgctcggaagttcgaggagatgaacgcagaactggaggagaacaaagagctggcacagaaccgcctttgtgaactagagaagcttcgtcaggactttgaggaagtcacaacccagaatgagaaactgaaagtcgagctacgatctgcagtggagcaagtggtcaaggagacccctgaatatagatgtatgcagagtcagttttctgttttgtacaacgagagtctgcaattgaaagctcacctggatgaagcgaggacactgttgcacggcacacgaggcacacaccagcatcaggtagaactgatagagagagacgaggttagcttgcataaaaaactacgaaccgaagtgatacaactggaggacactctggcccaggttaggaaagagtatgagatgctgcgtatcgaattcgagcagactctggccgccaatgaacaagctggcccaatcaatcgcgagatgcggcacctcataagctccctgcagaatcataatcaccagctgaaaggtgaagtgctgaggtacaagcgtaaactgagagaagcccagtctgatctgaacaagactcgacttcgcagcggatccgccctgctgcagtctcaatcttctaccgaagatccaaaggatgagccggccgaactaaagcccgatagcgaggatctctcctctcagagctctgcaagtaaggcatcccaggaggatgctaacgaaataaaatctaaacgcgatgaagaggagcgcgaaagagaacgccgcgagaaagaaagggagcgcgagagagaacgagaaaaagagaaggagcgcgagcgggaaaaacagaaattgaaagagtccgagaaagagcgggattctgcaaaggataaagaaaagggcaaacatgatgatggcaggaaaaaagaggccgagatcattaagcagttgaaaatagaactgaaaaaagctcaggaatctcagaaggaaatgaaacttttgcttgatatgtacaggtctgcaccgaaggagcagcgagacaaagttcagttgatggcagcggagaagaaatctaaggctgagctcgaggatctcaggcagcgtttaaaggacctggaggataaagaaaagaaagagaataaaaagatggccgacgaggacgccttgagaaaaattcgcgccgttgaggagcagatcgaatacttgcaaaagaagctggctatggctaagcaggaggaagaggcactcctgagtgagatggacgtgaccgggcaggcatttgaagacatgcaggagcagaacattcgactgatgcagcagcttcgcgaaaaagatgacgccaacttcaaacttatgtccgaaagaatcaagagcaaccaaatccacaagctgcttaaggaggaaaaggaagagctggcagatcaggttctgactcttaagacacaggttgatgctcaactccaggtcgtcagaaaattggaggagaaggagcatttactccaatccaacatcgggactggtgaaaaggaattggggttaagaacccaagcactagaaatgaataaaaggaaagcaatggaagcagctcagctggctgacgacctcaaggctcaactggagctggcccagaaaaaactgcacgacttccaggacgagatcgtggagaactctgtgactaaggaaaaggacatgttcaattttaaaagggcacaggaggatatctcccggcttaggcgcaaactcgagacaaccaagaagccggataatgtcccgaagtgcgacgagatcttgatggaggagataaaggattataaggcccggctcacttgcccctgttgtaatatgagaaagaaagacgccgtgctgactaaatgtttccatgtcttttgcttcgagtgcgtaaagacccggtacgataccagacaaaggaagtgtcccaaatgtaacgcggcattcggggcaaacgacttccatcggatctacatcggttag

SEQ ID NO: 201857 - DNA, 438 bp, Artificial Sequence
  derived and/or modified sequence
atgagcggcatcggcaacaagcgggccgccggcgagcccggcacctccatgccaccagaaaagaaggcagccgtggaagactctggtacaacagtggaaaccatcaagttgggaggtgtctcctccaccgaagagttggatattcgcaccttgcagacaaagaataggaagctggcggagatgcttgaccagcgtcaggccatcgaagatgaactaagggagcacattgaaaagttggagaggagacaggctacggacgacgcatctctgcttattgtgaacaggtattggagccagttcgacgaaaatatcagaattatcctgaagcgctacgatctcgaacaaggcctgggtgacctgcttaccgagcgcaaagccctggtggtgccggaaccagagcccgattctgacagcaatcaggagcgcaaagacgattag

SEQ ID NO: 201858 - DNA, 300 bp, Artificial Sequence
  derived and/or modified sequence
atgagcggcatcggcaacaagcgggccgccggcgagcccggcaccagtatgccccctgagaagaaagcagccgtggaggattccggtaccaccgtggaaactattaaattaggcggggtgagcagcacagaggagttagatatccggacactacagaccaagaaccgcaagctagccgagatgctcgaccagagacaggctattgaggacgagttgagagagcatatcgaaaaacttgaaaggagacaggctaccgatgacgcatccctactgatcgtgaacaggtactggtctcaatag

SEQ ID NO: 201859 - DNA, 546 bp, Artificial Sequence
  derived and/or modified sequence
atgagcgggattgggaataaaagagccgctggcgaacccggaaccagcatgccacccgagaagaaggctgctgttgaagactctgggaccaccgtggaaaccatcaagctcggaggtgttagcagcactgaagaactggatattaggaccctgcaaactaagaatagaaaactggctgaaatgctggaccagcggcaggccattgaggatgaactgcgcgaacatatagagaagctcgagcgacgtcaggccacggatgacgcctctctgttgattgtgaaccgctactggagccagttcgacgaaaacatcagaatcattctcaaacgttacgacttggagcaggggctgggcgacctgctcacagaaaggaaagctctggtggtgcctgaacccgagccggacagcgactcgaatcaggagcgaaaggatgacagggaaagaggcgaggggcaggagcccgctttctcatttttagctaccctggcgagttcttcaagtgaagaaatggaaagccagctccaggagagggttgagagttcatag

SEQ ID NO: 201860 - DNA, 2928 bp, Artificial Sequence
  derived and/or modified sequence
atgtcaggaatagggaacaagcgcgctgcaggagagcccggaacatcaatgccacctgagaaaaaagccgctgtggaagactcagggactaccgtggaaacaatcaaactgggtggggtgagtagtaccgaggaattagacatacgcaccctgcaaacaaagaatcgcaaacttgcagagatgcttgaccaaaggcaggccattgaggacgagctcagagaacacatcgaaaagctggagcgccgacaggctacagatgatgctagtctgctcatcgtgaataggtattggtcgcagtttgatgaaaacatcagaattatactgaaaaggtacgatctcgagcaaggccttggcgatttgctgacagagcgcaaagctctggtcgtgccagagcctgaacctgatagcgattcgaaccaggagagaaaagacgatcgcgagcgcggagagggccaggagcccgcatttagctttcttgccacactcgcaagtagtagcagtgaagagatggagtcgcagctgcaggagagggtagaaagctcacgacgagctgttagccagattgtaacagtctacgacaaacttcaagaaaaggtcgagcttctgagtaggaagcttaacagcggggacaacctgattgttgaagaggcagtgcaggaactgaatagtttcttggctcaggagaacatgaggctccaagagctaaccgacttgctgcaggaaaagcataggaccatgagtcaggagtttagcaaactgcaatcaaaggtggaaactgctgaaagccgagtcagcgtcctggagtctatgattgacgacctgcaatgggatattgacaaaatccggaagcgtgagcagagactgaacagacacctcgctgaagtgctggagagagttaactcaaagggatacaaggtatacggtgctggatcatcgctctacggcggaacgatcacaattaacgcaagaaagtttgaagagatgaacgccgaactggaggagaataaggagctcgcgcagaatcgcctttgtgagctggagaaactcaggcaagatttcgaagaggtcaccacacaaaatgaaaagctgaaggtagagttgagaagtgctgtggagcaggtcgtcaaagaaacccctgagtaccgctgcatgcaaagccagtttagcgtgttatacaacgagtccctgcagctcaaagcacatctggacgaggccaggacactgcttcacgggacacgtgggacccaccaacaccaagtggagctcattgagcgagatgaggtgtcccttcataagaaattacggacagaggtgattcagctggaggacaccctagcacaggtgcgcaaagagtatgaaatgctccgcatagaattcgaacagacactggctgccaacgaacaggctggcccaatcaatcgcgagatgcgacacctgattagcagcctccagaaccacaaccatcaattgaagggggaggtgctccgctacaaacgaaagcttagagaggcacaaagcgatctcaacaagactaggcttcgctccggaagcgcccttctgcagtcccaaagctccaccgaggacccaaaggacgaacctgccgagctgaagcccgacagtgaggacctttcaagtcagtcaagtgcttccaaggcatctcaggaagatgccaacgaaattaaaagcaagcgggacgaggaagaaagagaaagagagaggagagagaaggagagggagagagagagggagagagaaaaagagaaggagagagagagggaaaaacagaagttgaaagaatcagagaaggaaagggactctgctaaagataaggagaaaggaaaacacgatgatggcagaaaaaaggaagctgagataatcaaacaactgaagatcgaactaaagaaggctcaagaatcacagaaggaaatgaaattgctcctggacatgtataggagcgccccaaaagagcaacgagacaaggtacagctgatggccgctgagaagaagtctaaagctgaacttgaagatttacgccagcgattaaaagacctcgaggacaaagaaaagaaagagaataaaaagatggccgatgaagacgcactccggaagattagggccgttgaagaacagatcgaatatcttcaaaagaagctggcaatggccaaacaggaggaagaggctctcctgtcagagatggacgtgacaggccaggcatttgaggatatgcaggagcagaacattcgactgatgcagcagctcagagaaaaagatgatgcgaattttaagctcatgtctgagagaattaaatcaaatcagatacacaagctgctgaaggaagagaaagaggagctggccgaccaggtcttaaccctaaagacacaggtcgatgcccagttacaggtggtgcgcaagctggaagaaaaagagcacctcctgcaatctaacattggcactggagaaaaggagctcgggctgcgcactcaagcactggagatgaacaagagaaaggccatggaggcagctcaattagccgacgacttaaaggcccagctcgaactcgcgcagaaaaaactgcacgattttcaggacgagatcgtggagaattccgtgaccaaggaaaaagatatgttcaatttcaagcgtgcccaggaggatatttcgcggctcagacggaagcttgagactactaaaaaacccgataatgttcctaagtgtgacgagatcttgatggaggagatcaaagactataaggcacgtctgacatgtccttgttgcaacatgaggaagaaggacgcggttctgacaaaatgttttcatgtgttttgtttcgaatgcgtcaagactcgctatgacacaaggcagcggaaatgccccaagtgcaatgccgcatttggcgcaaatgattttcatcgaatttacattgggtag

SEQ ID NO: 201861 - DNA, 438 bp, Artificial Sequence
  derived and/or modified sequence
atgtctgggataggcaacaaaagagcagcaggtgaacctggtactagcatgccacccgaaaagaaagcggcagtcgaagatagcggaactactgtggaaacaatcaaactgggtggggtatcatctaccgaggagttagatatccgcacccttcagactaaaaaccggaaactggctgaaatgcttgaccaacgacaggccatagaagacgaacttagagagcatatcgagaagttggagcgcaggcaagcaaccgatgacgcctccctgttaatcgtcaaccggtattggtcccagttcgacgagaacatcagaattatcctgaagcgctatgacctagagcaggggcttggggacctcctgactgagcgtaaagccctggtggttcccgaacccgagccagatagtgattccaatcaggaaaggaaggatgattag

SEQ ID NO: 201862 - DNA, 300 bp, Artificial Sequence
  derived and/or modified sequence
atgtcaggcatcggcaataagagagccgcaggggaaccgggaacctcaatgcccccagaaaaaaaagctgcagtcgaagactctggtactaccgtggaaacaatcaagctgggcggtgtgtcttctactgaggaactggatatcagaaccctgcagacgaaaaaccggaagctggccgagatgctcgaccaaagacaggcaatcgaagatgagctacgtgaacatattgaaaagttggaacggaggcaagcaacggacgacgcctcattactgatagtgaaccggtactggagccagtag

SEQ ID NO: 201863 - DNA, 546 bp, Artificial Sequence
  derived and/or modified sequence
atgagcggcatcggcaacaagagagccgccggcgagcccggcaccagcatgccccccgagaagaaggccgccgtggaggacagcggcaccaccgtggagaccatcaagctgggcggcgtgagcagcaccgaggagctggacatcagaaccctgcagaccaagaacagaaagctggccgagatgctggaccagagacaggccatcgaggacgagctgagagagcacatcgagaagctggagagaagacaggccaccgacgacgccagcctgctgatcgtgaacagatactggagccagttcgacgagaacatcagaatcatcctgaagagatacgacctggagcagggcctgggcgacctgctgaccgagagaaaggccctggtggtgcccgagcccgagcccgacagcgacagcaaccaggagagaaaggacgacagagagagaggcgagggccaggagcccgccttcagcttcctggccaccctggccagcagcagcagcgaggagatggagagccagctgcaggagagagtggagagcagctag

SEQ ID NO: 201864 - DNA, 2928 bp, Artificial Sequence
  derived and/or modified sequence
atgagcggcatcggcaacaagagagccgccggcgagcccggcaccagcatgccccccgagaagaaggccgccgtggaggacagcggcaccaccgtggagaccatcaagctgggcggcgtgagcagcaccgaggagctggacatcagaaccctgcagaccaagaacagaaagctggccgagatgctggaccagagacaggccatcgaggacgagctgagagagcacatcgagaagctggagagaagacaggccaccgacgacgccagcctgctgatcgtgaacagatactggagccagttcgacgagaacatcagaatcatcctgaagagatacgacctggagcagggcctgggcgacctgctgaccgagagaaaggccctggtggtgcccgagcccgagcccgacagcgacagcaaccaggagagaaaggacgacagagagagaggcgagggccaggagcccgccttcagcttcctggccaccctggccagcagcagcagcgaggagatggagagccagctgcaggagagagtggagagcagcagaagagccgtgagccagatcgtgaccgtgtacgacaagctgcaggagaaggtggagctgctgagcagaaagctgaacagcggcgacaacctgatcgtggaggaggccgtgcaggagctgaacagcttcctggcccaggagaacatgagactgcaggagctgaccgacctgctgcaggagaagcacagaaccatgagccaggagttcagcaagctgcagagcaaggtggagaccgccgagagcagagtgagcgtgctggagagcatgatcgacgacctgcagtgggacatcgacaagatcagaaagagagagcagagactgaacagacacctggccgaggtgctggagagagtgaacagcaagggctacaaggtgtacggcgccggcagcagcctgtacggcggcaccatcaccatcaacgccagaaagttcgaggagatgaacgccgagctggaggagaacaaggagctggcccagaacagactgtgcgagctggagaagctgagacaggacttcgaggaggtgaccacccagaacgagaagctgaaggtggagctgagaagcgccgtggagcaggtggtgaaggagacccccgagtacagatgcatgcagagccagttcagcgtgctgtacaacgagagcctgcagctgaaggcccacctggacgaggccagaaccctgctgcacggcaccagaggcacccaccagcaccaggtggagctgatcgagagagacgaggtgagcctgcacaagaagctgagaaccgaggtgatccagctggaggacaccctggcccaggtgagaaaggagtacgagatgctgagaatcgagttcgagcagaccctggccgccaacgagcaggccggccccatcaacagagagatgagacacctgatcagcagcctgcagaaccacaaccaccagctgaagggcgaggtgctgagatacaagagaaagctgagagaggcccagagcgacctgaacaagaccagactgagaagcggcagcgccctgctgcagagccagagcagcaccgaggaccccaaggacgagcccgccgagctgaagcccgacagcgaggacctgagcagccagagcagcgccagcaaggccagccaggaggacgccaacgagatcaagagcaagagagacgaggaggagagagagagagagagaagagagaaggagagagagagagagagagagagagagaaggagaaggagagagagagagagaagcagaagctgaaggagagcgagaaggagagagacagcgccaaggacaaggagaagggcaagcacgacgacggcagaaagaaggaggccgagatcatcaagcagctgaagatcgagctgaagaaggcccaggagagccagaaggagatgaagctgctgctggacatgtacagaagcgcccccaaggagcagagagacaaggtgcagctgatggccgccgagaagaagagcaaggccgagctggaggacctgagacagagactgaaggacctggaggacaaggagaagaaggagaacaagaagatggccgacgaggacgccctgagaaagatcagagccgtggaggagcagatcgagtacctgcagaagaagctggccatggccaagcaggaggaggaggccctgctgagcgagatggacgtgaccggccaggccttcgaggacatgcaggagcagaacatcagactgatgcagcagctgagagagaaggacgacgccaacttcaagctgatgagcgagagaatcaagagcaaccagatccacaagctgctgaaggaggagaaggaggagctggccgaccaggtgctgaccctgaagacccaggtggacgcccagctgcaggtggtgagaaagctggaggagaaggagcacctgctgcagagcaacatcggcaccggcgagaaggagctgggcctgagaacccaggccctggagatgaacaagagaaaggccatggaggccgcccagctggccgacgacctgaaggcccagctggagctggcccagaagaagctgcacgacttccaggacgagatcgtggagaacagcgtgaccaaggagaaggacatgttcaacttcaagagagcccaggaggacatcagcagactgagaagaaagctggagaccaccaagaagcccgacaacgtgcccaagtgcgacgagatcctgatggaggagatcaaggactacaaggccagactgacctgcccctgctgcaacatgagaaagaaggacgccgtgctgaccaagtgcttccacgtgttctgcttcgagtgcgtgaagaccagatacgacaccagacagagaaagtgccccaagtgcaacgccgccttcggcgccaacgacttccacagaatctacatcggctag

SEQ ID NO: 201865 - DNA, 438 bp, Artificial Sequence
  derived and/or modified sequence
atgagcggcatcggcaacaagagagccgccggcgagcccggcaccagcatgccccccgagaagaaggccgccgtggaggacagcggcaccaccgtggagaccatcaagctgggcggcgtgagcagcaccgaggagctggacatcagaaccctgcagaccaagaacagaaagctggccgagatgctggaccagagacaggccatcgaggacgagctgagagagcacatcgagaagctggagagaagacaggccaccgacgacgccagcctgctgatcgtgaacagatactggagccagttcgacgagaacatcagaatcatcctgaagagatacgacctggagcagggcctgggcgacctgctgaccgagagaaaggccctggtggtgcccgagcccgagcccgacagcgacagcaaccaggagagaaaggacgactag

SEQ ID NO: 201866 - DNA, 300 bp, Artificial Sequence
  derived and/or modified sequence
atgagcggcatcggcaacaagagagccgccggcgagcccggcaccagcatgccccccgagaagaaggccgccgtggaggacagcggcaccaccgtggagaccatcaagctgggcggcgtgagcagcaccgaggagctggacatcagaaccctgcagaccaagaacagaaagctggccgagatgctggaccagagacaggccatcgaggacgagctgagagagcacatcgagaagctggagagaagacaggccaccgacgacgccagcctgctgatcgtgaacagatactggagccagtag

SEQ ID NO: 201867 - protein, 672 aa, Artificial Sequence
  derived and/or modified sequence
MTPSQVAFEIRGTLLPGEVFAICGSCDALGNWNPQNAVALLPENDTGESMLWKATIVLSRGVSVQYRYFKGYFLEPKTIGGPCQVIVHKWETHLQPRSITPLESEIIIDDGQFGIHNGVETLDSGWLTCQTEIRLRLHYSEKPPVSITKKKLKKSRFRVKLTLEGLEEDDDDRVSPTVLHKMSNSLEISLISDNEFKCRHSQPECGYGLQPDRWTEYSIQTMEPDNLELIFDFFEEDLSEHVVQGDALPGHVGTACLLSSTIAESGKSAGILTLPIMSRNSRKTIGKVRVDYIIIKPLPGYSCDMKSSFSKYWKPRIPLDVGHRGAGNSTTTAQLAKVQENTIASLRNAASHGAAFVEFDVHLSKDFVPVVYHDLTCCLTMKKKFDADPVELFEIPVKELTFDQLQLLKLTHVTALKSKDRKESVVQEENSFSENQPFPSLKMVLESLPEDVGFNIEIKWICQQRDGMWDGNLSTYFDMNLFLDIILKTVLENSGKRRIVFSSFDADICTMVRQKQNKYPILFLTQGKSEIYPELMDLRSRTTPIAMSFAQFENLLGINVHTEDLLRNPSYIQEAKAKGLVIFCWGDDTNDPENRRKLKELGVNGLIYDRIYDWMPEQPNIFQVEQLERLKQELPELKSCLCPTVSRFVPSSLCGESDIHVDANGIDNVENA

SEQ ID NO: 201868 - DNA, 2019 bp, Artificial Sequence
  derived and/or modified sequence
atgaccccttcacaggtggcgttcgagattagaggcactctgctgcctggggaggtgttcgcaatctgcggtagctgtgatgccctgggaaactggaatccacaaaatgctgtggcgctgctccccgagaatgatacaggtgagtccatgctgtggaaagccaccatcgttttgtctcggggcgtcagcgtacagtaccgctatttcaaagggtatttccttgagccgaaaactatcgggggaccctgccaggtcattgtgcataaatgggaaacacatttacagcccaggagtataactccactggagtcggaaatcatcatcgacgacggccagtttggcatccacaatggagtggagacccttgactccgggtggctgacatgccagactgaaattcgcctcaggttgcactatagtgagaagcctcctgtctctatcaccaagaaaaaactgaaaaagtctcgttttagagtgaagctgacattagagggtctggaagaggatgatgatgatagagtttcccccaccgtgctccataagatgagcaatagtctggaaatctcactgatttccgataacgagttcaagtgtcggcactcccagccagaatgcggctatgggctgcagcctgaccgttggaccgagtactcaatccagacgatggaaccagataacctcgaacttattttcgatttcttcgaagaggacttatctgaacatgttgttcagggtgatgccttgcctggccacgttggcaccgcttgccttctctccagtactattgcggagtctgggaagagtgctggaatccttaccttaccaattatgtcccgcaatagccgaaaaactattggcaaggtgcgcgtagactacattattatcaagcccctgccgggatatagttgtgatatgaaaagttctttctccaaatactggaagccacgcatacccctggatgtcgggcatcgaggtgcaggcaattcaaccacaacggcacagctggctaaagtgcaggaaaacacgatcgccagcctaagaaacgctgctagccatggcgccgctttcgtggaatttgatgtgcacctgtcaaaggattttgtgccggtcgtctaccatgatctaacctgctgcctaaccatgaagaagaaattcgatgccgatccggttgagctgttcgagattcctgtcaaagagctcacattcgaccaactacagctgctgaagctgactcacgtgacagcccttaagtccaaagacaggaaagaatctgtggttcaagaagaaaacagcttttccgagaatcagccatttccaagcctgaagatggtgttagagtctctgccagaggacgtagggtttaacatcgagattaagtggatttgccagcaacgggacggcatgtgggatgggaacctttccacatatttcgacatgaatctgtttctggacattattctgaaaaccgtgctggaaaattctggaaagcgtcgaattgtattttctagttttgatgcggacatatgcacaatggtaagacagaaacagaataagtatcccatcctgtttcttacacagggtaagtctgagatctaccctgaattgatggatctccgatcccggacaactcccatcgcgatgagctttgcccagttcgagaatctgctgggtatcaacgtccataccgaggaccttttgaggaacccctcctatatacaggaagctaaggcaaaaggattggtgattttttgttggggtgatgataccaacgatcctgagaatcggcggaagctgaaagagctgggggttaacggactcatctacgacagaatatacgattggatgccggaacagccaaatatatttcaagtggagcagctggaacgtctgaaacaggaacttcctgagctcaagagctgcctgtgtccaacagtgagcagatttgtgcctagtagcctttgtggcgaaagcgacatccacgtagatgctaatggcatagataatgtcgagaacgcgtag

SEQ ID NO: 201869 - DNA, 5454 bp, Artificial Sequence
  derived and/or modified sequence
agtttggtctggagcagctgaaaccggtttgagcgtggctgcttcctgccgctcgacgccgcggcaggccgcctggggggagcgctggcgaggcacggacggcgggcgcccggtacctctgcccgcggtcctcgctctcgggcggggcggcggcgacgcggacctgcggactagcgaacccggagcacgacatcataaaataaatccatcagaatgacaccttctcaggttgcctttgaaataagaggaactcttttaccaggagaagtttttgcgatatgtggaagctgtgatgctttgggaaactggaatcctcaaaatgctgtggctcttcttccagagaatgacacaggtgaaagcatgctatggaaagcaaccattgtactcagtagaggagtatcagttcagtatcgctacttcaaagggtactttttagaaccaaagactatcggtggtccatgtcaagtgatagttcacaagtgggagactcatctacaaccacgatcaataacccctttagaaagcgaaattattattgacgatggacaatttggaatccacaatggtgttgaaactctggattctggatggctgacatgtcagactgaaataagattacgtttgcattattctgaaaaacctcctgtgtcaataaccaagaaaaaattaaaaaaatctagatttagggtgaagctgacactagaaggcctggaggaagatgacgatgatagggtatctcccactgtactccacaaaatgtccaatagcttggagatatccttaataagcgacaatgagttcaagtgcaggcattcacagccggagtgtggttatggcttgcagcctgatcgttggacagagtacagcatacagacgatggaaccagataacctggaactaatctttgattttttcgaagaagatctcagtgagcacgtagttcagggtgatgcccttcctggacatgtgggtacagcttgtctcttatcatccaccattgctgagagtggaaagagtgctggaattcttactcttcccatcatgagcagaaattcccggaaaacaataggcaaagtgagagttgactatataattattaagccattaccaggatacagttgtgacatgaaatcttcattttccaagtattggaagccaagaataccattggatgttggccatcgaggtgcaggaaactctacaacaactgcccagctggctaaagttcaagaaaatactattgcttctttaagaaatgctgctagtcatggtgcagcctttgtagaatttgacgtacacctttcaaaggactttgtgcccgtggtatatcatgatcttacctgttgtttgactatgaaaaagaaatttgatgctgatccagttgaattatttgaaattccagtaaaagaattaacatttgaccaactccagttgttaaagctcactcatgtgactgcactgaaatctaaggatcggaaagaatctgtggttcaggaggaaaattccttttcagaaaatcagccatttccttctcttaagatggttttagagtctttgccagaagatgtagggtttaacattgaaataaaatggatctgccagcaaagggatggaatgtgggatggtaacttatcaacatattttgacatgaatctgtttttggatataattttaaaaactgttttagaaaattctgggaagaggagaatagtgttttcttcatttgatgcagatatttgcacaatggttcggcaaaagcagaacaaatatccgatactatttttaactcaaggaaaatctgagatttatcctgaactcatggacctcagatctcggacaacccccattgcaatgagctttgcacagtttgaaaatctactggggataaatgtacatactgaagacttgctcagaaacccatcctatattcaagaggcaaaagctaagggactagtcatattctgctggggtgatgataccaatgatcctgaaaacagaaggaaattgaaggaacttggagttaatggtctaatttatgataggatatatgattggatgcctgaacaaccaaatatattccaagtggagcaattggaacgcctgaagcaggaattgccagagcttaagagctgtttgtgtcccactgttagccgctttgttccctcatctttgtgtggggagtctgatatccatgtggatgccaacggcattgataacgtggagaatgcttagtttttattgcacagaggtcattttgggggcgtgcaccgctgttctgggtattcatttttcatcactgagcattgttgatctatgccttttgggcttctcagttcaatgaagcaataatgaagtatttaactctttcactacagttcttgcaagtatgctatttaaattacttggccaggtataattgccagtcagtctctttatagtgagaaaatttattggttagtaatataaatattttaaactaaatatataaatctataatgttaaacatatgttcattaaaagcatagcactttgaaattaactatataaatagctcatatttacacttacagcttttcatttgatcaggtctgaaatctttagcacttaaggaaaatgactatgcataattatacctgaccatgaaaaaaataagtacctcaaatgcatgcatttgcactggtgattccaactgcacaaatctttgtgccatcttgtatataggtattttttacatgggttgacatgcacacaacaccattttcattcagtatgaaccttgaggctgctgccatttttccacttaaccaaaccagcctgaaggtgaacctcgaaacttgtttcataaatctttcaaaagttgttttacatcaatgttaaaatttcaaaatgctgcagggtaatttaatgtataaaatattagtaagaaaaagtatgtattgcatacttagtagaatagatcacaacatacaaattcaattcagtgcatgctttaggtgttaagcatgagattgtacatgtttactgttaggtccttgcatctgtggtgctaggtgagtatgagaagatgtcaaggactggacgtattttgttgcctaaaaaaaaaaggctgtttgtaggcgttttaaatatgcttattttgtgtgtctctcactacctattacacactgttgctttgtgggtttgttttgtatgtgcgtgtgttatacagtagttaaatttccatgcagaaaaataaatgtcctgaattttcatattagtattctttattgtatatcatgcatgtaatttatttagaaatgtaggtcttactaaatgtatatgcatgtatttcagattatactaggatttcttggattagaagcagattgtgttaactgtaacttaaagaatgaatgttaaataaaatgatacagatttattttcttcattacaaaatgaaatttcaagaaggtgttacttttgtagaatggttttataatatgacaagaaattttaatatagtgtctaccctaaagggatggcttatttgcatctaccttttactgcatgtttttcacaaggcagtttattcatatattgacatattttggtagtagctgagaacctaagacttgaaattatacattgtgtagtattttttaagctaagcaatgcaattttggtcagatcttatttgtgtgaagataggctctgaaatcctatggtattgcgtttgtaacgttgatattaatgcaaaatagtttaggaaatggagtcttctgcaagggttctgtatacttttcccacattgtatgagattttccaaaattttggtgtgaattgggcacttttggaaaactcctgaaaaagaattagtttccttcatctgcagacctttgtccaatacggttaccatttctttatagtaactcgattagccatatatgtttgtttctagtcctgctcctttgctcctctcctatgccttcccagtgctggctccattttgaagactcaaggacagaggggaagcagatcataaagagaaaaaggagacagaagaaaggatgaaggaaggaggtcatggggagtgtggcttctgagcagtttagttgctggggagagcagacagtcactgcctacaatacagacagaaccttcctgctcactttctgtcctatctcttcctgaccttatgaaccagtgttagtagatgattaaaacatgacaagcaatggctccttattttcacaggactaagtccgggccttcgtatcactagctgttgccttttacaccctgcttcagccaccctgtccctgtcattggccctggacttcctctctgtgcccgtgtgtcctctgcctgggagccctctcctcccatagtcactttctctctgccaaactcatttcttcttgtgcccaagacctctctcctgagcccttgtggaaacttcaggaaggatgaatccgtctttgtgctccacggctcgtaccttgatcaggctgtgcatcacagtaattctgttctaggtaggcagagttgatctttgtctcatctgccaggctgcaggctcttcaagggcagggaccttgtcatagtcatttttattttcacagtgcttggaacatggtggaaaatgaatgttggaattattggagtaatataatttgtatcaaatgtccttttgaattaagagatttagttatgtttactaagaatgtaaactttgaattggtttgcattttaacaattaggatggtttattgatgtgaattttgaaatgtagaggtataatgttaaattattttatactttatggaaatcaagtgaaatgtttgaaaaaatgccgccattatcctctggtattttctactctctggaattatgtgctgtaaatgatcggctgtaaatgtgaggcacaccacccacccctgtgtggaaagtgttgtggcgcttcctgccacccacccacctctctgccgttgctccttgtgacacttgtctgtcgtctcccatccaaactccaagcttacagctacctcagtactgctttgcttgtctgaaacacctcctttgccttccttcagtgtcccgctcaggtgcagcctcctccctaaagctcatctcagcttttgatctgaatgatgatggaaacatgcagacagcctctcagtcttactatttaatgttgtagctgggaaaaaacccagagaggttaactgatatactgggttgggactaggatgtgggttttgtgactctgaatcccatgttctcaaactacgctgccttccgaagtctggcatttgttagctcatgcttccttgtagtccagcttcttatgtgcctgttatattctccagtaagattgtaagccccttaagggcagggacgtctttgcatctctagcactgctatagtgttctatccttagttatgaactagataaataaatggtggtggcaacaa

SEQ ID NO: 201870 - DNA, 2019 bp, Artificial Sequence
  derived and/or modified sequence
atgacccccagccaggtggcctttgagatccggggcaccctgctgcccggggaggtgtttgccatctgtggcagctgtgatgccctgggcaactggaacccccagaatgctgtggccctgctgcctgaaaatgacaccggggagagcatgctgtggaaggccaccatcgtgctgagcagaggagtgtctgtgcagtaccgctacttcaagggctacttcctggagcccaagaccatcggcggcccctgccaggtgattgtgcacaagtgggagacccacctgcagcccaggagcatcacccccctggagagcgagatcatcattgatgatggccagtttggcatccacaatggagtggagaccctggacagcggctggctgacctgccagacagagatccggctgcggctgcactacagcgagaagccccctgtgtccatcaccaagaagaagctgaagaagagccgcttccgggtgaagctgaccctggagggcctggaggaggatgatgatgacagagtgagccccaccgtgctgcacaagatgagcaacagcctggagatcagcctcatcagtgacaatgagttcaagtgccgccacagccagccagaatgtggctacggcctgcagcctgaccgctggacagagtacagcatccagaccatggagccagacaacctggagctgatctttgacttctttgaggaggacctgtctgaacatgtggtgcagggagatgccctgcccggccacgtgggcacagcctgcctgctgagcagcaccatcgccgagagcggcaagtctgctggcatcctgaccctgcccatcatgagcaggaacagcaggaagaccatcggcaaggtgcgggtggactacatcatcatcaagcccctgcccggctacagctgtgacatgaagagcagcttcagcaagtactggaagccccgcatccccctggatgtgggccacagaggagctggcaacagcaccaccacagcccagctggccaaggtgcaggagaacaccatcgccagcctgagaaatgctgccagccacggggccgcctttgtggagtttgatgtgcacctgagcaaggactttgtgcctgtggtgtaccatgacctgacctgctgcctgaccatgaagaagaagtttgatgctgaccctgtggagctgtttgagatccctgtgaaggagctgacctttgaccagctgcagctgctgaagctgacccacgtgacagccctgaagagcaaggacaggaaggagagcgtggtgcaggaggagaacagcttcagcgagaaccagcccttccccagcctgaagatggtgctggagagcctgcctgaagatgtgggcttcaacatcgagatcaagtggatctgccagcagagagatggcatgtgggatggcaacctgagcacctactttgacatgaacctcttcctggacatcatcctgaagacagtgctggagaacagcggcaagagaagaattgtgttcagcagctttgatgctgacatctgcaccatggtgcggcagaagcagaacaagtaccccatcctcttcctgacccagggcaagtctgagatctacccagagctgatggacctgcggagcaggaccacccccatcgccatgagctttgcccagtttgagaacctgctgggcatcaacgtgcacacagaggacctgctgaggaaccccagctacatccaggaggccaaggccaagggcctggtgatcttctgctggggagatgacaccaatgaccctgaaaatagaaggaagctgaaggagctgggcgtgaatggcctcatctatgaccgcatctatgactggatgcctgagcagcccaacatcttccaggtggagcagctggagcggctgaagcaggagctgcctgagctgaagagctgcctgtgccccaccgtgtccagatttgtgcccagcagcctgtgtggggagagtgacatccacgtggatgccaacggcatcgacaacgtggagaatgcctag

SEQ ID NO: 201871 - DNA, 2019 bp, Artificial Sequence
  derived and/or modified sequence
atgacccccagccaggtggccttcgagatccggggcaccctgctgccaggtgaagtgttcgccatctgcgggagctgcgacgccttgggtaattggaacccacagaacgcagtcgcccttctccccgagaatgataccggcgagtccatgttgtggaaggccaccatcgtgctgtcaagaggagttagcgtacaataccgctactttaaagggtactttttagagccaaaaaccataggcggcccttgccaagtgatcgtgcataaatgggagactcatctgcagcctcgctctatcacccccttggaaagtgaaatcataatcgacgatgggcagttcggaattcataacggggtcgagaccttggattccgggtggctgacatgtcagactgagatcaggctgaggctgcactattcagaaaagccgcctgtgtctattactaaaaagaagctgaagaaatctagattcagagtaaagctaactttagaaggcttggaggaggacgacgatgaccgggtttccccaactgtgcttcacaagatgagcaactctctggagatctcactgatcagtgataacgaatttaaatgccgtcattctcagcctgaatgtggttacggactgcagccagatcgctggacagagtactccatccagaccatggagccggacaatctggagctgatatttgacttctttgaggaagatttgtctgaacacgtcgtacagggagatgccttacccggccacgtcggaaccgcatgcctgcttagttccactattgctgaaagcggtaagtcggccggcatattgaccctccccatcatgtcccggaatagtcggaagaccatcgggaaggtgcgcgtagactatatcatcatcaaacctctgcccggatactcctgtgatatgaaatcaagcttttcaaaatattggaaaccacggattcctctcgacgtcgggcatcgcggggcaggaaactctacaaccaccgctcagctggccaaagtgcaggagaacactattgcctccttgcggaacgccgcatctcatggagctgccttcgtagagttcgatgtccatctgagcaaagacttcgtgcccgttgtgtatcatgacctgacatgttgtctgactatgaagaaaaagtttgatgcggacccagtcgagcttttcgagatcccggtgaaggagttgactttcgaccagctacaactgctgaagctcacccatgtcaccgctcttaagtcaaaagacaggaaagagtccgtggttcaggaagaaaacagcttttctgagaatcaaccctttccttctctgaagatggtactcgaatctctgccagaagatgtaggatttaatattgagatcaagtggatctgtcagcagcgggatggtatgtgggacggtaatctgtctacatactttgatatgaacctgtttctggacatcatacttaagacagttctagagaattctgggaaaaggcgaatcgtgttttcttcttttgacgcggacatctgcaccatggtccggcagaagcagaacaaatatcctatcctcttcctgacccagggaaagtccgagatctacccagagttgatggacttgcgttccagaactacacctatcgcgatgtcattcgcccagtttgaaaatctgctgggtataaacgttcatacggaagacctactcaggaacccatcctacatacaggaggccaaggccaaagggttagttattttctgctggggagatgacacaaacgatcccgaaaataggagaaagcttaaggagcttggtgttaatgggcttatttatgatcgcatttacgattggatgcctgagcagccaaatatcttccaggtggagcaattggagcgcctgaaacaggagcttcccgaactgaagagctgtctgtgtccaacggtgtcccgcttcgtcccgtcttccttatgcggcgagagcgacattcatgtggacgcaaatgggatcgataatgtcgaaaacgcttag

SEQ ID NO: 201872 - DNA, 2019 bp, Artificial Sequence
  derived and/or modified sequence
atgaccccatcccaagtcgcattcgaaataagagggactctattaccaggcgaagtcttcgccatctgcggctcatgtgacgcactcggcaactggaatccacagaacgcagtggccctactcccagagaacgacacaggggaaagcatgttgtggaaggctaccatcgtactctcgaggggtgtgagtgtacaatatcggtactttaaaggatacttcttggagcctaaaactatagggggtccttgccaagtgatcgtccacaaatgggaaacccatctgcaaccgagatcaattacgcctctggagtctgaaatcatcatcgacgatgggcagttcggtattcataacggagttgagacgttggattccggatggctcacttgccagaccgagatccgcttgcgccttcattatagcgagaaaccacctgtgagtataacaaagaagaagttgaagaaatcgaggttccgagtgaaactgactctggagggcctggaagaggatgatgatgaccgggttagtcccacagtcttacataagatgagcaactctctggagatctctttgatttcagataacgaattcaagtgccgtcattctcaaccggagtgtggctatgggcttcagcctgatcggtggaccgaatacagcattcagactatggagccagacaatctcgagctgatctttgacttttttgaggaagacctgagcgaacacgtggtgcagggcgacgctctgcccggacatgtaggcacagcatgcctacttagttccacaatagccgagtccggcaaatccgccggaatattaacactccccattatgtcccgtaatagcagaaagaccatcggaaaagtcagggtagactacatcattatcaagccccttccgggttactcctgtgatatgaagtccagctttagcaaatactggaagcctcgcattccattagatgttggccatagaggggctggcaactctacgaccaccgcccaacttgccaaggttcaggagaacaccatagcctcgctccgaaacgcagctagccatggtgctgcttttgtcgagtttgatgtgcatttgtccaaggacttcgtgccggttgtgtaccacgacctaacgtgctgcctgacaatgaaaaaaaaattcgacgcagatcccgttgagctctttgagattcccgttaaggagctgacgttcgatcagctccagctgctcaagttaactcatgtgacagcgttgaagtctaaagaccggaaggaaagtgtggtacaggaggagaattcattctctgaaaaccaaccattcccttctctcaaaatggttctggagtctttaccagaagacgtgggatttaatatcgagatcaaatggatttgtcagcagcgagacgggatgtgggatggaaatctgtcgacctatttcgacatgaatctgtttctggatattattctgaagacagtgctggaaaactcaggaaagcgtcgaattgtgtttagctctttcgatgccgatatttgtactatggtgagacaaaagcagaacaaataccctatcttgtttcttacgcaggggaagagtgagatttatccagaacttatggacctgcggagtcgcacaacacccatcgcgatgagtttcgctcaattcgaaaatctgctggggattaatgttcacaccgaagacttgttacgtaaccccagttacatacaagaagctaaagccaaaggtctggtgatcttttgctggggcgacgacaccaacgaccccgagaatcggaggaagctcaaggaactgggtgttaatggactaatctatgacaggatttatgattggatgcccgagcaacccaatatcttccaggtagaacaactggaaaggttaaagcaagagttaccggagcttaagtcatgcctctgcccaactgtgtcccgctttgtacctagcagcttatgtggagagagcgatatccacgttgatgccaacggtatcgataatgtggagaatgcttag

SEQ ID NO: 201873 - DNA, 2019 bp, Artificial Sequence
  derived and/or modified sequence
atgacccccagccaggtggccttcgagatcagaggcaccctgctgcccggcgaggtgttcgccatctgcggcagctgcgacgccctgggcaactggaacccccagaacgccgtggccctgctgcccgagaacgacaccggcgagagcatgctgtggaaggccaccatcgtgctgagcagaggcgtgagcgtgcagtacagatacttcaagggctacttcctggagcccaagaccatcggcggcccctgccaggtgatcgtgcacaagtgggagacccacctgcagcccagaagcatcacccccctggagagcgagatcatcatcgacgacggccagttcggcatccacaacggcgtggagaccctggacagcggctggctgacctgccagaccgagatcagactgagactgcactacagcgagaagccccccgtgagcatcaccaagaagaagctgaagaagagcagattcagagtgaagctgaccctggagggcctggaggaggacgacgacgacagagtgagccccaccgtgctgcacaagatgagcaacagcctggagatcagcctgatcagcgacaacgagttcaagtgcagacacagccagcccgagtgcggctacggcctgcagcccgacagatggaccgagtacagcatccagaccatggagcccgacaacctggagctgatcttcgacttcttcgaggaggacctgagcgagcacgtggtgcagggcgacgccctgcccggccacgtgggcaccgcctgcctgctgagcagcaccatcgccgagagcggcaagagcgccggcatcctgaccctgcccatcatgagcagaaacagcagaaagaccatcggcaaggtgagagtggactacatcatcatcaagcccctgcccggctacagctgcgacatgaagagcagcttcagcaagtactggaagcccagaatccccctggacgtgggccacagaggcgccggcaacagcaccaccaccgcccagctggccaaggtgcaggagaacaccatcgccagcctgagaaacgccgccagccacggcgccgccttcgtggagttcgacgtgcacctgagcaaggacttcgtgcccgtggtgtaccacgacctgacctgctgcctgaccatgaagaagaagttcgacgccgaccccgtggagctgttcgagatccccgtgaaggagctgaccttcgaccagctgcagctgctgaagctgacccacgtgaccgccctgaagagcaaggacagaaaggagagcgtggtgcaggaggagaacagcttcagcgagaaccagcccttccccagcctgaagatggtgctggagagcctgcccgaggacgtgggcttcaacatcgagatcaagtggatctgccagcagagagacggcatgtgggacggcaacctgagcacctacttcgacatgaacctgttcctggacatcatcctgaagaccgtgctggagaacagcggcaagagaagaatcgtgttcagcagcttcgacgccgacatctgcaccatggtgagacagaagcagaacaagtaccccatcctgttcctgacccagggcaagagcgagatctaccccgagctgatggacctgagaagcagaaccacccccatcgccatgagcttcgcccagttcgagaacctgctgggcatcaacgtgcacaccgaggacctgctgagaaaccccagctacatccaggaggccaaggccaagggcctggtgatcttctgctggggcgacgacaccaacgaccccgagaacagaagaaagctgaaggagctgggcgtgaacggcctgatctacgacagaatctacgactggatgcccgagcagcccaacatcttccaggtggagcagctggagagactgaagcaggagctgcccgagctgaagagctgcctgtgccccaccgtgagcagattcgtgcccagcagcctgtgcggcgagagcgacatccacgtggacgccaacggcatcgacaacgtggagaacgcctag

SEQ ID NO: 201874 - protein, 810 aa, Artificial Sequence
  derived and/or modified sequence
MIPVTELRYFADTQPAYRILKPWWDVFTDYISIVMLMIAVFGGTLQVTQDKMICLPCKWVTKDSCNDSFRGWAAPGPEPTYPNSTILPTPDTGPTGIKYDLDRHQYNYVDAVCYENRLHWFAKYFPYLVLLHTLIFLACSNFWFKFPRTSSKLEHFVSILLKCFDSPWTTRALSETVVEESDPKPAFSKMNGSMDKKSSTVSEDVEATVPMLQRTKSRIEQGIVDRSETGVLDKKEGEQAKALFEKVKKFRTHVEEGDIVYRLYMRQTIIKVIKFILIICYTVYYVHNIKFDVDCTVDIESLTGYRTYRCAHPLATLFKILASFYISLVIFYGLICMYTLWWMLRRSLKKYSFESIREESSYSDIPDVKNDFAFMLHLIDQYDPLYSKRFAVFLSEVSENKLRQLNLNNEWTLDKLRQRLTKNAQDKLELHLFMLSGIPDTVFDLVELEVLKLELIPDVTIPPSIAQLTGLKELWLYHTAAKIEAPALAFLRENLRALHIKFTDIKEIPLWIYSLKTLEELHLTGNLSAENNRYIVIDGLRELKRLKVLRLKSNLSKLPQVVTDVGVHLQKLSINNEGTKLIVLNSLKKMANLTELELIRCDLERIPHSIFSLHNLQEIDLKDNNLKTIEEIISFQHLHRLTCLKLWYNHIAYIPIQIGNLTNLERLYLNRNKIEKIPTQLFYCRKLRYLDLSHNNLTFLPADIGLLQNLQNLAITANRIETLPPELFQCRKLRALHLGNNVLQSLPSRVGELTNLTQIELRGNRLECLPVELGECPLLKRSGLVVEEDLFNTLPPEVKERLWRADKEQA

SEQ ID NO: 201875 - DNA, 2433 bp, Artificial Sequence
  derived and/or modified sequence
atgatcccagtgacagaactacgatattttgcagatacacagcctgcctacaggatcctgaagccctggtgggatgtgttcacagattatatctctatcgtgatgcttatgattgccgtgttcggaggtactctccaagtgacccaggacaaaatgatttgccttccctgcaaatgggtgacaaaggatagctgcaatgatagctttcgcggatgggcagcacccggacctgagccaacgtaccccaacagcactatcttacctacccccgataccggtccaacaggaatcaagtatgacctggatcggcatcagtataactacgttgatgctgtatgctacgagaacagactccattggttcgccaaatacttcccatacttagtgctcctacacactctcatcttcttggcctgctccaatttttggttcaagttcccacggactagctcaaagctcgaacatttcgttagcatcctgctgaagtgcttcgactcgccttggactacaagggccctgagtgaaacagttgtggaagaatctgaccctaagcccgccttctctaaaatgaacgggtcaatggataagaagagcagcaccgtctccgaagatgtggaggccaccgttccaatgctgcagagaacaaaaagcaggatcgaacagggaatcgtggaccggagtgaaactggcgtgttggacaagaaagagggggaacaggcaaaggccctttttgagaaagtgaagaagtttcggactcacgtggaggaaggagatattgtttatcgcctgtacatgcggcagaccatcatcaaggtgatcaagttcatcttaataatctgttacaccgtctactacgtgcacaatattaaattcgatgtagactgcactgtggacatagagtctctcaccgggtataggacctaccgctgtgcccacccactggcaaccctcttcaaaatcctggcatcattctacatctccctggttatcttttacggcctgatttgtatgtatacgctgtggtggatgttgcgccgcagtctcaaaaagtactccttcgagtccatcagagaagagtcttcatacagcgacatcccagatgtgaagaatgacttcgcctttatgcttcacctaatcgatcagtacgatcctctctactcaaaacgttttgcagtatttctttcagaagtatcggaaaataagctgaggcaactaaacctgaataatgaatggactctggacaaactgagacagcggttaacaaagaatgcccaggacaaactagaactccacctgttcatgctgtcaggaataccagatacagtgtttgacctagtggagttggaagtactcaaactagaattgatccctgacgtgactatcccaccatctatcgctcagctgacaggcctcaaagagctgtggctctaccatactgctgcaaagatcgaggcaccggctctagcttttctgcgagagaatttgcgagccctacacatcaagtttacagacattaaagaaatccccctttggatctactcactaaagaccttagaagaactccacctgacgggtaacttgagtgccgaaaataaccgttacatcgtgatcgatgggctgagggagctcaagagactgaaggttttgcgcctgaaatccaatctttccaaactgcctcaggtggttaccgatgtaggcgttcaccttcagaaactcagcataaataatgaggggactaaactcatagtcttaaattccctaaagaagatggctaatcttacggaactggaactgatccgatgtgatctggaacgcatacctcattctattttttctctgcacaatttgcaagaaatcgatttgaaagacaataacctcaagaccatcgaggagattattagctttcagcacctgcacagattgacatgcctgaagctctggtacaatcacatcgcctacatcccaattcagataggcaacctgacaaacctcgagaggctctacctcaatcgcaacaaaattgaaaaaatacctacgcagcttttctattgccggaagctgcgttacctcgatctgtcccacaataatctcacctttcttccagcagacatcggtctgcttcagaatcttcagaatctcgccatcacagcaaacaggatcgagaccctgccacctgagctgttccagtgcaggaaactgcgggcgctacatcttggcaataacgtcctacagtcactgccaagccgcgttggggagctcacgaatctgacacaaatcgaattgaggggcaaccggctcgaatgtttgccagtggaactaggcgaatgcccgctgctcaagagatcaggtctcgttgtagaagaggatttgtttaataccctgcccccggaggtgaaggagcgattgtggagagccgataaggagcaagcttag

SEQ ID NO: 201876 - DNA, 2433 bp, Artificial Sequence
  derived and/or modified sequence
atgattcccgtgacagagctgcgctattttgcggacacgcaaccagcgtaccggatcctgaagccatggtgggacgttttcactgactacatttctatcgtcatgctaatgatcgccgtgttcggtggcaccttacaggtcacccaagacaaaatgatctgtctgccttgcaaatgggtgacgaaggatagttgtaatgactcattccgaggctgggcggctccaggccctgagcccacctaccccaactctactatcctaccaacacccgacacaggaccaaccggaataaaatacgatttggaccgccatcagtataattacgtcgatgcagtatgttacgaaaacaggctgcattggtttgccaaatacttcccctatttggtcttattacatactctcatttttctggcgtgctccaatttctggtttaagttccctagaacctcctctaaactggaacactttgtttctatactgctgaaatgcttcgacagcccttggaccactagggcacttagcgagacagtggtggaagaatctgaccctaaaccagctttttcaaaaatgaacggctctatggacaaaaaatcaagtacagtgagtgaggatgtcgaagcgacggtcccaatgctccagcggacaaaatctagaattgaacaaggaatcgtggataggagtgaaacaggggtgttggacaagaaggagggggagcaggcaaaagccctgttcgagaaagtcaaaaagttcaggactcacgtcgaggagggtgacatcgtctacagactgtacatgcggcagactatcataaaagtgataaaatttatcctgatcatttgctacacagtatactatgtccataatatcaaatttgatgtggattgcacagttgatatcgaaagcttgaccgggtacaggacttacagatgtgcacacccgctcgcaaccctgttcaagatcctcgccagcttttacatttctctcgtgattttttatggtctgatatgcatgtatactctgtggtggatgcttagacggagcttgaagaagtatagtttcgagagtatacgggaggaatcctcgtattcagacatccctgacgtcaaaaatgacttcgcatttatgcttcacttaattgaccagtacgaccccctgtatagcaaacggtttgcagtttttctgtcggaggtctccgagaacaagctgagacagttaaacttaaacaacgagtggactctcgacaagctgcggcagagattgactaagaacgcgcaggataaactcgagctgcacctctttatgttgagtggcattccagataccgttttcgatctggttgagcttgaagtgctcaagctcgagctgatccccgacgtcaccatcccccccagtatagcccagctgacggggttaaaggagctgtggctctatcatacagcggctaagatagaggcccctgcacttgccttcctccgcgagaatctgcgagccttacatattaaattcaccgatatcaaggagattccactctggatttacagccttaagacgctagaggaacttcacctcactggcaacctgtccgcagagaacaataggtatattgtcattgacggcctgagagagctgaagagactgaaagtgctacggcttaaatcgaatcttagcaaactgccgcaagtggtgacggatgtaggagttcacctgcagaaactctctatcaataatgagggtacaaaactgatcgtgttgaatagtttgaaaaagatggccaacctcacagaactcgagctaattaggtgtgacttggagcggattccccacagcatcttctcattacacaacttgcaggagatcgacctgaaggacaataacctcaaaacaatagaggagatcatctccttccagcatctgcacaggctcacttgcctaaagctttggtataaccacatcgcgtatatccccattcagattgggaacctcacaaacctcgagaggctctatctaaatagaaataagatcgaaaagatacctactcaacttttctattgccgcaagctgagatatctggatctttctcataataacctgacttttcttcccgccgatattggactgttacagaacctgcagaatttagcaatcactgccaatagaatcgagacactgccacctgagcttttccagtgcagaaaattgagggcgttacatctgggcaataatgtgcttcagagcctgccgtcccgcgtgggcgagctgactaatctgacccagatcgagctgaggggcaataggcttgaatgcttacctgtcgaactgggtgagtgccccctgttgaagagatccggtctggtggtggaagaggatttattcaatacactgccccccgaggtcaaagagcgcctctggcgggccgacaaagagcaggcttag

SEQ ID NO: 201877 - DNA, 2433 bp, Artificial Sequence
  derived and/or modified sequence
atgattccagtcacagaactgaggtattttgccgatacacaacccgcatatagaatacttaagccttggtgggatgtctttaccgattacatcagtattgtaatgttgatgatcgctgtatttggaggaaccttacaagtgacccaggacaaaatgatttgcttaccttgtaagtgggtcactaaggactcatgcaatgactcttttcgcggctgggcagcgcccgggcctgagcctacgtatcctaatagcaccatcttaccaacccccgataccggaccgacaggaatcaagtatgacctcgatagacaccagtacaattacgttgatgccgtatgctacgagaacaggctgcactggtttgctaagtattttccttatttagtcttgctgcatacactgatcttcctggcgtgtagcaatttttggtttaagtttcctcggacatcatctaagctggaacatttcgtttccatcctcctgaagtgctttgattccccctggacaacaagagccctctccgagacagtggtggaggagagtgatccaaagccagcattttctaagatgaatgggtcaatggataagaagtcctccacagtgtccgaggacgtggaggcaactgtgcctatgctgcagaggactaagagtcgcattgagcaggggattgttgacaggagcgaaaccggcgttctcgacaaaaaggaaggtgagcaggcaaaagccttgtttgagaaagtgaaaaagttccgtacgcacgtggaggaaggggatatagtttacaggctgtatatgagacagactatcattaaggtcatcaagtttatattgattatttgttataccgtctattatgttcacaacatcaaatttgacgtcgattgcacagtcgatatcgagtctctgactggctatagaacatatagatgtgcgcaccccttggctaccctttttaagattttagcctctttttacatctccctggtcattttttatggattgatttgcatgtatactctttggtggatgctccggcggtccctcaagaagtactcgtttgagtctatcagagaggaaagcagttacagcgatataccggatgtcaagaatgactttgcattcatgctccacctaattgaccagtacgacccgctgtactccaagcgcttcgcggtctttctcagcgaagtctccgagaacaagcttaggcagcttaatctgaataacgagtggactctggacaaactaaggcagcgcttgacaaagaacgcccaggataagctcgagctgcacctattcatgttgtctggaatacccgacaccgtgtttgatctggtcgaactcgaagtcctcaagcttgagttaattcccgacgtcacgatccccccgagcatcgcccagctcactggactgaaggaactttggctataccataccgccgccaaaatcgaggcccctgccctggcctttcttagagagaatctgagggccttacatattaagttcacggatatcaaggaaatccccctctggatttatagtctgaagacactcgaggaactgcacttaactggcaacctctctgcagagaataatagatacattgtaatcgacgggctcagggagctcaaaaggctgaaggtgctgagactcaaaagtaacttgtctaaactgcctcaggtggtgacggacgttggagtgcatctgcagaagctaagcatcaataacgagggcaccaagctgatcgtcctgaacagccttaagaagatggccaacctaaccgaacttgagctgatccgttgcgacctggagcggattccacacagcatattctccttacacaatctgcaggaaatcgacttaaaagacaataacttgaaaaccatcgaagaaattatcagctttcagcatttacacagactgacttgtctcaagctctggtacaaccacatcgcttacatccccatccagatcggaaatctgacaaatctagagcggctgtacctgaatcgcaacaagattgaaaaaattcccacccaactgttctactgccgcaaactccggtacctggacctcagtcacaataatttgacctttctgcctgctgacattgggctcctgcagaatctgcagaacctggccatcaccgctaaccggatcgagactctgccacccgaattgtttcagtgccgtaagttacgagcgctccacctggggaataacgtcctgcagtcgctgccgtctagagtgggcgagctcacaaatctgactcagatcgaactgagagggaatcgattagagtgcctgccggtcgaattgggtgaatgccctctactgaagcggtcaggcctggtggtcgaggaggacctattcaatacgctacctccagaagtaaaagagaggctgtggcgggcagataaggagcaggcctag

SEQ ID NO: 201878 - DNA, 2433 bp, Artificial Sequence
  derived and/or modified sequence
atgatccctgtgacagagctgcgctactttgctgacacccagcctgcctaccgcatcctgaagccctggtgggatgtgttcacagactacatcagcatcgtgatgctgatgattgctgtgtttggaggcaccctgcaggtgacccaggacaagatgatctgcctgccctgcaagtgggtgaccaaggacagctgcaatgacagcttccggggctgggccgcccctggccctgagcccacctaccccaacagcaccatcctgcccaccccagacaccggccccaccggcatcaagtatgacctggacagacaccagtacaactacgtggatgctgtgtgctatgaaaatcggctgcactggtttgccaagtacttcccctacctggtgctgctgcacaccctcatcttcctggcctgcagcaacttctggttcaagttccccaggaccagcagcaagctggagcactttgtgtccatcctgctgaagtgctttgacagcccctggaccacccgggccctgtctgagaccgtggtggaggagagtgaccccaagccagccttcagcaagatgaatggctccatggacaagaagagcagcacagtgtctgaagatgtggaggccaccgtgcccatgctgcagaggaccaagagcagaattgagcagggcatcgtggacagaagtgaaacaggagtgctggacaagaaggagggggagcaggccaaggccctgtttgagaaggtgaagaagttccgcacccacgtggaggagggggacatcgtgtaccgcctgtacatgaggcagaccatcatcaaggtgatcaagttcatcctgatcatctgctacacagtgtactacgtgcacaacatcaagtttgatgtggactgcaccgtggacatcgagagcctgaccggctaccgcacctaccgctgtgcccaccccctggccaccctcttcaagatcctggccagcttctacatcagcctggtgatcttctacggcctcatctgcatgtacaccctgtggtggatgctgcggcgcagcctgaagaagtacagctttgagagcatccgggaggagagcagctacagcgacatcccagatgtgaagaatgactttgccttcatgctgcacctgattgaccagtatgaccccctgtacagcaagagatttgctgtgttcctgtctgaggtgtctgagaacaagctgcggcagctgaacctgaacaatgagtggaccctggacaagctgcggcagaggctgaccaagaatgcccaggacaagctggagctgcacctgttcatgctgagcggcatcccagacacagtgtttgacctggtggagctggaggtgctgaagctggagctgatcccagatgtgaccatcccccccagcatcgcccagctgaccggcctgaaggagctgtggctgtaccacacagctgccaagattgaggccccagccctggccttcctgcgggagaacctgcgggccctgcacatcaagttcacagacatcaaggagatccccctgtggatctacagcctgaagaccctggaggagctgcacctgaccggcaacctgtctgctgagaacaaccgctacatcgtgattgatggcctgcgggagctgaagaggctgaaggtgctgcggctgaagagcaacctgagcaagctgccccaggtggtgacagatgtgggcgtgcacctgcagaagctgagcatcaacaatgaaggcaccaagctgattgtgctgaacagcctgaagaagatggccaacctgacagagctggagctgatccgctgtgacctggagcgcatcccccacagcatcttcagcctgcacaacctgcaggagattgacctgaaggacaacaacctgaagaccatcgaggagatcatctccttccagcacctgcaccggctgacctgcctgaagctgtggtacaaccacatcgcctacatccccatccagatcggcaacctgaccaacctggagcggctgtacctgaacagaaacaagattgagaagatccccacccagctgttctactgcaggaagctgcgctacctggacctgagccacaacaacctgaccttcctgcctgctgacatcggcctgctgcagaacctgcagaacctggccatcacagccaaccgcatcgagaccctgcccccagagctgttccagtgcaggaagctgcgggccctgcacctgggcaacaacgtgctgcagagcctgcccagccgggtgggggagctgaccaacctgacccagatcgagctgcggggcaaccggctggagtgcctgcctgtggagctgggagaatgtcccctgctgaagaggagcggcctggtggtggaggaggacctcttcaacaccctgcccccagaggtgaaggagcggctgtggagggctgacaaggagcaggcctag

SEQ ID NO: 201879 - DNA, 4619 bp, Artificial Sequence
  derived and/or modified sequence
gtgcttcagaaaccaggagtttccgcctcggctcccccatgtccccttgtcatcccctgggtccccccagatcctcacccctccacacacactctcccgttcctagaggttccacctctgggctctctccttgccatttctttttcaaagatttccttagctgtcttctcctgagttcctggtccccttctcttcccttgcacccctccttcctatcgttccgatgggggcagtgccctgacttgggggcaggatccccggctaggctcttggggcctttctgggatgggatatttgggaagaccggtccggaatctaagaacccagaccctgtcccagtcctgtgcattcaggtgggcccgagggcgaggcgagatccagtgaggtccaggcctggtgcagccctagggaggcagcgtccatggagcaaaaggaatgccaggatcctgcacaggcagacgcgggccagcctcagcaccgacagccgacgcgcagatagcagagccatccttggggttgaaccatgattccggtgacagagctccgctactttgcggacacgcagccagcataccggatcctgaagccgtggtgggatgtgttcacagactacatctctatcgtcatgctgatgattgccgtcttcggggggacgctgcaggtcacccaagacaagatgatctgcctgccttgtaagtgggtcaccaaggactcctgcaatgattcgttccggggctgggcagcccctggcccggagcccacctaccccaactccaccattctgccgacccctgacacgggccccacaggcatcaagtatgacctggaccggcaccagtacaactacgtggacgctgtgtgctatgagaaccgactgcactggtttgccaagtacttcccctacctggtgcttctgcacacgctcatcttcctggcctgcagcaacttctggttcaaattcccgcgcaccagctcgaagctggagcactttgtgtctatcctgctgaagtgcttcgactcgccctggaccacgagggccctgtcggagacagtggtggaggagagcgaccccaagccggccttcagcaagatgaatgggtccatggacaaaaagtcatcgaccgtcagtgaggacgtggaggccaccgtgcccatgctgcagcggaccaagtcacggatcgagcagggtatcgtggaccgctcagagacgggcgtgctggacaagaaggagggggagcaagccaaggcgctgtttgagaaggtgaagaagttccggacccatgtggaggagggggacattgtgtaccgcctctacatgcggcagaccatcatcaaggtgatcaagttcatcctcatcatctgctacaccgtctactacgtgcacaacatcaagttcgacgtggactgcaccgtggacattgagagcctgacgggctaccgcacctaccgctgtgcccaccccctggccacactcttcaagatcctggcgtccttctacatcagcctagtcatcttctacggcctcatctgcatgtatacactgtggtggatgctacggcgctccctcaagaagtactcgtttgagtcgatccgtgaggagagcagctacagcgacatccccgacgtcaagaacgacttcgccttcatgctgcacctcattgaccaatacgacccgctctactccaagcgcttcgccgtcttcctgtcggaggtgagtgagaacaagctgcggcagctgaacctcaacaacgagtggacgctggacaagctccggcagcggctcaccaagaacgcgcaggacaagctggagctgcacctgttcatgctcagtggcatccctgacactgtgtttgacctggtggagctggaggtcctcaagctggagctgatccccgacgtgaccatcccgcccagcattgcccagctcacgggcctcaaggagctgtggctctaccacacagcggccaagattgaagcgcccgcgctggccttcctgcgtgagaacctgcgggcgctgcacatcaagttcaccgacatcaaggagatcccgctgtggatctatagcctgaagacactggaggagctgcacctgacgggcaacctgagcgcggagaacaaccgctacatcgtcatcgacgggctgcgggagctcaaacgcctcaaggtgctgcggctcaagagcaacctaagcaagctgccacaggtggtcacagatgtgggcgtgcacctgcagaagctgtccatcaacaatgagggcaccaagctcatcgtcctcaacagcctcaagaagatggcgaacctgactgagctggagctgatccgctgtgacctggagcgcatcccccactccatcttcagcctccacaacctgcaggagattgacctcaaggacaacaacctcaagaccatcgaggagatcatcagcttccagcacctgcaccgcctcacctgccttaagctgtggtacaaccacatcgcctacatccccatccagatcggcaacctcaccaacctggagcgcctctacctgaaccgcaacaagatcgagaagatccccacccagctcttctactgccgcaagctgcgctacctggacctcagccacaacaacctgaccttcctccctgccgacatcggcctcctgcagaacctccagaacctagccatcacggccaaccggatcgagacgctccctccggagctcttccagtgccggaagctgcgggccctgcacctgggcaacaacgtgctgcagtcactgccctccagggtgggcgagctgaccaacctgacgcagatcgagctgcggggcaaccggctggagtgcctgcctgtggagctgggcgagtgcccactgctcaagcgcagcggcttggtggtggaggaggacctgttcaacacactgccacccgaggtgaaggagcggctgtggagggctgacaaggagcaggcctgagcgaggccggcccagcacagcaagcagcaggaccgctgcccagtcctcaggcccggaggggcaggcctagcttctcccagaactcccggacagccaggacagcctcgtggctgggcaggagcctggggccgcttgtgagtcaggccagagcgagaggacagtatctgtggggctggccccttttctccctctgagactcacgtcccccagggcaagtgcttgtggaggagagcaagtctcaagagcgcagtatttggataatcagggtctcctccctggaggccagctctgccccaggggctgagctgccaccagaggtcctgggaccctcactttagttcttggtatttatttttctccatctcccacctccttcatccagataacttatacattcccaagaaagttcagcccagatggaaggtgttcagggaaaggtgggctgccttttccccttgtccttatttagcgatgccgccgggcatttaacacccacctggacttcagcagagtggtccggggcgaaccagccatgggacggtcacccagcagtgccgggctgggctctgcggtgcggtccacgggagagcaggcctccagctggaaaggccaggcctggagcttgcctcttcagtatttgtggcagttttagttttttgtttttttttttttaatcaaaaaacaatttttttaaaaaaaaagctttgaaaatggatggtttgggtattaaaaagaaaaaaaaaacttaaaaaaaaaaagacactaacggccagtgagttggagtctcagggcagggtggcagtttcccttgagcaaagcagccagacgttgaactgtgtttcctttccctgggcgcagggtgcagggtgtcttccggatctggtgtgaccttggtccaggagttctatttgttcctggggagggaggtttttttgtttgttttttgggtttttttggtgtcttgttttctttctcctccatgtgtcttggcaggcactcatttctgtggctgtcggccagagggaatgttctggagctgccaaggagggaggagactcgggttggctaatccccggatgaacggtgctccattcgcacctcccctcctcgtgcctgccctgcctctccacgcacagtgttaaggagccaagaggagccacttcgcccagactttgtttccccaccgcctgcggcatgggtgtgtccagtgccaccgctggcctccgctgcttccatcagccctgtcaccacctggtccttcatgaagagcagacacttagaggctggtcgggaatggggaggtcgcccctgggagggcaggcgttggttccaagccggttcccgtccctggcgcctggagtgcacacagcccagtcggcacctggtggctggaagccaccctgctttagatcactcgggtccccaccttagaagggtccccgccttagatcaatcacgtggacactaaggcacgttttagagtctcttgtcttaatgattatgtccatccgtctgtccgtccatttgtgttttctgcgtcgtgtcattggatataatcctcagaaataatgcacactagcctctgacaaccatgaagcaaaaatccgttacatgtgggtctgaacttgtagactcggtcacagtatcaaataaaatctataac

SEQ ID NO: 201880 - DNA, 4161 bp, Artificial Sequence
  derived and/or modified sequence
cggagcggccggggcctggggctgcctgccgggcggccgggcgcggcgagcccaggttgaaccatgattccggtgacagagctccgctactttgcggacacgcagccagcataccggatcctgaagccgtggtgggatgtgttcacagactacatctctatcgtcatgctgatgattgccgtcttcggggggacgctgcaggtcacccaagacaagatgatctgcctgccttgtaagtgggtcaccaaggactcctgcaatgattcgttccggggctgggcagcccctggcccggagcccacctaccccaactccaccattctgccgacccctgacacgggccccacaggcatcaagtatgacctggaccggcaccagtacaactacgtggacgctgtgtgctatgagaaccgactgcactggtttgccaagtacttcccctacctggtgcttctgcacacgctcatcttcctggcctgcagcaacttctggttcaaattcccgcgcaccagctcgaagctggagcactttgtgtctatcctgctgaagtgcttcgactcgccctggaccacgagggccctgtcggagacagtggtggaggagagcgaccccaagccggccttcagcaagatgaatgggtccatggacaaaaagtcatcgaccgtcagtgaggacgtggaggccaccgtgcccatgctgcagcggaccaagtcacggatcgagcagggtatcgtggaccgctcagagacgggcgtgctggacaagaaggagggggagcaagccaaggcgctgtttgagaaggtgaagaagttccggacccatgtggaggagggggacattgtgtaccgcctctacatgcggcagaccatcatcaaggtgatcaagttcatcctcatcatctgctacaccgtctactacgtgcacaacatcaagttcgacgtggactgcaccgtggacattgagagcctgacgggctaccgcacctaccgctgtgcccaccccctggccacactcttcaagatcctggcgtccttctacatcagcctagtcatcttctacggcctcatctgcatgtatacactgtggtggatgctacggcgctccctcaagaagtactcgtttgagtcgatccgtgaggagagcagctacagcgacatccccgacgtcaagaacgacttcgccttcatgctgcacctcattgaccaatacgacccgctctactccaagcgcttcgccgtcttcctgtcggaggtgagtgagaacaagctgcggcagctgaacctcaacaacgagtggacgctggacaagctccggcagcggctcaccaagaacgcgcaggacaagctggagctgcacctgttcatgctcagtggcatccctgacactgtgtttgacctggtggagctggaggtcctcaagctggagctgatccccgacgtgaccatcccgcccagcattgcccagctcacgggcctcaaggagctgtggctctaccacacagcggccaagattgaagcgcccgcgctggccttcctgcgtgagaacctgcgggcgctgcacatcaagttcaccgacatcaaggagatcccgctgtggatctatagcctgaagacactggaggagctgcacctgacgggcaacctgagcgcggagaacaaccgctacatcgtcatcgacgggctgcgggagctcaaacgcctcaaggtgctgcggctcaagagcaacctaagcaagctgccacaggtggtcacagatgtgggcgtgcacctgcagaagctgtccatcaacaatgagggcaccaagctcatcgtcctcaacagcctcaagaagatggcgaacctgactgagctggagctgatccgctgtgacctggagcgcatcccccactccatcttcagcctccacaacctgcaggagattgacctcaaggacaacaacctcaagaccatcgaggagatcatcagcttccagcacctgcaccgcctcacctgccttaagctgtggtacaaccacatcgcctacatccccatccagatcggcaacctcaccaacctggagcgcctctacctgaaccgcaacaagatcgagaagatccccacccagctcttctactgccgcaagctgcgctacctggacctcagccacaacaacctgaccttcctccctgccgacatcggcctcctgcagaacctccagaacctagccatcacggccaaccggatcgagacgctccctccggagctcttccagtgccggaagctgcgggccctgcacctgggcaacaacgtgctgcagtcactgccctccagggtgggcgagctgaccaacctgacgcagatcgagctgcggggcaaccggctggagtgcctgcctgtggagctgggcgagtgcccactgctcaagcgcagcggcttggtggtggaggaggacctgttcaacacactgccacccgaggtgaaggagcggctgtggagggctgacaaggagcaggcctgagcgaggccggcccagcacagcaagcagcaggaccgctgcccagtcctcaggcccggaggggcaggcctagcttctcccagaactcccggacagccaggacagcctcgtggctgggcaggagcctggggccgcttgtgagtcaggccagagcgagaggacagtatctgtggggctggccccttttctccctctgagactcacgtcccccagggcaagtgcttgtggaggagagcaagtctcaagagcgcagtatttggataatcagggtctcctccctggaggccagctctgccccaggggctgagctgccaccagaggtcctgggaccctcactttagttcttggtatttatttttctccatctcccacctccttcatccagataacttatacattcccaagaaagttcagcccagatggaaggtgttcagggaaaggtgggctgccttttccccttgtccttatttagcgatgccgccgggcatttaacacccacctggacttcagcagagtggtccggggcgaaccagccatgggacggtcacccagcagtgccgggctgggctctgcggtgcggtccacgggagagcaggcctccagctggaaaggccaggcctggagcttgcctcttcagtatttgtggcagttttagttttttgtttttttttttttaatcaaaaaacaatttttttaaaaaaaaagctttgaaaatggatggtttgggtattaaaaagaaaaaaaaaacttaaaaaaaaaaagacactaacggccagtgagttggagtctcagggcagggtggcagtttcccttgagcaaagcagccagacgttgaactgtgtttcctttccctgggcgcagggtgcagggtgtcttccggatctggtgtgaccttggtccaggagttctatttgttcctggggagggaggtttttttgtttgttttttgggtttttttggtgtcttgttttctttctcctccatgtgtcttggcaggcactcatttctgtggctgtcggccagagggaatgttctggagctgccaaggagggaggagactcgggttggctaatccccggatgaacggtgctccattcgcacctcccctcctcgtgcctgccctgcctctccacgcacagtgttaaggagccaagaggagccacttcgcccagactttgtttccccaccgcctgcggcatgggtgtgtccagtgccaccgctggcctccgctgcttccatcagccctgtcaccacctggtccttcatgaagagcagacacttagaggctggtcgggaatggggaggtcgcccctgggagggcaggcgttggttccaagccggttcccgtccctggcgcctggagtgcacacagcccagtcggcacctggtggctggaagccaccctgctttagatcactcgggtccccaccttagaagggtccccgccttagatcaatcacgtggacactaaggcacgttttagagtctcttgtcttaatgattatgtccatccgtctgtccgtccatttgtgttttctgcgtcgtgtcattggatataatcctcagaaataatgcacactagcctctgacaaccatgaagcaaaaatccgttacatgtgggtctgaacttgtagactcggtcacagtatcaaataaaatctataacag

SEQ ID NO: 201881 - DNA, 4355 bp, Artificial Sequence
  derived and/or modified sequence
acttccggggcggaggaggctgagtggtgcagtgagggacaaacaaaaggaggcgccggagcagcgctgcggccggcggcgggacggagcggccggggcctggggctgcctgccgggcggccgggcgcggcgagcccagggaggcagcgtccatggagcaaaaggaatgccaggatcctgcacaggcagacgcgggccagcctcagcaccgacagccgacgcgcagatagcagagccatccttggggttgaaccatgattccggtgacagagctccgctactttgcggacacgcagccagcataccggatcctgaagccgtggtgggatgtgttcacagactacatctctatcgtcatgctgatgattgccgtcttcggggggacgctgcaggtcacccaagacaagatgatctgcctgccttgtaagtgggtcaccaaggactcctgcaatgattcgttccggggctgggcagcccctggcccggagcccacctaccccaactccaccattctgccgacccctgacacgggccccacaggcatcaagtatgacctggaccggcaccagtacaactacgtggacgctgtgtgctatgagaaccgactgcactggtttgccaagtacttcccctacctggtgcttctgcacacgctcatcttcctggcctgcagcaacttctggttcaaattcccgcgcaccagctcgaagctggagcactttgtgtctatcctgctgaagtgcttcgactcgccctggaccacgagggccctgtcggagacagtggtggaggagagcgaccccaagccggccttcagcaagatgaatgggtccatggacaaaaagtcatcgaccgtcagtgaggacgtggaggccaccgtgcccatgctgcagcggaccaagtcacggatcgagcagggtatcgtggaccgctcagagacgggcgtgctggacaagaaggagggggagcaagccaaggcgctgtttgagaaggtgaagaagttccggacccatgtggaggagggggacattgtgtaccgcctctacatgcggcagaccatcatcaaggtgatcaagttcatcctcatcatctgctacaccgtctactacgtgcacaacatcaagttcgacgtggactgcaccgtggacattgagagcctgacgggctaccgcacctaccgctgtgcccaccccctggccacactcttcaagatcctggcgtccttctacatcagcctagtcatcttctacggcctcatctgcatgtatacactgtggtggatgctacggcgctccctcaagaagtactcgtttgagtcgatccgtgaggagagcagctacagcgacatccccgacgtcaagaacgacttcgccttcatgctgcacctcattgaccaatacgacccgctctactccaagcgcttcgccgtcttcctgtcggaggtgagtgagaacaagctgcggcagctgaacctcaacaacgagtggacgctggacaagctccggcagcggctcaccaagaacgcgcaggacaagctggagctgcacctgttcatgctcagtggcatccctgacactgtgtttgacctggtggagctggaggtcctcaagctggagctgatccccgacgtgaccatcccgcccagcattgcccagctcacgggcctcaaggagctgtggctctaccacacagcggccaagattgaagcgcccgcgctggccttcctgcgtgagaacctgcgggcgctgcacatcaagttcaccgacatcaaggagatcccgctgtggatctatagcctgaagacactggaggagctgcacctgacgggcaacctgagcgcggagaacaaccgctacatcgtcatcgacgggctgcgggagctcaaacgcctcaaggtgctgcggctcaagagcaacctaagcaagctgccacaggtggtcacagatgtgggcgtgcacctgcagaagctgtccatcaacaatgagggcaccaagctcatcgtcctcaacagcctcaagaagatggcgaacctgactgagctggagctgatccgctgtgacctggagcgcatcccccactccatcttcagcctccacaacctgcaggagattgacctcaaggacaacaacctcaagaccatcgaggagatcatcagcttccagcacctgcaccgcctcacctgccttaagctgtggtacaaccacatcgcctacatccccatccagatcggcaacctcaccaacctggagcgcctctacctgaaccgcaacaagatcgagaagatccccacccagctcttctactgccgcaagctgcgctacctggacctcagccacaacaacctgaccttcctccctgccgacatcggcctcctgcagaacctccagaacctagccatcacggccaaccggatcgagacgctccctccggagctcttccagtgccggaagctgcgggccctgcacctgggcaacaacgtgctgcagtcactgccctccagggtgggcgagctgaccaacctgacgcagatcgagctgcggggcaaccggctggagtgcctgcctgtggagctgggcgagtgcccactgctcaagcgcagcggcttggtggtggaggaggacctgttcaacacactgccacccgaggtgaaggagcggctgtggagggctgacaaggagcaggcctgagcgaggccggcccagcacagcaagcagcaggaccgctgcccagtcctcaggcccggaggggcaggcctagcttctcccagaactcccggacagccaggacagcctcgtggctgggcaggagcctggggccgcttgtgagtcaggccagagcgagaggacagtatctgtggggctggccccttttctccctctgagactcacgtcccccagggcaagtgcttgtggaggagagcaagtctcaagagcgcagtatttggataatcagggtctcctccctggaggccagctctgccccaggggctgagctgccaccagaggtcctgggaccctcactttagttcttggtatttatttttctccatctcccacctccttcatccagataacttatacattcccaagaaagttcagcccagatggaaggtgttcagggaaaggtgggctgccttttccccttgtccttatttagcgatgccgccgggcatttaacacccacctggacttcagcagagtggtccggggcgaaccagccatgggacggtcacccagcagtgccgggctgggctctgcggtgcggtccacgggagagcaggcctccagctggaaaggccaggcctggagcttgcctcttcagtatttgtggcagttttagttttttgtttttttttttttaatcaaaaaacaatttttttaaaaaaaaagctttgaaaatggatggtttgggtattaaaaagaaaaaaaaaacttaaaaaaaaaaagacactaacggccagtgagttggagtctcagggcagggtggcagtttcccttgagcaaagcagccagacgttgaactgtgtttcctttccctgggcgcagggtgcagggtgtcttccggatctggtgtgaccttggtccaggagttctatttgttcctggggagggaggtttttttgtttgttttttgggtttttttggtgtcttgttttctttctcctccatgtgtcttggcaggcactcatttctgtggctgtcggccagagggaatgttctggagctgccaaggagggaggagactcgggttggctaatccccggatgaacggtgctccattcgcacctcccctcctcgtgcctgccctgcctctccacgcacagtgttaaggagccaagaggagccacttcgcccagactttgtttccccaccgcctgcggcatgggtgtgtccagtgccaccgctggcctccgctgcttccatcagccctgtcaccacctggtccttcatgaagagcagacacttagaggctggtcgggaatggggaggtcgcccctgggagggcaggcgttggttccaagccggttcccgtccctggcgcctggagtgcacacagcccagtcggcacctggtggctggaagccaccctgctttagatcactcgggtccccaccttagaagggtccccgccttagatcaatcacgtggacactaaggcacgttttagagtctcttgtcttaatgattatgtccatccgtctgtccgtccatttgtgttttctgcgtcgtgtcattggatataatcctcagaaataatgcacactagcctctgacaaccatgaagcaaaaatccgttacatgtgggtctgaacttgtagactcggtcacagtatcaaataaaatctataacagaaa

SEQ ID NO: 201882 - DNA, 2433 bp, Artificial Sequence
  derived and/or modified sequence
atgatccccgtgaccgagctgcggtacttcgccgacacccagcccgcgtatcgcattctgaagccatggtgggacgtcttcacagactacatctctatagtgatgctgatgattgctgtgttcggcggaactctgcaggtgacacaagacaagatgatttgcttgccttgtaagtgggtgaccaaggactcctgcaacgactcttttcgcggttgggccgctcctggacccgaaccaacctacccaaactctaccatcttacctactcccgatactggcccaacaggcatcaagtacgacctggatcgtcaccagtacaattacgtagatgctgtgtgttacgagaacaggttgcattggtttgctaaatacttcccatacctggtactgcttcataccttaatcttcctggcctgcagcaacttctggttcaaattcccgagaacctcatccaagctagagcacttcgtgtcgatccttctcaagtgtttcgattccccttggacaacccgagcactttctgagaccgtggtcgaggagtcggatccaaagcccgctttcagcaagatgaatgggagtatggacaaaaaatcttcgacagttagcgaggatgttgaggccacagttcccatgctacagcgaactaagagtcggattgagcagggcatcgtcgacaggtcagaaactggcgttctggataagaaagaaggggagcaggcaaaagcactgtttgagaaagtcaaaaagtttcggacacacgtggaggaaggagatatcgtataccgcttatacatgcggcagaccatcatcaaagtcattaaattcattctcatcatctgctatactgtttattatgttcataacatcaagtttgatgtggactgcaccgtagacatcgagtccctgacaggttatagaacctacagatgtgctcaccctctcgctaccctgtttaagattctcgcatccttttatatttctctagtgatcttctacggactgatttgcatgtacacactgtggtggatgttgcgcaggtctctgaagaagtattcattcgaatcgattagagaagagtcctcatactctgatatacctgacgtcaagaacgactttgcctttatgctccacctgattgaccagtacgatcccctctacagtaagcgttttgccgtgtttctgagtgaggtgtcagagaataaactcaggcagttgaaccttaataatgagtggactttagataaattgcgccaaagactgaccaagaacgcccaggacaaactggagctccacctgtttatgttatctggaatcccagatacggtattcgatctggttgagctggaggttctgaagttagaattgattcccgatgttactatacccccttctatcgcgcagcttaccggcctgaaagaactctggctgtaccacactgctgcaaaaatcgaggccccagccctggcttttctgcgcgagaatcttagagctctgcacataaaatttaccgacatcaaagagatacccctctggatctactccctgaaaactttagaggagctccatctaaccggaaacctcagcgctgagaataatcggtacattgttatcgacggactccgggaactgaaacggcttaaagtcctgaggctcaaaagcaatctgagtaagctgccgcaagtcgtcaccgacgtcggcgtccatcttcaaaagctctctataaacaacgagggaacgaaactcatagtgttaaactccctgaaaaagatggctaatttaactgaactggagctcatacggtgcgacctggagcgcatccctcactctatcttttcgctccacaatcttcaagagattgacctgaaggataacaatctcaagactatcgaggagatcattagcttccagcacctccaccgacttacatgcctgaaactctggtataaccacatcgcttacattcccatccagattgggaatctgaccaacctggagcgtttatatctgaataggaataaaatcgagaaaatccctacacagttgttttattgcaggaagctccgctacctcgacctgtctcataataatttgactttcttgcctgccgacatcggactgctgcaaaacttacagaacctcgctatcactgctaatcggatcgaaacactgccgcctgagctctttcagtgccgcaaactgagagccctccatcttggcaacaatgtactgcaatccctaccttcccgagtcggagagctgaccaaccttactcagatagagctgcggggcaacaggttagagtgcctgcccgtggagctgggtgagtgtcccctccttaagcggtctgggctagtggtggaagaggacctgtttaatactctccctccagaggtgaaggagagactgtggcgagccgacaaggagcaggcgtag

SEQ ID NO: 201883 - DNA, 2433 bp, Artificial Sequence
  derived and/or modified sequence
atgatccccgtgaccgagctgcggtacttcgccgacacccagcccgcctatagaatattgaaaccatggtgggacgtcttcacagactatatttccatcgtgatgttgatgatagcagtgtttgggggtacactgcaggtgacacaggataaaatgatctgtttaccatgcaagtgggtgaccaaggattcttgcaatgattcttttcggggatgggctgcacccggccctgagccaacgtacccgaattccacaatcctgccaactcccgacaccggtcccactgggataaaatacgacctggatagacaccaatataactatgtcgacgccgtttgctacgagaaccgtctccactggtttgccaaatacttcccatacctcgtcttgctgcacacccttatctttctagcctgtagtaacttctggtttaaattccccagaacctcttctaaactggagcatttcgtaagcatcctgttgaagtgctttgattccccctggacgactcgggccctgtccgagactgtcgttgaggaaagcgatcccaagccagccttctctaagatgaacggatctatggataagaagtccagcacagtctccgaggatgtggaggccacagtgcccatgttgcagcgcacaaaatcccgaattgaacagggaattgttgaccgctccgaaacaggagttctggataagaaggagggtgagcaagctaaagcactattcgaaaaggtcaagaagtttcggacccacgtggaagagggcgacatcgtgtaccggttgtacatgcggcagacaatcatcaaggtgatcaaatttatcttgatcatttgctacactgtctattacgtgcacaatatcaaattcgatgtcgattgcaccgtggacattgagagcctcactgggtatcgaacttatagatgcgcccacccactcgctactctcttcaaaattcttgccagcttttatatctccctggtcatattctatgggctcatctgcatgtatactttgtggtggatgcttaggaggtccctaaagaaatatagctttgagagcatcagagaagaatctagctactccgacattcctgacgtgaagaacgattttgcatttatgttacatttgatagatcaatatgatcctctttattcaaaaaggtttgccgtcttcctcagcgaggtgagcgagaataaactgaggcagctcaacttgaacaacgaatggacattggataaattaagacagcggctgaccaagaacgcccaagataagctagagttgcaccttttcatgctttctgggatccccgatacagtgttcgaccttgttgagctcgaggttcttaagctggagctgatacctgatgtgactattcctccatccatcgcccagctgacgggacttaaagagctctggctctatcataccgcggccaagattgaagctcctgcactagcattcctgcgcgagaatctgagagccttgcacatcaaattcaccgatattaaggaaatccctctttggatatacagtttaaagaccctcgaagagctccacttgaccggcaatctgtccgcagaaaataacaggtacatcgtgattgatgggctccgggaactgaaaagactgaaggtcctgaggctcaagtctaacctttctaagcttcctcaggtggtcactgatgtcggggtccatttgcagaagctctctataaacaatgagggtaccaaattgattgtgttaaactcgctgaaaaagatggcgaatttgaccgagctcgagctgatccgctgcgatctggaacgaatccctcattctatcttctccttgcacaacctccaagaaatcgatctcaaagacaacaatctgaagactatcgaagagatcatatccttccagcacctccaccggctcacctgtctaaagttatggtacaatcatattgcctatatacctattcaaattggaaacctgaccaacttagaacggctgtacctaaataggaacaagatcgagaaaatcccaacccagctattctattgtaggaagctgagatacctcgacctgtcacataataacctgacttttctgccagccgacataggcctgttacagaatttgcagaacctcgccatcacagcgaatcgaatcgagaccctgccaccagagctgttccaatgcagaaaactgagagccttgcatcttggcaacaacgtcttgcagtccttgccatcaagggtcggagagctaaccaacctaactcagatcgaactccgcggaaatcgattggagtgcttgcctgtagagctgggggagtgtcctttgctgaaacggagcggcctagtggttgaggaagacctgtttaacactctcccccccgaggtgaaagagcgcctctggcgcgccgacaaggagcaagcatag

SEQ ID NO: 201884 - DNA, 2433 bp, Artificial Sequence
  derived and/or modified sequence
atgatccccgtgaccgagctgcggtacttcgccgacacccagcccgcctatcgtatcctgaagccatggtgggacgtgttcacagattatatcagtatagtcatgcttatgatcgccgtctttggcggtacactgcaagttacccaggataagatgatatgcctgccctgtaagtgggtgaccaaagattcttgcaatgactccttcaggggttgggccgcgcctggtcccgaacccacctatcccaacagtaccatcttaccaacaccggacaccggaccaactggcatcaaatacgatctcgatcgccaccagtacaactatgtggatgccgtctgttatgaaaataggttgcattggttcgccaagtactttccgtacctcgttctgctgcacacccttattttcctcgcctgttccaatttttggttcaaatttcccaggacctcaagtaaactagaacatttcgtttcaatcttgctgaagtgcttcgactcaccttggactacccgagcgctaagcgaaacagtggtagaagaatccgaccccaagcctgccttttccaaaatgaacggcagcatggataagaagtcatctacagtgagcgaagacgttgaagccaccgttcctatgctccagagaactaagagtagaattgaacaaggcatcgtagaccgctctgagacgggcgttctcgataagaaggagggggaacaggccaaggctctgtttgaaaaggtcaagaaattcagaacacacgtcgaggagggcgatatcgtatatagactctacatgaggcagaccatcataaaggtgattaaattcattctgatcatttgctacactgtctactacgtgcataatatcaagttcgacgtggattgcactgtcgacatcgagtctctgacgggctatcgcacgtatagatgcgctcaccctctggcaaccctatttaagatcctggccagtttctacatctccttagtaattttctacgggctgatatgcatgtataccctgtggtggatgctccgtcgctctctgaagaaatactcctttgagtctattagggaggagtcttcctactcagacatccctgacgtaaagaatgatttcgcgtttatgttgcaccttattgaccagtatgaccctctctattctaagagatttgccgtcttcttatcagaagtatcagagaataagttgaggcagctaaacctgaataatgagtggaccctggacaaactgaggcagagactcaccaagaacgctcaggataagttggagcttcacctgttcatgttgtcaggtattcccgataccgtgttcgacctggtggagttggaggtcctgaagcttgaattgattccagatgtgactattcctcccagcatagcccaattgactggattaaaggagctgtggctttaccatactgcagccaagattgaagcccccgccctcgcctttttgagggagaacctgcgggcactgcatatcaagtttacagacatcaaggaaataccactgtggatttattcattgaagacccttgaagagctgcacttgacaggcaacttgtctgcggagaataaccggtacattgtgatcgacggccttcgcgagcttaagagactgaaagttcttcggctgaagtctaacctgtctaagcttccacaggtcgttactgacgtgggagttcacctgcaaaaactgagtattaacaatgaaggaaccaagctgattgtcttaaacagcctgaagaagatggccaatctgacagagttggagctgatccgctgtgacttggagcgtataccacattccatcttcagcctacataatctgcaagagatcgaccttaaggacaataacttgaagaccatagaagaaattatctctttccagcacctgcacaggctgacttgcctgaagctctggtacaatcatattgcctatatccccatccagatcggcaatctcactaacctggagagactgtaccttaatagaaacaagattgagaaaatccctacacagctgttctactgtagaaaacttaggtacctggacctcagccacaacaacttgacatttcttccggctgatataggactgttgcagaaccttcagaatttggcaattactgctaaccggatcgaaacactgcctcctgagctgtttcaatgcaggaaactgcgagcgttgcacctggggaacaatgtcctgcagagcctacctagtagggtcggagaactgacgaatctgacccagattgagctacggggcaatcgtttagagtgcctgcccgtagaactgggcgagtgccccttgctcaagcggtctggattggtggtcgaagaggatctctttaataccttgcctccagaagttaaggaacgtctatggcgcgccgacaaggaacaggcttag

SEQ ID NO: 201885 - DNA, 2433 bp, Artificial Sequence
  derived and/or modified sequence
atgattccagttacagaattacgctatttcgctgatacacagcccgcttaccggattctcaaaccctggtgggatgttttcactgattacatatccattgtgatgttgatgatcgcagtgtttggcggaacactacaggtgacccaggacaagatgatctgtctgccctgtaagtgggtgacgaaggattcttgcaacgatagttttagagggtgggccgctcctggaccggagcccacttaccctaattctaccattctgcccacccccgacacgggacccacaggcatcaagtacgatctggatagacatcaatataattacgtggatgctgtgtgctatgagaataggttgcattggtttgccaagtatttcccgtatctggtcctgctgcacacactcatcttccttgcttgcagcaacttttggtttaagttcccgaggacatcctcgaagctagaacacttcgtcagtatccttctcaaatgctttgacagcccatggaccacacgcgctctgtcagaaactgtggtagaggagagtgacccgaaacccgcattctccaaaatgaatgggagcatggacaagaaatccagtacggtgagcgaggacgttgaagctactgttccgatgctgcaaaggacgaaaagtcggattgaacaggggattgtggaccgctcggagaccggcgtgctggataaaaaagaaggcgaacaggccaaagccctgttcgagaaggtgaaaaagttcagaacccacgttgaggaaggagatatcgtgtaccgattatacatgagacaaaccatcatcaaggtgattaaatttattcttatcatctgttacactgtatactacgtgcacaacattaagtttgacgtggattgcacggtcgacatcgaatctctaacaggctatcgtacatatcggtgcgctcatccactggccaccctttttaagatccttgcaagtttttacatctctctggtgattttctatgggctgatttgcatgtacaccttgtggtggatgctcaggcggtccctgaaaaagtacagttttgagtctatccgggaggagtcctcttattccgacattccggatgtgaagaacgatttcgcctttatgctccacctgatagatcagtacgacccactttatagtaaacgctttgccgtattcctcagtgaggttagtgaaaataagctgagacagctgaatctaaataatgaatggaccttggacaaattacgccagagactgactaaaaatgcacaggataagctggaactgcatctctttatgttgtcaggtattccggatactgtctttgatctggtggagctggaagtgctgaaactcgaacttatccctgacgtgacaatacccccttcgatcgctcagctcacaggactaaaggagttatggttgtatcatactgcggctaaaattgaggctcccgcactagcatttctcagggaaaacctgagagcattgcacattaaattcactgatatcaaagaaatccccctatggatctactcgttaaaaaccctcgaagaactgcacctgaccggcaatctcagcgctgagaataacagatacatcgtaatcgacggccttagagaacttaaacggttaaaagtgcttaggctcaagagcaatctgtcaaagctcccccaggtcgtcaccgacgtcggggtgcatctgcaaaagctgtcaatcaacaatgaaggaacaaagctgatcgttctcaattccctgaagaagatggccaaccttaccgagctggaactaattcgctgcgatctggaacgcatcccccactctatcttctccctgcataatctgcaggagatcgatcttaaggataacaatctgaaaactatcgaggagattatttcatttcagcacctgcaccgtctgacatgcctgaaattatggtataatcatatcgcatacatacccatccaaattggtaatcttacgaatttggagaggttatacttgaaccggaataagatcgagaaaatacctacccagctgttttactgccgcaaattacgttatctggatctaagccataacaaccttactttcctgccagccgacatcggtttgctgcaaaatctacagaacttggcgattaccgcgaatcgaattgagacacttcctccggaactcttccagtgtcgtaagctccgagcactccacttgggtaataatgtactgcagagtctgcctagcagagttggcgagctgacaaacctaacacagattgagctgagagggaatagactggagtgcctgcccgtggagctgggtgagtgtcccctacttaaacgctcaggactggtggtagaggaagacctgtttaacactctgccccctgaagtgaaagaacgcctgtggagagctgataaggaacaggcatag

SEQ ID NO: 201886 - DNA, 2433 bp, Artificial Sequence
  derived and/or modified sequence
atgattccagttaccgagctcagatatttcgccgatacccagccggcatatcgcatccttaagccctggtgggatgtattcacagactatatatccatcgtaatgctcatgatcgcagtgttcggagggactctgcaggtgacgcaagataagatgatttgtctgccttgtaagtgggtgactaaagacagctgcaacgacagctttcggggatgggccgctccgggtcctgagcccacgtatccgaacagcactatcctgcctacccctgataccgggcctaccgggattaagtacgacctggatagacatcagtacaactacgtcgatgccgtgtgctacgaaaacaggcttcattggttcgcaaagtacttcccctacctggttcttctgcacacgctgatcttcctggcgtgctccaatttttggtttaagtttcctcggacgtcaagcaagctcgagcattttgtgtcaattctgctgaagtgcttcgattctccctggaccacacgcgcattgtccgagactgtagtggaggagagcgaccctaaacctgcgtttagcaagatgaacggatcaatggacaagaaatctagtactgtgtctgaagatgttgaggcaaccgtgcctatgttgcagcggactaagtctagaatagaacaaggcatcgtggatagatccgaaacaggggtgctggataaaaaagaaggagaacaggcaaaagcactgttcgaaaaagtgaagaagtttaggacacatgtcgaggagggagacatcgtgtatcgtctatatatgaggcagacgattataaaggtgatcaaatttatcttgatcatttgttacacagtgtactatgtgcataatatcaagttcgatgtggattgtaccgtggacatcgaaagccttacaggatacaggacttaccgctgcgcacatccccttgcaaccttattcaaaatcttggcatcgttctacatctcattggtgatcttctacggcctgatctgcatgtatactctctggtggatgctgagaagaagcctgaaaaaatatagcttcgaatccattagggaggagtcctcctactctgatatccccgacgtaaagaatgattttgccttcatgctgcacttgatagaccaatacgatcccctgtatagcaagcggttcgcagtctttttaagcgaggtcagcgagaacaaattacgccagttaaatttgaacaatgagtggacactggataagctgaggcagagactcaccaaaaacgcacaggacaaactagaactgcacctgtttatgctgtccggcatccccgacactgtctttgacttggtcgagttggaagtccttaagctcgaactgattccagacgtgaccatccccccttcaattgctcagctgactgggcttaaggagctttggctttaccataccgcggcaaaaattgaggctcctgctctggctttcctccgcgagaatcttcgcgcactgcatattaaatttactgatattaaggagataccactttggatctattcccttaagacgcttgaagagttgcatctcacaggcaatctgagcgcggagaataataggtatattgtgatcgacgggctgagggagctgaaacgtctgaaagtcctacggcttaagtcgaacctctctaagctgccacaggtggtgacggacgtgggcgtgcatctgcaaaaattgagcataaataatgaaggtactaagttaatcgtgctgaacagtctgaagaaaatggctaacctgaccgaactggaactcatccgatgtgacctggaacgaatcccacacagtatcttctcccttcacaatctgcaggagatagatctgaaagataacaacctcaagacgatagaggaaattatatctttccagcacctgcatcgacttacttgtctgaaattatggtacaaccatattgcctacattcctattcaaattggtaatctgaccaacttggagcgactctacttgaacaggaataaaatcgaaaaaatcccaacccagctgttttactgccgaaaactccggtacctggacctctcccataataacctgactttcctgcccgcagacattggccttctgcagaatctccagaatctcgccatcactgccaaccgaattgagaccctcccacccgagctcttccagtgtagaaagctcagagcactgcacttgggaaataacgtacttcagtcactgccctccagagtgggagaactgacgaatctgacacaaattgagcttagaggcaatagacttgagtgcctccccgtcgagcttggagagtgcccacttctgaagcgcagtggcctggtggtggaggaagatctgttcaacaccctgcccccagaagtgaaggagcgcctgtggcgtgccgataaggagcaagcctag

SEQ ID NO: 201887 - DNA, 2433 bp, Artificial Sequence
  derived and/or modified sequence
atgattcctgttaccgagctgagatatttcgcagacacacagccagcctaccggattttgaaaccatggtgggatgtattcactgactatattagcatcgttatgctgatgattgccgtgtttggtggaactctgcaggtgacccaggataagatgatatgcctgccgtgcaagtgggttacgaaggacagttgcaatgactcttttcgtggctgggcggcaccaggcccagagccaacctatcccaatagtacaatcctccccacaccagacacaggccctacgggaattaaatacgatttggacagacatcaatataactacgtagacgccgtctgttacgaaaaccggctacattggttcgccaagtactttccttacctggtgctgttgcatacacttatcttccttgcctgcagtaatttctggttcaagttcccaagaacatcttccaagctagaacactttgtcagcattctgttgaaatgcttcgactccccctggacaactcgagccctgtccgagaccgtcgtggaggaaagtgaccctaagccagcctttagtaaaatgaacggcagcatggacaagaaaagtagtactgtgtctgaagacgtcgaagccacagtcccgatgctgcagcgtactaaatcaagaatcgagcaggggattgtggaccggtccgagacaggcgtgctagataagaaagaaggggagcaagccaaagccctcttcgagaaagtcaagaaattccggactcacgtggaggagggcgatatcgtgtaccgcttatatatgagacagactatcatcaaggtgattaaattcatcctgattatctgttatacagtttactatgttcataacattaagtttgatgtcgactgcaccgtggacatcgagtctctgaccggctaccgcacgtaccggtgcgcccaccctcttgctactctttttaaaatactcgcctctttttacatttctcttgttatcttttatggtctgatttgcatgtacactctgtggtggatgctgcgtcgaagcctaaaaaaatattcattcgaatctatcagggaagaatcttcatattctgacattcccgatgttaagaacgattttgcctttatgctgcacctgatagatcagtacgatccactgtactcaaaaagatttgccgtgttcctctccgaggtttctgaaaacaagcttagacagctgaacctgaataacgaatggaccttggataagctgcgccagcgcctgaccaagaatgcgcaggacaagctggagctgcacttgttcatgctgagtggaatacccgatacagtgtttgacttggtagagctggaagtgctcaaactggagctcatcccggatgtcactattcccccatcaattgctcaacttactggcctgaaggaactctggctgtaccatacagcagctaaaattgaggcccctgcactcgccttcttgcgggaaaacctccgggcattgcacattaaatttactgatatcaaggagatccctctgtggatatactcacttaagactctggaggaactccacctgacaggcaacctgtcagctgagaacaaccgatacattgtcattgatgggctgcgggaactgaagcggctgaaggtgctgaggctgaagagcaatttgagtaagcttccacaagtggtaacagacgtgggtgtgcacctgcaaaagctcagcatcaacaatgagggcactaagctgattgtgctgaactcactgaagaagatggccaacttgacggaactggagctcattagatgtgacctcgagcgcattccacactccatttttagtttgcacaacctgcaggagatcgacctcaaggataataatctgaagaccattgaggagatcataagtttccagcacctccacagactgacatgcttaaaactctggtataaccatattgcatacattcccattcaaatcggcaatttgacaaacctggagcgactgtatctgaatagaaataaaatagagaaaattcctacacaacttttttattgcagaaagctgaggtacttggacttaagccataacaatttaaccttcctgccggctgacatcggcttactgcaaaatctgcagaacctggccatcaccgctaatcgaattgaaacactcccaccagaattgttccagtgccggaaactcagagcgctgcacttgggaaacaatgtgctgcagtctctgccatcccgggttggagagttaacaaacttgactcagattgaacttagaggcaaccggcttgagtgtctgccagtcgaattgggcgaatgccccctcttgaaacggtctggactagtcgtcgaagaggacctctttaacaccttgccgcctgaagtcaaggaacgtttgtggcgcgctgacaaggaacaggcatag

SEQ ID NO: 201888 - DNA, 2433 bp, Artificial Sequence
  derived and/or modified sequence
atgatccccgtgaccgagctgagatacttcgccgacacccagcccgcctacagaatcctgaagccctggtgggacgtgttcaccgactacatcagcatcgtgatgctgatgatcgccgtgttcggcggcaccctgcaggtgacccaggacaagatgatctgcctgccctgcaagtgggtgaccaaggacagctgcaacgacagcttcagaggctgggccgcccccggccccgagcccacctaccccaacagcaccatcctgcccacccccgacaccggccccaccggcatcaagtacgacctggacagacaccagtacaactacgtggacgccgtgtgctacgagaacagactgcactggttcgccaagtacttcccctacctggtgctgctgcacaccctgatcttcctggcctgcagcaacttctggttcaagttccccagaaccagcagcaagctggagcacttcgtgagcatcctgctgaagtgcttcgacagcccctggaccaccagagccctgagcgagaccgtggtggaggagagcgaccccaagcccgccttcagcaagatgaacggcagcatggacaagaagagcagcaccgtgagcgaggacgtggaggccaccgtgcccatgctgcagagaaccaagagcagaatcgagcagggcatcgtggacagaagcgagaccggcgtgctggacaagaaggagggcgagcaggccaaggccctgttcgagaaggtgaagaagttcagaacccacgtggaggagggcgacatcgtgtacagactgtacatgagacagaccatcatcaaggtgatcaagttcatcctgatcatctgctacaccgtgtactacgtgcacaacatcaagttcgacgtggactgcaccgtggacatcgagagcctgaccggctacagaacctacagatgcgcccaccccctggccaccctgttcaagatcctggccagcttctacatcagcctggtgatcttctacggcctgatctgcatgtacaccctgtggtggatgctgagaagaagcctgaagaagtacagcttcgagagcatcagagaggagagcagctacagcgacatccccgacgtgaagaacgacttcgccttcatgctgcacctgatcgaccagtacgaccccctgtacagcaagagattcgccgtgttcctgagcgaggtgagcgagaacaagctgagacagctgaacctgaacaacgagtggaccctggacaagctgagacagagactgaccaagaacgcccaggacaagctggagctgcacctgttcatgctgagcggcatccccgacaccgtgttcgacctggtggagctggaggtgctgaagctggagctgatccccgacgtgaccatcccccccagcatcgcccagctgaccggcctgaaggagctgtggctgtaccacaccgccgccaagatcgaggcccccgccctggccttcctgagagagaacctgagagccctgcacatcaagttcaccgacatcaaggagatccccctgtggatctacagcctgaagaccctggaggagctgcacctgaccggcaacctgagcgccgagaacaacagatacatcgtgatcgacggcctgagagagctgaagagactgaaggtgctgagactgaagagcaacctgagcaagctgccccaggtggtgaccgacgtgggcgtgcacctgcagaagctgagcatcaacaacgagggcaccaagctgatcgtgctgaacagcctgaagaagatggccaacctgaccgagctggagctgatcagatgcgacctggagagaatcccccacagcatcttcagcctgcacaacctgcaggagatcgacctgaaggacaacaacctgaagaccatcgaggagatcatcagcttccagcacctgcacagactgacctgcctgaagctgtggtacaaccacatcgcctacatccccatccagatcggcaacctgaccaacctggagagactgtacctgaacagaaacaagatcgagaagatccccacccagctgttctactgcagaaagctgagatacctggacctgagccacaacaacctgaccttcctgcccgccgacatcggcctgctgcagaacctgcagaacctggccatcaccgccaacagaatcgagaccctgccccccgagctgttccagtgcagaaagctgagagccctgcacctgggcaacaacgtgctgcagagcctgcccagcagagtgggcgagctgaccaacctgacccagatcgagctgagaggcaacagactggagtgcctgcccgtggagctgggcgagtgccccctgctgaagagaagcggcctggtggtggaggaggacctgttcaacaccctgccccccgaggtgaaggagagactgtggagagccgacaaggagcaggcctag

SEQ ID NO: 201889 - protein, 1670 aa, Artificial Sequence
  derived and/or modified sequence
MMAQFPTAMNGGPNMWAITSEERTKHDRQFDNLKPSGGYITGDQARNFFLQSGLPAPVLAEIWALSDLNKDGKMDQQEFSIAMKLIKLKLQGQQLPVVLPPIMKQPPMFSPLISARFGMGSMPNLSIPQPLPPAAPITSLSSATSGTNLPPLMMPTPLVPSVSTSSLPNGTASLIQPLPIPYSSSTLPHGSSYSLMMGGFGGASIQKAQSLIDLGSSSSTSSTASLSGNSPKTGTSEWAVPQPTRLKYRQKFNTLDKSMSGYLSGFQARNALLQSNLSQTQLATIWTLADVDGDGQLKAEEFILAMHLTDMAKAGQPLPLTLPPELVPPSFRGGKQIDSINGTLPSYQKMQEEEPQKKLPVTFEDKRKANYERGNMELEKRRQALMEQQQREAERKAQKEKEEWERKQRELQEQEWKKQLELEKRLEKQRELERQREEERRKDIERREAAKQELERQRRLEWERIRRQELLNQKNREQEEIVRLNSKKKNLHLELEALNGKHQQISGRLQDVRLKKQTQKTELEVLDKQCDLEIMEIKQLQQELQEYQNKLIYLVPEKQLLNERIKNMQFSNTPDSGVSLLHKKSLEKEELCQRLKEQLDALEKETASKLSEMDSFNNQLKELRETYNTQQLALEQLYKIKRDKLKEIERKRLELMQKKKLEDEAARKAKQGKENLWKENLRKEEEEKQKRLQEEKTQEKIQEEERKAEEKQRKDKDTLKAEEKKRETASVLVNYRALYPFEARNHDEMSFNSGDIIQVDEKTVGEPGWLYGSFQGNFGWFPCNYVEKMPSSENEKAVSPKKALLPPTVSLSATSTSSEPLSSNQPASVTDYQNVSFSNLTVNTSWQKKSAFTRTVSPGSVSPIHGQGQVVENLKAQALCSWTAKKDNHLNFSKHDIITVLEQQENWWFGEVHGGRGWFPKSYVKIIPGSEVKREEPEALYAAVNKKPTSAAYSVGEEYIALYPYSSVEPGDLTFTEGEEILVTQKDGEWWTGSIGDRSGIFPSNYVKPKDQESFGSASKSGASNKKPEIAQVTSAYVASGSEQLSLAPGQLILILKKNTSGWWQGELQARGKKRQKGWFPASHVKLLGPSSERATPAFHPVCQVIAMYDYAANNEDELSFSKGQLINVMNKDDPDWWQGEINGVTGLFPSNYVKMTTDSDPSQQWCADLQTLDTMQPIERKRQGYIHELIQTEERYMADLQLVVEVFQKRMAESGFLTEGEMALIFVNWKELIMSNTKLLKALRVRKKTGGEKMPVQMIGDILAAELSHMQAYIRFCSCQLNGAALLQQKTDEDTDFKEFLKKLASDPRCKGMPLSSFLLKPMQRITRYPLLIRSILENTPESHADHSSLKLALERAEELCSQVNEGVREKENSDRLEWIQAHVQCEGLAEQLIFNSLTNCLGPRKLLHSGKLYKTKSNKELHGFLFNDFLLLTYMVKQFAVSSGSEKLFSSKSNAQFKMYKTPIFLNEVLVKLPTDPSSDEPVFHISHIDRVYTLRTDNINERTAWVQKIKAASEQYIDTEKKKREKAYQARSQKTSGIGRLMVHVIEATELKACKPNGKSNPYCEISMGSQSYTTRTIQDTLNPKWNFNCQFFIKDLYQDVLCLTLFDRDQFSPDDFLGRTEIPVAKIRTEQESKGPMTRRLLLHEVPTGEVWVRFDLQLFEQKTLL

SEQ ID NO: 201890 - protein, 611 aa, Artificial Sequence
  derived and/or modified sequence
MAQFPTAMNGGPNMWAITSEERTKHDRQFDNLKPSGGYITGDQARNFFLQSGLPAPVLAEIWALSDLNKDGKMDQQEFSIAMKLIKLKLQGQQLPVVLPPIMKQPPMFSPLISARFGMGSMPNLSIPQPLPPAAPITSLSSATSGTNLPPLMMPTPLVPSVSTSSLPNGTASLIQPLPIPYSSSTLPHGSSYSLMMGGFGGASIQKAQSLIDLGSSRSWSSGSSAHSPATHRAPLSSPVPNSSTSSTASLSGNSPKTGTSEWAVPQPTRLKYRQKFNTLDKSMSGYLSGFQARNALLQSNLSQTQLATIWTLADVDGDGQLKAEEFILAMHLTDMAKAGQPLPLTLPPELVPPSFRGGKQIDSINGTLPSYQKMQEEEPQKKLPVTFEDKRKANYERGNMELEKRRQALMEQQQREAERKAQKEKEEWERKQRELQEQEWKKQLELEKRLEKQRELERQREEERRKDIERREAAKQELERQRRLEWERIRRQELLNQKNREQEEIVRLNSKKKNLHLELEALNGKHQQISGRLQDVRLKKQTQKTELEVLDKQCDLEIMEIKQLQQELQEYQNKLIYLVPEKQLLNERIKNMQFSNTPDSGVSLLHKKSLE

SEQ ID NO: 201891 - DNA, 5013 bp, Artificial Sequence
  derived and/or modified sequence
atgatggcccagtttcccaccgcgatgaatggaggtcctaatatgtgggccatcacgagcgaagaacggaccaaacacgatagacagttcgacaacctgaaacccagcggaggatatattaccggcgaccaggccagaaatttctttctgcaaagtggcctccccgcgcccgtgttggccgaaatttgggcattgtccgatctgaacaaagatggcaagatggaccagcaggaattttccattgctatgaaactcatcaagctgaaactgcaggggcagcaattgccggtggtccttccaccgatcatgaagcaacccccgatgttctccccattgatcagcgcgcgctttggaatgggcagcatgccgaatctatcaattccccagcccttgccacctgctgcccccatcacgtctttgagcagtgcaacgtccggaacaaacctgccaccactaatgatgcctaccccgcttgtgccctctgtgagcacatcgtccctgcctaatgggaccgcgagcctgattcagcctctcccaatcccgtatagttcatccacactgccacatggaagttcttacagcttgatgatgggcggattcgggggcgccagcatccagaaggcccagagcctgattgatctgggatcttcctcaagcacatctagtacagcaagcctgagcggtaattctccaaagaccggaacctctgagtgggccgtgccacagccaaccaggctcaaatacaggcagaaatttaacacgcttgataaatcaatgtcggggtatctctctggcttccaggccagaaatgcacttctacagtcaaatttgtcacagacacagttggcgactatttggaccctagctgacgtggatggtgatgggcagctgaaggccgaagagtttatcttggcgatgcaccttacggacatggccaaggcaggccagccactgccactaacactgcccccagagctcgtcccacctagtttcagaggaggcaaacagattgactctatcaatggtacgctgcctagttatcaaaagatgcaggaagaggaacctcagaagaagctacctgtcacctttgaagataagcggaaggctaactacgaacgtggtaatatggagctggagaagcgtaggcaggccctgatggagcagcagcagcgcgaggccgaaaggaaggcgcaaaaggagaaagaagaatgggaacggaaacagcgtgaactgcaagagcaggagtggaagaagcaactggaattggagaagagactagagaaacagcgggagctcgagagacagcgcgaagaagaacgccgcaaggatatcgagcgaagagaggcggccaagcaggagctagagcgccagcggcggctcgagtgggagagaattaggaggcaggaactcctcaaccagaagaatagagagcaggaggaaattgtccggctgaattccaaaaagaagaatctacatctggagctggaggccctgaatgggaaacatcagcagatttccggtcgcctgcaggatgtgaggctgaaaaagcagacccagaaaactgagctggaagtactcgataaacagtgtgatctggagattatggagatcaaacagttgcagcaggagcttcaagagtatcagaacaagctgatctacctcgtgcctgaaaaacagctgctgaatgagcgcatcaagaacatgcagtttagtaatacgcccgactccggcgtttctctgctgcacaaaaagtctctggagaaggaggagctgtgtcaacgccttaaagaacagctcgatgccctagagaaagagaccgcaagcaagctgagtgagatggattcttttaataaccagttgaaagagctgagggaaacctacaacacacaacagctggcactggagcagttatataagattaaaagagataaattaaaggaaatcgaaaggaagcgcctcgaattgatgcagaagaagaaattggaggatgaggccgcacgcaaagctaagcaaggcaaagagaatctgtggaaagaaaacctgcgcaaggaagaggaagaaaaacagaaaagactacaagaggaaaagactcaggaaaaaattcaggaagaggagcgcaaggcagaggaaaaacagcggaaggataaggacaccctgaaggccgaggagaagaaacgcgaaaccgctagtgttctagtgaattatagagccctgtaccctttcgaggcaaggaaccacgatgagatgagttttaactccggtgatatcatccaggtggatgaaaagaccgttggtgaaccgggctggctgtatggctcctttcagggcaactttggatggttcccatgtaactacgtggagaagatgcccagctccgagaacgagaaagccgtgtcccccaaaaaagccctgctgcccccgactgtttccctgtctgccacctcaacgagctctgagccgctttcttccaaccagcctgcaagcgtgacagactaccagaacgtctcttttagcaacctaacggtcaatacatcatggcaaaagaagagcgcatttaccagaaccgtgtctcctggttcagtctcacctatccacgggcagggacaggtagtggaaaatttgaaagcccaggctttatgctcttggacagcgaaaaaagacaaccacctgaacttctccaagcatgatatcatcactgttttggagcagcaggaaaactggtggttcggagaggttcatggcgggcgcggatggttcccaaaatcttacgttaaaattatacccgggtcagaggtcaaacgtgaagagcctgaagccctgtatgccgccgttaataagaagcctacatccgctgcctatagtgttggcgaggaatatattgccctctacccctattcttctgtggagccaggagacttaacttttacagagggggaagaaatactggtgacgcagaaagacggcgaatggtggactggcagtatcggggaccgttctggtatttttccatcgaattacgtcaagcctaaggaccaggagagcttcgggtctgcaagtaaaagcggagcatcgaacaagaagcccgaaatcgcacaggtgacgtctgcttatgttgccagcggaagcgaacagctgtccctggccccaggacaacttatcctgatccttaaaaaaaacactagcgggtggtggcagggggaactccaggctcgaggcaaaaaaaggcagaagggctggtttcctgcttcacacgtaaagctcctcggtccctcaagcgaacgcgcaacacctgcgttccaccccgtttgccaggtcatcgcgatgtacgattacgctgcaaataacgaagacgaactgtctttctccaaaggtcaactcataaacgtgatgaataaggacgatcccgattggtggcaaggtgagattaatggtgttacgggtcttttcccgagcaactacgtgaaaatgactaccgatagcgatccttcccagcaatggtgcgctgatctgcagaccctggatacgatgcagcctattgagaggaagaggcagggttatatacatgagctgatacaaaccgaggagcgctacatggctgatcttcagctcgtggttgaagtattccagaaaagaatggctgagtcaggctttttgactgaaggcgagatggccctcatttttgtgaattggaaggagcttataatgagcaacaccaagctgctcaaggctctgagagtacgtaagaagactggtggcgagaagatgcctgtgcaaatgatcggggatatccttgcggctgagctaagccatatgcaggcttatataagattctgttcctgccagcttaacggggctgccctgctccagcagaagacagatgaagacactgactttaaagagtttctgaaaaaacttgcgtccgacccacgctgtaaaggaatgccactttcttcattcctcctcaagccaatgcaaagaatcacccgctaccccctgctcatacgatcaatcctggagaacacaccagaatcccacgctgaccactccagccttaaactcgcccttgaaagggccgaggagctctgctcccaggtcaatgagggagtccgcgaaaaggagaattcagacagactggaatggattcaagcccatgtccaatgcgaaggcctggctgagcagcttatcttcaattcacttaccaattgcttgggccccagaaagctcctgcattcaggcaagctctacaaaaccaagagtaacaaggaactgcacggattcttgttcaacgactttttgcttctcacctacatggtcaagcagttcgctgtgagctccggcagcgagaaactcttctcgagcaagtctaacgcacagtttaaaatgtataaaaccccaatcttccttaacgaggtgctggttaaattgccgactgaccccagtagcgatgagccagtgtttcacataagccacatcgatcgagtttacaccctgcgcaccgacaatattaatgaaaggacagcctgggtgcagaagattaaggccgcctccgagcagtatattgatactgagaagaagaaacgcgaaaaagcctatcaggccagatcccagaaaacctcagggatcggtagacttatggtgcacgtgattgaagccaccgagctgaaagcgtgcaagccaaacggcaagagcaacccctattgcgagatctccatggggtctcaatcctatactaccagaactatccaggacaccctcaatcccaaatggaatttcaattgtcagttctttatcaaagacttataccaggatgtgctgtgtctcaccttattcgatagagaccagtttagccccgatgattttctgggcagaaccgagatacctgttgcaaaaattcggactgagcaggagtcaaagggacctatgacaaggaggctcttgttgcatgaggttcccaccggcgaagtgtgggtgagattcgaccttcagttgtttgagcagaaaacgttactttag

SEQ ID NO: 201892 - DNA, 5013 bp, Artificial Sequence
  derived and/or modified sequence
atgatggcgcaattccctactgcaatgaatggcggccccaacatgtgggccataacctctgaagaacgtacaaaacacgatcgccaatttgataacctcaagccctcaggaggttatataaccggtgatcaggcccggaactttttcctgcaatcaggcttgcctgcgcctgttctggcggaaatctgggctctgagcgaccttaataaagacggcaagatggaccagcaggagttctcgatcgcaatgaagttgataaagctgaagttgcagggacaacagcttcctgtcgtccttccgcctattatgaagcagccgccaatgttcagccccttaatcagtgccaggttcgggatgggatctatgcccaatttgtccataccacagcctctaccaccagccgcccccatcaccagtctgtccagcgcaacaagcggaaccaatctgcccccattgatgatgcccactcctctcgtccctagcgtgtccaccagcagcctgccaaatggcaccgcatctcttattcagcctctgccaatcccgtactcttcaagcacactgccacacggtagctcatatagcctgatgatgggcggctttggcggcgcatccattcagaaggcgcaatctctgatcgacctcggcagcagtagcagcacatccagtacggccagtttatcaggaaattctcccaaaactggcacttccgaatgggctgtgccccaacccacaagactgaagtacagacagaaatttaatactttggacaagtccatgtctggctacctgtccggcttccaggcaaggaacgcacttttgcagagtaacttaagccagacccagctcgccaccatatggactctggcagatgtcgatggggacggccagctcaaggccgaagagtttattcttgccatgcaccttacggatatggccaaggcagggcagcctctccctctcaccttaccacccgaattggtgccaccatcctttcgcggcgggaaacagatcgatagcatcaatggaacactcccatcatatcagaaaatgcaggaggaggaaccacagaagaagctgccagtaacatttgaggacaagaggaaggccaattacgaacggggcaacatggagttggaaaagaggagacaggccttgatggaacagcagcagcgggaggccgaaaggaaagctcagaaagagaaggaggagtgggagagaaagcagcgggaactgcaggaacaggagtggaaaaagcagcttgagctagaaaaacgactggagaagcagagggaactagagagacagcgggaagaagaacggcggaaagatattgaaagaagggaggccgcaaagcaggagctggagaggcagcgtcgactcgagtgggaacgcatccgaagacaggaactgctgaatcaaaaaaatcgggagcaagaggaaatcgtgcggttgaacagtaagaagaaaaatcttcatctggaactagaggcattgaacgggaagcatcagcagatttcgggccgactgcaggatgtccgactgaaaaagcagactcaaaagaccgaactggaagtactggataagcaatgcgatctggagataatggagatcaagcagctccagcaggagttgcaggagtatcaaaataaattaatctacctcgtgccagaaaagcagctgttaaatgaacgtataaagaacatgcagtttagcaacaccccagattcgggagtgtctcttctccacaaaaaatctctggagaaagaggagctgtgccaacggctgaaagaacagctcgacgccttagagaaggagacagcctcgaagctgagtgaaatggattcctttaataaccagctaaaggaattgcgcgagacttacaatacacagcaactggccctagaacagctgtacaagattaagcgcgataaacttaaagagattgaacggaagcgtttggaactaatgcagaaaaagaagttagaggacgaagctgctcggaaggccaagcagggtaaggaaaacttgtggaaagagaacctgcgcaaggaggaggaggagaagcaaaaaaggctgcaggaggagaagacacaggagaaaatccaagaagaggagcgtaaggctgaggaaaagcagcggaaagataaggacactttgaaagccgaggaaaaaaaaagggagacggcgtctgtcctcgtaaattatagagcattatatccattcgaggcgcgcaatcatgatgagatgtcatttaattcgggcgatatcattcaggtggatgagaaaaccgttggtgagccaggctggctgtatggtagctttcaaggaaactttgggtggtttccctgcaattacgttgaaaagatgccctcctccgagaatgagaaggctgtgagccctaaaaaggctttgctcccccctacggtgtctttatcagccacctcgacttcatcagagcccctgagttccaaccagcccgctagcgtcaccgactatcagaatgtgagcttcagcaatttaacagtgaacacttcttggcagaagaagtccgcattcacccgcacggtgtctcccggatccgtttccccaattcacggccaaggtcaggttgtagagaacctgaaggcgcaggccctttgctcctggactgcaaaaaaagataaccatttaaacttttcaaaacatgatataattaccgtgctcgagcaacaagaaaattggtggtttggtgaggtgcacggcggacggggctggttcccaaaatcttatgtgaagataatccccggatctgaggttaaaagggaggaaccagaagccttgtatgcggctgtgaataagaagccaactagcgctgcctatagtgtgggcgaggagtacatcgcactatatccctacagttctgtagagccgggcgatcttacatttaccgagggggaagagatactcgtcactcaaaaggatggtgaatggtggacaggaagtataggcgacaggtcaggaatttttccaagcaattacgtcaagcccaaagatcaggagtcattcggctccgcctctaagtctggggcatctaataagaagccagaaatagcccaggttacttcagcctacgtagctagcgggtcggagcagctctctctggcccctggccagttgattttaatcttgaagaaaaacaccagcgggtggtggcagggggagctccaggccagaggcaaaaagcggcaaaaggggtggttccccgcatcccacgttaagctcctgggcccatcttccgaaagagctacccccgcctttcacccagtgtgccaagttatagcgatgtacgactatgccgccaacaacgaggatgagctcagcttctccaaaggccagttaatcaatgtgatgaataaggacgatccagactggtggcagggggagattaatggcgtgacagggctctttccttcaaattatgtgaaaatgaccacagactcggaccctagtcagcaatggtgtgcagatttgcagactttggatacaatgcagccaatcgagaggaaacggcaggggtatatacacgaattgattcaaactgaggaaagatacatggccgacctacagctggtcgtcgaagtctttcaaaaacggatggcggaatcaggatttctgaccgagggcgagatggccctgatctttgtgaactggaaagaactcatcatgagcaacacaaagcttttgaaggcactacgggtgaggaagaaaaccggcggagaaaaaatgccagtgcagatgatcggagatattctggccgctgagctgtcccacatgcaggcctacatccggttctgctcttgtcaacttaatggagccgcactgttgcagcagaagacggacgaggatacggactttaaggagtttctcaaaaaactggcctccgacccccggtgcaaaggaatgcctctgagctccttcctgcttaagccgatgcaaaggatcacccggtatcccttactgatccggtctattctagaaaatacacctgagtcgcatgctgaccattcttccctgaagcttgcactggagcgagccgaggagctgtgtagccaggtcaatgaaggtgtgcgcgaaaaggagaactctgacagactcgaatggatccaggcccacgtgcagtgtgaggggctagcagaacaattgatatttaacagcctgaccaactgcctaggcccaaggaagctgttacacagcggaaagttatacaaaacgaagtctaataaagagcttcacgggtttcttttcaatgactttctactcctgacctacatggtaaaacaattcgctgtgtcctcagggagcgaaaagctgttctcatccaaatccaatgcccagtttaagatgtataagacacctattttcctgaatgaggtgctcgtgaagctgcccaccgacccctcgtcggatgaacctgtctttcatatttcacatatcgacagggtgtacacactgagaacggacaacatcaacgaaaggacagcttgggtccagaagatcaaggcagcctccgagcagtatattgacaccgagaaaaagaagagggagaaggcataccaggcacggtcccagaagacctccggcattggtcgactgatggtccatgtcattgaggccacagagttgaaagcatgtaagcctaacgggaagagcaatccttactgtgaaatttcaatggggtcccaatcatatacaacgcgcaccatccaggacacgcttaatcccaaatggaactttaattgtcaatttttcattaaggacctgtaccaggacgtcttatgtctcactttgtttgacagagaccagtttagtccagatgacttccttggaaggacagaaattccggtcgctaaaatccggaccgagcaagaatccaagggcccaatgactcgccggctgctcctccacgaggtccctacgggtgaagtgtgggtccgatttgacttgcagttatttgaacagaagaccctattgtag

SEQ ID NO: 201893 - DNA, 5811 bp, Artificial Sequence
  derived and/or modified sequence
cagatggctgagagctagcaaggaaaactcaggaccatgatggctcagtttcccacagctatgaatggagggccaaacatgtgggctattacctctgaagaacgtactaagcatgacaggcagtttgataacctcaaaccttcaggaggttacataacaggtgatcaagcacgtaattttttcctacaatcaggtctgccggcccctgttttagctgaaatatgggctttatcagacctaaacaaggatgggaagatggatcagcaagagttctccatagctatgaaactcatcaaactgaagcttcaaggccaacagttgcctgtggttctccctcctattatgaagcaaccccctatgttttctccattaatttctgctcgttttggaatgggaagcatgcccaatctgtccattcctcagccattgcctccagctgcacctataacatcattgtcttctgcgacttcagggaccaaccttcctcccttaatgatgcccactcccctagtgccttctgttagcacatcatcattaccaaatggaaccgccagtctcattcagcctttacccattccttattcttcttcaacattgcctcatgggtcatcttatagtctgatgatgggaggatttggaggtgctagtatacagaaagcgcagtctctgattgatttaggatctagtagctcaacttcctcgactgcttcactctcagggaactcacccaagactgggacctcagagtgggcagttcctcagcctacaagattaaaatatcggcaaaaatttaatactcttgacaaaagtatgagtggatatctctcaggttttcaagctagaaatgcccttcttcagtcaaatctttctcaaactcagctggctactatttggactctggctgacgttgatggtgatggacagctaaaagcagaagagtttattcttgcaatgcaccttactgacatggccaaagctggacagccattaccactgactttacctcctgagcttgttcctccatctttcagaggaggaaagcaaattgattccattaatggaactctgccttcatatcagaaaatgcaagaagaggagcctcagaagaaattaccagttacttttgaggacaaacggaaagccaactatgagcgagggaacatggagctggaaaagcgacgccaagccttgatggagcagcaacaaagggaggcagaacgtaaagcccagaaagaaaaggaagagtgggaacgaaaacagagagaattacaagaacaagaatggaagaaacaacttgaattagaaaaacgcttagagaagcaacgggaattggagagacaacgagaggaagaaaggagaaaagacatagaaagacgagaggcagcaaaacaggaacttgaacgacaacgtcgcttagaatgggagagaattcggcgacaggagcttctcaatcaaaagaatagagaacaagaagaaattgtcaggttaaactctaaaaagaagaatcttcatcttgagttggaagcactgaatggcaaacatcagcagatctcaggcagacttcaggatgtccgactcaaaaagcaaactcaaaagactgagctggaagttctggataagcagtgtgacttggaaattatggaaatcaagcaacttcaacaggaacttcaggaatatcagaataagcttatctatctggtacctgagaagcaattattaaatgaaagaattaaaaacatgcagttcagtaacacacctgattcaggggtcagtttacttcataaaaaatcattagaaaaggaagaattatgccaaagacttaaagaacagttagatgctcttgaaaaagaaactgcatctaagctgtcagaaatggattcttttaacaatcaactaaaggaactgagagaaacctacaacacacagcagttagcccttgaacagctttataagatcaaacgtgacaagttgaaggaaattgaaaggaaaagattagaactaatgcagaaaaagaaactagaagatgaggctgcaaggaaagcaaagcaaggaaaagaaaacttatggaaagaaaatcttagaaaggaggaagaagaaaaacaaaagcgactccaggaagaaaaaacacaagaaaaaattcaagaagaggaacggaaagctgaggagaaacaacgtaaggataaggatactttgaaagctgaggagaaaaaacgtgagacagctagtgttttggtgaattatagagcattatacccctttgaagcaaggaaccatgatgagatgagttttaattctggagatataattcaggttgatgaaaaaaccgtaggagaacctggttggctttatggtagttttcaaggaaattttggctggtttccatgcaattatgtagaaaaaatgccatcaagtgaaaatgaaaaagctgtatctccaaagaaggccttacttcctcctacagtttctttatctgctacctcaacttcctctgaaccactttcttcaaatcaaccagcatcagtgactgattatcaaaatgtatctttttcaaacctaactgtaaatacatcatggcagaaaaaatcagccttcactcgaactgtgtcccctggatctgtatcacctattcatggacagggacaagtggtagaaaacttaaaagcacaggccctttgttcctggactgcaaagaaagataaccacttgaacttctcaaaacatgacattattactgtcttggagcagcaagaaaattggtggtttggggaggtgcatggaggaagaggatggtttcccaaatcttatgtcaagatcattcctgggagtgaagtaaaacgggaagaaccagaagctttgtatgcagctgtaaataagaaacctacctcggcagcctattcagttggagaagaatatattgcactttatccatattcaagtgtggaacctggagatttgactttcacagaaggtgaagaaatattggtgacccagaaagatggagagtggtggacaggaagtattggagatagaagtggaatttttccatcaaactatgtcaaaccaaaggatcaagagagttttgggagtgctagcaagtctggagcatcaaataaaaaacctgagattgctcaggtaacttcagcatatgttgcttctggttctgaacaacttagccttgcaccaggacagttaatattaattctaaagaaaaatacaagtgggtggtggcaaggagagttacaggccagaggaaaaaagcgacagaaaggatggtttcctgccagtcatgttaaacttttgggtccaagtagtgaaagagccacacctgcctttcatcctgtatgtcaggtgattgctatgtatgactatgcagcaaataatgaagatgagctcagtttctccaagggacaactcattaatgttatgaacaaagatgatcctgattggtggcaaggagagatcaacggggtgactggtctctttccttcaaactacgttaagatgacgacagactcagatccaagtcaacagtggtgtgctgatctgcaaaccctggacacaatgcagccaattgagaggaaaagacagggctatattcatgagctgattcagaccgaagagcggtacatggctgaccttcagctcgtcgtcgaggtttttcagaaacgcatggcagagtcaggctttctcactgaaggggagatggccctgatttttgttaactggaaggagctcatcatgtccaacacaaagctgctgaaggctttgcgggtgcggaagaagaccgggggcgagaagatgccggtgcagatgattggggacatcctggccgctgagctgtcccacatgcaggcttacatcaggttctgcagctgccagcttaatggagcagctctgttacagcagaagacagatgaagacacagatttcaaagaatttttaaagaagctggcatctgacccgcggtgtaaaggaatgcccctctccagcttcctgctgaaacccatgcagaggatcacccgctacccactgctcatcagaagtattctggagaacaccccggagagccatgcagaccattcctccctaaagctggccctcgagcgggcagaggagctgtgctctcaagtgaatgagggagttcgggagaaggaaaactcggaccgactggagtggatccaggcgcacgtgcagtgtgaaggcctcgcggagcaacttattttcaactctctcaccaactgcctggggccccggaagctcttacacagtgggaaattatacaagaccaagagcaacaaggaactgcacggattcctcttcaatgacttcctgcttcttacctacatggtcaagcagtttgctgtttcctctggctctgagaaacttttcagctcgaagtccaatgctcaattcaaaatgtataaaacgcccattttcctgaatgaagtcttggtgaaactgcccacagacccttccagcgatgagcctgtcttccacatttcccacattgatcgggtctacaccctccgaacagacaacattaatgagaggaccgcctgggtgcagaagatcaaggcggcgtctgagcagtacatcgacaccgagaagaagaagcgtgagaaagcttaccaagcccgctcccaaaagacttcaggcattgggcgcctgatggtgcatgtcattgaagctacagaattaaaagcctgcaaaccaaatggaaagagcaacccatactgtgaaatcagcatgggctcccagagctacaccaccaggaccatccaggacacactcaatcccaagtggaattttaactgccagttctttattaaggatctctaccaagacgtgctgtgtctcaccctgtttgacagagaccagttttcaccagatgatttcctgggtcgtactgaaattccagtggcaaaaattcgaacagaacaggaaagcaaaggccctatgacccgccgactgctgctgcatgaggtccccaccggggaggtctgggtccgttttgacctgcagctttttgagcaaaaaactctcctgtaggggttctaaaggacagcaccagcgggacagcccacaaggctggggctggagaatgagagactgcgctctcttggggctgagggagcaccatgcagcttcacccctcacaaagccatgcacgctgggggctctgttttcctgcacactaaatagctagcaatctatgcaaacacctttcccataaagaaaccaaaccccatagtacagtgccttgtcctagtgttcacatgttcagctctgtttgtttagatgccaaggtttccattttcagggctataaaaagtattacttggaaatgaggcatcagaccaccagatgttaccgctcggttgaatgtgtccaccgtggagtggtttggtgacgctgtaaccattccacgccagtgacctctgctgggtcacagccactcaggaggggaagggtcaggatgagaggctgcagcctcgacacttggcgcggcctgatactgaaatagcgtctactcgtgcactgaataaaaacagaaacttgatcattttattcctgattagattttatcactctctgctaagacaatatagtctggagtataagtgggaaagcttgatttaaatactgtgaactctaataatgtggaaaatatttttcaactttaattttctgaagtataaattatttatgtaaattcattgtttttgcatatttcttaggacatgcatctttaagctttatcattgcccatatgtacagaaagagaataaagacatatgtttatggatggaa

SEQ ID NO: 201894 - DNA, 6031 bp, Artificial Sequence
  derived and/or modified sequence
cggccgccatgttgttgtggggctgaggcggcgccggcggagccctgagcggctgtgacaggctacgcaacaggttcgcgggcggcggcctgacgaccaagccagctgcagtggcggcgacggcggcagagcagggtctccccgcgcctgcccgcgcccaggctgccggtgctgagggacgcggagtcgcgctgtgacgagcgggaggcgcggcgagggcgccagatggctgagagctagcaaggaaaactcaggaccatgatggctcagtttcccacagctatgaatggagggccaaacatgtgggctattacctctgaagaacgtactaagcatgacaggcagtttgataacctcaaaccttcaggaggttacataacaggtgatcaagcacgtaattttttcctacaatcaggtctgccggcccctgttttagctgaaatatgggctttatcagacctaaacaaggatgggaagatggatcagcaagagttctccatagctatgaaactcatcaaactgaagcttcaaggccaacagttgcctgtggttctccctcctattatgaagcaaccccctatgttttctccattaatttctgctcgttttggaatgggaagcatgcccaatctgtccattcctcagccattgcctccagctgcacctataacatcattgtcttctgcgacttcagggaccaaccttcctcccttaatgatgcccactcccctagtgccttctgttagcacatcatcattaccaaatggaaccgccagtctcattcagcctttacccattccttattcttcttcaacattgcctcatgggtcatcttatagtctgatgatgggaggatttggaggtgctagtatacagaaagcgcagtctctgattgatttaggatctagtagctcaacttcctcgactgcttcactctcagggaactcacccaagactgggacctcagagtgggcagttcctcagcctacaagattaaaatatcggcaaaaatttaatactcttgacaaaagtatgagtggatatctctcaggttttcaagctagaaatgcccttcttcagtcaaatctttctcaaactcagctggctactatttggactctggctgacgttgatggtgatggacagctaaaagcagaagagtttattcttgcaatgcaccttactgacatggccaaagctggacagccattaccactgactttacctcctgagcttgttcctccatctttcagaggaggaaagcaaattgattccattaatggaactctgccttcatatcagaaaatgcaagaagaggagcctcagaagaaattaccagttacttttgaggacaaacggaaagccaactatgagcgagggaacatggagctggaaaagcgacgccaagccttgatggagcagcaacaaagggaggcagaacgtaaagcccagaaagaaaaggaagagtgggaacgaaaacagagagaattacaagaacaagaatggaagaaacaacttgaattagaaaaacgcttagagaagcaacgggaattggagagacaacgagaggaagaaaggagaaaagacatagaaagacgagaggcagcaaaacaggaacttgaacgacaacgtcgcttagaatgggagagaattcggcgacaggagcttctcaatcaaaagaatagagaacaagaagaaattgtcaggttaaactctaaaaagaagaatcttcatcttgagttggaagcactgaatggcaaacatcagcagatctcaggcagacttcaggatgtccgactcaaaaagcaaactcaaaagactgagctggaagttctggataagcagtgtgacttggaaattatggaaatcaagcaacttcaacaggaacttcaggaatatcagaataagcttatctatctggtacctgagaagcaattattaaatgaaagaattaaaaacatgcagttcagtaacacacctgattcaggggtcagtttacttcataaaaaatcattagaaaaggaagaattatgccaaagacttaaagaacagttagatgctcttgaaaaagaaactgcatctaagctgtcagaaatggattcttttaacaatcaactaaaggaactgagagaaacctacaacacacagcagttagcccttgaacagctttataagatcaaacgtgacaagttgaaggaaattgaaaggaaaagattagaactaatgcagaaaaagaaactagaagatgaggctgcaaggaaagcaaagcaaggaaaagaaaacttatggaaagaaaatcttagaaaggaggaagaagaaaaacaaaagcgactccaggaagaaaaaacacaagaaaaaattcaagaagaggaacggaaagctgaggagaaacaacgtaaggataaggatactttgaaagctgaggagaaaaaacgtgagacagctagtgttttggtgaattatagagcattatacccctttgaagcaaggaaccatgatgagatgagttttaattctggagatataattcaggttgatgaaaaaaccgtaggagaacctggttggctttatggtagttttcaaggaaattttggctggtttccatgcaattatgtagaaaaaatgccatcaagtgaaaatgaaaaagctgtatctccaaagaaggccttacttcctcctacagtttctttatctgctacctcaacttcctctgaaccactttcttcaaatcaaccagcatcagtgactgattatcaaaatgtatctttttcaaacctaactgtaaatacatcatggcagaaaaaatcagccttcactcgaactgtgtcccctggatctgtatcacctattcatggacagggacaagtggtagaaaacttaaaagcacaggccctttgttcctggactgcaaagaaagataaccacttgaacttctcaaaacatgacattattactgtcttggagcagcaagaaaattggtggtttggggaggtgcatggaggaagaggatggtttcccaaatcttatgtcaagatcattcctgggagtgaagtaaaacgggaagaaccagaagctttgtatgcagctgtaaataagaaacctacctcggcagcctattcagttggagaagaatatattgcactttatccatattcaagtgtggaacctggagatttgactttcacagaaggtgaagaaatattggtgacccagaaagatggagagtggtggacaggaagtattggagatagaagtggaatttttccatcaaactatgtcaaaccaaaggatcaagagagttttgggagtgctagcaagtctggagcatcaaataaaaaacctgagattgctcaggtaacttcagcatatgttgcttctggttctgaacaacttagccttgcaccaggacagttaatattaattctaaagaaaaatacaagtgggtggtggcaaggagagttacaggccagaggaaaaaagcgacagaaaggatggtttcctgccagtcatgttaaacttttgggtccaagtagtgaaagagccacacctgcctttcatcctgtatgtcaggtgattgctatgtatgactatgcagcaaataatgaagatgagctcagtttctccaagggacaactcattaatgttatgaacaaagatgatcctgattggtggcaaggagagatcaacggggtgactggtctctttccttcaaactacgttaagatgacgacagactcagatccaagtcaacagtggtgtgctgatctgcaaaccctggacacaatgcagccaattgagaggaaaagacagggctatattcatgagctgattcagaccgaagagcggtacatggctgaccttcagctcgtcgtcgaggtttttcagaaacgcatggcagagtcaggctttctcactgaaggggagatggccctgatttttgttaactggaaggagctcatcatgtccaacacaaagctgctgaaggctttgcgggtgcggaagaagaccgggggcgagaagatgccggtgcagatgattggggacatcctggccgctgagctgtcccacatgcaggcttacatcaggttctgcagctgccagcttaatggagcagctctgttacagcagaagacagatgaagacacagatttcaaagaatttttaaagaagctggcatctgacccgcggtgtaaaggaatgcccctctccagcttcctgctgaaacccatgcagaggatcacccgctacccactgctcatcagaagtattctggagaacaccccggagagccatgcagaccattcctccctaaagctggccctcgagcgggcagaggagctgtgctctcaagtgaatgagggagttcgggagaaggaaaactcggaccgactggagtggatccaggcgcacgtgcagtgtgaaggcctcgcggagcaacttattttcaactctctcaccaactgcctggggccccggaagctcttacacagtgggaaattatacaagaccaagagcaacaaggaactgcacggattcctcttcaatgacttcctgcttcttacctacatggtcaagcagtttgctgtttcctctggctctgagaaacttttcagctcgaagtccaatgctcaattcaaaatgtataaaacgcccattttcctgaatgaagtcttggtgaaactgcccacagacccttccagcgatgagcctgtcttccacatttcccacattgatcgggtctacaccctccgaacagacaacattaatgagaggaccgcctgggtgcagaagatcaaggcggcgtctgagcagtacatcgacaccgagaagaagaagcgtgagaaagcttaccaagcccgctcccaaaagacttcaggcattgggcgcctgatggtgcatgtcattgaagctacagaattaaaagcctgcaaaccaaatggaaagagcaacccatactgtgaaatcagcatgggctcccagagctacaccaccaggaccatccaggacacactcaatcccaagtggaattttaactgccagttctttattaaggatctctaccaagacgtgctgtgtctcaccctgtttgacagagaccagttttcaccagatgatttcctgggtcgtactgaaattccagtggcaaaaattcgaacagaacaggaaagcaaaggccctatgacccgccgactgctgctgcatgaggtccccaccggggaggtctgggtccgttttgacctgcagctttttgagcaaaaaactctcctgtaggggttctaaaggacagcaccagcgggacagcccacaaggctggggctggagaatgagagactgcgctctcttggggctgagggagcaccatgcagcttcacccctcacaaagccatgcacgctgggggctctgttttcctgcacactaaatagctagcaatctatgcaaacacctttcccataaagaaaccaaaccccatagtacagtgccttgtcctagtgttcacatgttcagctctgtttgtttagatgccaaggtttccattttcagggctataaaaagtattacttggaaatgaggcatcagaccaccagatgttaccgctcggttgaatgtgtccaccgtggagtggtttggtgacgctgtaaccattccacgccagtgacctctgctgggtcacagccactcaggaggggaagggtcaggatgagaggctgcagcctcgacacttggcgcggcctgatactgaaatagcgtctactcgtgcactgaataaaaacagaaacttgatcattttattcctgattagattttatcactctctgctaagacaatatagtctggagtataagtgggaaagcttgatttaaatactgtgaactctaataatgtggaaaatatttttcaactttaattttctgaagtataaattatttatgtaaattcattgtttttgcatatttcttaggacatgcatctttaagctttatcattgcccatatgtacagaaagagaataaagacatatgtttatggatgg

SEQ ID NO: 201895 - DNA, 5013 bp, Artificial Sequence
  derived and/or modified sequence
atgatggcccagttccccacagccatgaatggaggccccaacatgtgggccatcaccagcgaggagaggaccaagcatgaccggcagtttgacaacctgaagcccagcggcggctacatcactggagaccaggccaggaacttcttcctgcagagcggcctgcctgcccctgtgctggccgagatctgggccctgagtgacctgaacaaggatggcaagatggaccagcaggagttcagcatcgccatgaagctgatcaagctgaagctgcagggccagcagctgcctgtggtgctgccccccatcatgaagcagccccccatgttcagccccctcatcagcgccaggtttggcatgggctccatgcccaacctgagcatcccccagcccctgcccccagctgcccccatcaccagcctgagcagcgccaccagcggcaccaacctgccccccctgatgatgcccacccccctggtgcccagcgtgtccaccagcagcctgcccaatggaacagccagcctcatccagcccctgcccatcccctacagcagcagcaccctgccccacggcagcagctacagcctgatgatgggcggctttggaggagccagcatccagaaggcccagagcctgattgacctgggcagcagcagcagcaccagcagcacagccagcctgagcggcaacagccccaagacaggcaccagcgagtgggccgtgccccagcccacccggctgaagtaccggcagaagttcaacaccctggacaagtccatgagcggctacctgagcggcttccaggccagaaatgccctgctgcagagcaacctgagccagacccagctggccaccatctggaccctggctgatgtggatggagatggccagctgaaggccgaggagttcatcctggccatgcacctgacagacatggccaaggccggccagcccctgcccctgaccctgcccccagagctggtgccccccagcttccggggcggcaagcagattgacagcatcaatggcaccctgcccagctaccagaagatgcaggaggaggagccccagaagaagctgcctgtgacctttgaggacaagaggaaggccaactatgagcggggcaacatggagctggagaagaggcggcaggccctgatggagcagcagcagcgggaggccgagaggaaggcccagaaggagaaggaggagtgggagaggaagcagcgggagctgcaggagcaggagtggaagaagcagctggagctggagaagaggctggagaagcagcgggagctggagcggcagcgggaggaggagaggaggaaggacatcgagcggcgggaggccgccaagcaggagctggagcggcagaggcggctggagtgggagcgcatccggcggcaggagctgctgaaccagaagaaccgggagcaggaggagatcgtgcggctgaacagcaagaagaagaacctgcacctggagctggaggccctgaatggcaagcaccagcagatcagcggccgcctgcaggatgtgcggctgaagaagcagacccagaagacagagctggaggtgctggacaagcagtgtgacctggagatcatggagatcaagcagctgcagcaggagctgcaggagtaccagaacaagctgatctacctggtgcctgagaagcagctgctgaatgaaagaatcaagaacatgcagttcagcaacaccccagacagcggcgtgtccctgctgcacaagaagagcctggagaaggaggagctgtgccagaggctgaaggagcagctggatgccctggagaaggagacagccagcaagctgtctgagatggacagcttcaacaaccagctgaaggagctgcgggagacctacaacacccagcagctggccctggagcagctgtacaagatcaagagggacaagctgaaggagattgaaaggaagaggctggagctgatgcagaagaagaagctggaggatgaagctgccaggaaggccaagcagggcaaggagaacctgtggaaggagaacctgaggaaggaggaggaggagaagcagaagaggctgcaggaggagaagacccaggagaagatccaggaggaggagaggaaggccgaggagaagcagaggaaggacaaggacaccctgaaggccgaggagaagaagcgggagacagcctctgtgctggtgaactaccgggccctgtacccctttgaggccaggaaccatgatgagatgtccttcaacagcggggacatcatccaggtggatgagaagacagtgggggagcccggctggctgtatggcagcttccagggcaactttggctggttcccctgcaactacgtggagaagatgcccagcagtgaaaatgagaaggctgtgagccccaagaaggccctgctgccccccaccgtgtccctgagcgccaccagcaccagcagcgagcccctgagcagcaaccagcctgcctctgtgacagactaccagaatgtgtccttcagcaacctgactgtgaacacctcctggcagaagaagagcgccttcaccaggacagtgtccccaggctctgtgagccccatccacggccagggccaggtggtggagaacctgaaggcccaggccctgtgctcctggacagccaagaaggacaaccacctgaacttcagcaagcatgacatcatcaccgtgctggagcagcaggagaactggtggtttggagaggtgcatggaggccggggctggttccccaagagctatgtgaagatcatccctggcagcgaggtgaagcgggaggagcctgaggccctgtatgctgctgtgaacaagaagcccaccagcgctgcctacagcgtgggggaggagtacatcgccctgtacccctacagctctgtggagcccggggacctgaccttcacagaaggagaggagatcctggtgacccagaaggatggagagtggtggacaggcagcattggagacagaagtggcatcttccccagcaactacgtgaagcccaaggaccaggagagctttggaagtgccagcaagagcggggccagcaacaagaagccagagatcgcccaggtgaccagcgcctacgtggccagcggcagcgagcagctgagcctggcccctggccagctgatcctgatcctgaagaagaacaccagcggctggtggcagggcgagctgcaggcccggggcaagaagaggcagaagggctggttccctgccagccacgtgaagctgctgggccccagcagcgagcgggccaccccagccttccaccctgtgtgccaggtgattgccatgtatgactatgctgccaacaatgaagatgagctgtccttcagcaagggccagctgatcaacgtgatgaacaaggatgatcctgactggtggcagggcgagatcaatggagtgacaggcctcttccccagcaactacgtgaagatgaccacagacagcgaccccagccagcagtggtgtgccgacctgcagaccctggacaccatgcagcccattgaaaggaagaggcagggctacatccacgagctgatccagacagaggagcgctacatggctgacctgcagctggtggtggaggtgttccagaagaggatggccgagagcggcttcctgacagaaggagagatggccctgatctttgtgaactggaaggagctgatcatgagcaacaccaagctgctgaaggccctgcgggtgaggaagaagacaggaggagagaagatgcctgtgcagatgattggagacatcctggccgctgagctgagccacatgcaggcctacatccgcttctgcagctgccagctgaatggagctgccctgctgcagcagaagacagatgaggacacagacttcaaggagttcctgaagaagctggccagtgacccccgctgcaagggcatgcccctgagcagcttcctgctgaagcccatgcagaggatcacccgctaccccctgctgatccgcagcatcctggagaacaccccagagagccacgccgaccacagcagcctgaagctggccctggagcgggcagaggagctgtgcagccaggtgaatgaaggagtgcgggagaaggaaaattctgaccggctggagtggatccaggcccacgtgcagtgtgagggcctggccgagcagctgatcttcaacagcctgaccaactgcctgggccccaggaagctgctgcacagcggcaagctgtacaagaccaagagcaacaaggagctgcacggcttcctgttcaatgacttcctgctgctgacctacatggtgaagcagtttgctgtgagcagcggcagcgagaagctgttcagcagcaagagcaatgcccagttcaagatgtacaagacccccatcttcctgaatgaggtgctggtgaagctgcccacagaccccagcagtgatgagcccgtcttccacatcagccacatcgacagagtgtacaccctgaggacagacaacatcaatgaaagaacagcctgggtgcagaagatcaaggccgccagcgagcagtacatcgacacagagaagaagaagcgggagaaggcctaccaggcccggagccagaagaccagcggcatcggccgcctgatggtgcacgtgattgaggccacagagctgaaggcctgcaagcccaacgggaagagcaacccctactgtgagatctccatgggcagccagagctacaccaccaggaccatccaggacaccctgaaccccaagtggaacttcaactgccagttcttcatcaaggacctgtaccaggatgtgctgtgcctgaccctgtttgaccgggaccagttctccccagatgacttcctgggccgcacagagatccctgtggccaagatcagaacagagcaggagagcaagggccccatgacccggcggctgctgctgcacgaggtgcccaccggggaggtgtgggtgcgctttgacctgcagctgtttgagcagaagaccctgctgtag

SEQ ID NO: 201896 - DNA, 5013 bp, Artificial Sequence
  derived and/or modified sequence
atgatggcccagttccccaccgccatgaacggcggccccaacatgtgggctatcacaagtgaggagagaactaaacacgaccgccaattcgacaacttgaagccctctggcgggtatattaccggcgaccaggccagaaacttttttttgcaaagcggcttacctgcgcctgtgcttgctgagatttgggctttatctgatctcaacaaagatggaaaaatggatcaacaggagttcagtatagccatgaaactcattaagctgaaactgcagggacagcagttgccagttgtgctgcccccaatcatgaagcaaccccccatgtttagcccactaatctctgcaagattcgggatgggaagtatgcctaatttgtccatcccacagcccctgccgcccgctgcaccaatcacctcattaagtagcgctacctctggaacaaacttgccccctctcatgatgcccacaccattggtgcctagcgtcagcactagcagcctccctaatggcacagccagtctgattcagccattacccattccttactcaagcagcactttaccgcacggatcatcatactctctgatgatgggtggctttggtggagcatctatacaaaaggctcagagcttaatagacttaggtagcagctctagcacttcttctactgcttcactgtccggcaacagcccaaaaactggtacctctgagtgggccgtccctcagcccacgcggctgaaataccgtcagaaatttaacactcttgataagagtatgtctggttacctgtctggctttcaggcccgcaatgccctgttacagtcaaacctgagccagacccaactggcgaccatctggacactggccgacgtggatggggacggccagttaaaggctgaggaatttatcctggcgatgcacctgactgacatggcaaaagccgggcaacctctgcctcttacactgccaccggagctggtccctccttcattcaggggggggaagcagattgattcaattaacggaacactcccatcgtatcagaaaatgcaggaggaagagccccaaaaaaaattgcccgttacgttcgaagacaagcgcaaagctaattacgagagggggaatatggagctcgaaaaaagaaggcaagctcttatggagcaacaacaacgggaagccgaaagaaaggcgcagaaagagaaggaagagtgggaacgtaaacagcgggagctacaagagcaggagtggaagaaacaattggagctagaaaaaagactcgaaaagcagagggaattggagagacagagagaagaagagaggaggaaagacattgagcggagggaagccgctaaacaggagctggagcggcagaggcggctggaatgggaacgtatccgccgacaagagctgctcaaccagaagaatagagagcaagaagagattgtacggctgaacagcaagaagaagaatctgcatcttgaactggaggctctgaatggaaaacaccagcagatcagcggaagactgcaagatgtccgacttaagaaacagacccaaaagacagaactggaggttttggataaacaatgtgacttggagattatggagatcaagcaattacagcaggaactgcaagagtatcagaataaactgatatacctcgttcccgagaagcagttactgaacgaacgcatcaaaaatatgcagttcagcaacactccggattccggagttagcttgctgcataaaaagagcttggagaaggaggagctttgccaaaggttgaaagaacaacttgacgccctggagaaggagacagcctctaagttatccgaaatggactcattcaataatcagttgaaagaattgagagagacatataacacccaacaacttgcactcgaacagctctataagattaaaagggacaaactgaaggagattgaaagaaaacgtctcgagctcatgcaaaaaaagaaactggaagacgaggccgcacgaaaagcaaagcagggaaaggagaatttgtggaaggagaatctaagaaaggaggaagaggaaaaacaaaaaagactgcaggaagagaagactcaggagaaaatccaggaggaagaacggaaagctgaggaaaaacagaggaaagacaaagatacactgaaggccgaagagaagaagcgcgaaaccgcctctgtactcgtgaactacagggccttgtacccatttgaggcgcgaaaccacgacgaaatgtccttcaactcaggggacattatccaagtcgacgagaaaactgtgggtgagcccggttggctgtacggtagtttccagggaaacttcggatggtttccatgtaattatgtcgagaagatgccttcctcggagaacgagaaggcagtgtcgcctaaaaaagctttactgccgcccactgtgagcctgagcgccacgtccacctctagcgaacccttgtccagcaatcagcctgcaagtgtgaccgactaccagaacgtctctttttccaaccttaccgtgaatacttcctggcagaaaaaatctgcctttactcgaaccgtgtcaccaggatccgtgtctccaatccacggccaaggccaggtggtagagaacctgaaggcacaggcactctgctcttggacagcaaagaaagacaaccacctcaattttagcaaacatgacattattactgtgctggaacaacaggagaattggtggtttggcgaggtgcacggtgggaggggctggttccccaagtcttatgtcaagatcattcctggttcagaggttaagagggaggagccagaagcactgtatgccgccgttaacaagaagccaacctctgcagcatactccgtcggtgaagagtacatcgcattgtatccttattcatccgttgagcccggagacttaactttcacagagggggaggaaatactggtgacgcagaaggacggggagtggtggacaggcagtattggagacagatctggtatattcccgtctaattacgtcaaaccaaaggatcaggagtcttttggtagcgccagtaaaagcggggcaagcaataagaagcctgaaatcgctcaggttacttccgcttatgtagcctctggcagcgaacagctgagcctggcaccgggccagctgatcttgattcttaagaagaacacctcagggtggtggcagggcgaactccaagcccgagggaaaaagcgtcagaaaggatggttccccgcatcccacgtgaagttgttaggacctagttctgagagagccactcctgccttccatcctgtgtgtcaggtcatcgcgatgtacgactatgccgctaacaatgaggacgaactaagtttcagtaaagggcaacttattaacgttatgaataaagacgaccccgactggtggcagggggaaatcaatggggttactgggctgttcccctctaattacgtaaagatgaccacggactcagatccctcccagcagtggtgcgctgatttgcagaccctagataccatgcaacctatcgaaaggaagcgacagggttatattcatgagctgattcagaccgaagaacggtacatggcggatctccagctcgtggtcgaggtgtttcagaagcgaatggctgaatctgggttcttgactgagggcgaaatggcactgatatttgtgaattggaaagagctcatcatgtccaacactaagctcttgaaggccttgcgcgttagaaagaaaactggtggggaaaagatgccagtgcagatgataggcgatatcctcgcggccgagcttagccatatgcaggcctatattcggttctgctcctgccagctaaacggggcagcactcctacagcagaaaacggatgaagataccgattttaaagagttcttgaagaaacttgcatcagaccctaggtgtaaggggatgcccctttccagttttctgcttaagcctatgcaaaggattaccagatatccactcctcatccggtccatacttgaaaatacacccgagagtcacgcggaccattcctctctcaagctggccctggaacgtgccgaagagctctgctcacaggtgaatgaaggtgtccgggagaaagaaaacagcgatcggctggaatggatccaagctcatgtacagtgcgaaggtctggctgaacagcttatttttaactcccttactaattgtctaggacccagaaaactcctgcacagcggcaagctgtacaagacaaagtcgaacaaagaacttcatggtttccttttcaacgatttcttactgcttacgtatatggtgaagcagtttgctgtcagctccggaagcgaaaagctgttctcaagcaagtctaatgcccagttcaagatgtacaagacccccatcttcctgaatgaggtacttgttaagctgcctactgacccgtctagcgacgagcccgtctttcacataagtcacattgacagagtgtatactcttcgtacggacaatattaacgaacgcaccgcttgggtgcagaagataaaggctgcgagcgagcaatatatagacaccgagaaaaagaagagggagaaggcttatcaggccaggtcgcagaagacatcaggcatcggacgactgatggttcatgttatcgaggccaccgaactgaaggcctgcaaacccaacggcaaatccaatccttactgtgaaatcagcatgggctcccaatcttacactacccgcaccatccaggatactctcaatccaaagtggaatttcaactgtcagttttttatcaaagatctctaccaagatgtgctgtgcctcacactctttgacagggaccagttttcgcccgacgattttttgggaagaaccgagattcccgtcgctaaaatccggacagaacaggagagtaaggggccgatgaccaggcgactccttctccatgaagtgcccacgggtgaggtgtgggtgcgcttcgatttgcagctgtttgagcagaaaactcttctgtag

SEQ ID NO: 201897 - DNA, 5013 bp, Artificial Sequence
  derived and/or modified sequence
atgatggcccagttccccaccgccatgaacggcggccccaacatgtgggcgatcacctccgaggaacggacgaaacatgaccggcaattcgacaacctcaagccctcagggggttacattacaggggaccaagcccgaaacttctttctgcagtctggccttcctgcacccgtactggctgaaatatgggctctgagcgatctgaacaaggatggaaaaatggaccaacaggagttctccatagcgatgaagttgataaaactcaagttacagggtcagcagctgcctgtcgtgctgccgccaatcatgaagcagccgcccatgttttccccccttatctccgcgcgctttgggatgggcagcatgcctaatctatccatacctcagccattgcccccagccgctcccatcacctcgttgagttctgcgacctctggcacaaatttacccccgctgatgatgcccacacctcttgtcccgtctgtgagcacatccagcctgcccaatggtacggcttcgctgatacagcctttgcccataccgtactcctcctccacactcccacacggttcttcttactcacttatgatgggcgggtttgggggagcctccatacaaaaagcccagtccctgattgatctcggaagctcaagctccacttcatctacagcttctctgagtgggaactccccaaaaactggcactagtgaatgggcagttccacaaccgacgcgtctgaagtatcgccagaaattcaacacattggacaaatcaatgtcaggctaccttagtgggttccaagcacgtaacgccctgttgcaaagtaatttgagccagacacagttggccaccatatggactctcgctgacgtcgacggtgatggacagctgaaagcggaagagttcatccttgcaatgcacctgactgatatggccaaagccggccagcccttaccacttacactcccaccagaactcgtgcctccttcatttcgcggcgggaaacaaatcgatagcattaatggaactttaccgagttaccagaagatgcaggaggaagagccgcaaaagaaactgccggtcacgtttgaggacaaacgcaaggcaaactatgagagaggcaatatggaactggagaaaaggcgccaggcccttatggaacagcagcagagggaagccgagagaaaagcccagaaggaaaaggaggagtgggaaagaaaacaacgcgaactccaggaacaggagtggaagaagcagttggagctcgagaagcgcctggaaaagcagcgcgaactggagagacagcgggaggaggaacggcgcaaggatattgaacggcgagaagcagccaagcaggagctcgagagacagcggcggctcgagtgggagaggattcgacggcaggaactgcttaaccagaagaatagagagcaggaggagattgtgaggctgaactccaagaagaagaatctgcacctggaattggaagcgctcaatggaaagcatcagcaaatctccgggaggttacaagacgttcggcttaaaaagcagacgcaaaagactgagttggaagtcctcgacaagcagtgtgatctggaaataatggagattaaacagctgcagcaggagctgcaggaataccagaacaagctgatctacctggttcctgagaaacagttattgaatgagagaataaagaatatgcagttctcaaacacacccgacagcggcgtctccctcttgcacaaaaagtccctagagaaggaggaactgtgccagaggcttaaggagcagctggacgccctggaaaaagagactgcctccaagttaagcgagatggacagctttaacaatcagctcaaggaattgagagaaacctataatacacaacagttagcacttgaacaactgtacaagatcaaacgtgacaagctgaaggagattgaaaggaaaagactggagctgatgcagaaaaaaaaacttgaggatgaggccgcccgcaaagcaaaacaggggaaggaaaatctctggaaggaaaacctgcggaaggaggaggaagaaaaacaaaaaaggttgcaggaggagaagacacaggagaaaatccaggaagaagagcggaaagcagaagagaagcaacggaaggacaaagatacgctaaaagccgaggagaaaaagagagaaaccgcatcagtgcttgttaactatcgcgctctgtacccctttgaggcacgaaaccatgacgaaatgtcttttaacagtggcgatataatccaggtggacgaaaagaccgtaggcgagcctggatggctttatggatcctttcagggaaacttcggctggtttccttgcaactatgtggaaaaaatgccttctagtgaaaatgagaaggcagtcagtcccaagaaggccttgctgccccccaccgttagcctcagcgccacctctacctcctccgagcctctgagctcaaatcagcccgcctccgtcacagactaccagaatgtaagcttttccaatctcactgtaaatacatcttggcagaaaaagagcgccttcaccaggaccgtgagccctgggtccgtgagtcccatacacggacaagggcaggtcgtggaaaatttgaaggcccaagctttgtgctcatggactgctaaaaaggataaccatctgaacttctctaaacacgatattattaccgttctggaacagcaggagaactggtggttcggggaagtccacggagggcgcgggtggttccctaaatcatatgtcaagatcatccccggatctgaagtcaagcgagaggagcccgaggcactttatgccgcagtcaataaaaagccaacgtccgccgcctatagtgtcggcgaggagtacattgccctgtacccatatagcagcgtggagcctggggacttaacatttacagaaggcgaggaaattttagtaacccagaaagacggagaatggtggacaggcagcatcggagacaggtccgggatcttcccgagtaattacgttaagcccaaggatcaggagagctttggctccgcaagcaagtctggggccagtaataagaagcccgagatcgcacaggtcaccagcgcttacgtcgcctcagggtctgaacaactctccttagccccaggtcagctgatcctgatcttaaagaagaacacctctggctggtggcagggagagctgcaggctagaggaaagaaaaggcagaaagggtggttcccagcctctcacgtgaagctgcttggcccctctagcgaaagagcaacgcctgcctttcaccccgtgtgtcaggtgatcgccatgtacgattacgctgccaacaacgaggatgagctcagcttttcaaaaggacagctaataaacgtaatgaacaaggacgaccccgactggtggcaaggggagatcaatggcgtgacgggcctcttccctagcaattatgtaaaaatgaccacagactctgatccgtcacaacaatggtgcgccgatctacaaaccctcgacaccatgcaacctatcgagagaaaacggcaagggtacattcatgaactgatccagacggaggagcgatacatggctgacctgcagctggtcgtggaggtgtttcaaaaacggatggctgaaagcgggttcctgaccgaaggcgaaatggcattaatttttgttaattggaaagagttgatcatgagcaatactaagctgctgaaagcacttagggtccgcaaaaaaaccggtggcgagaagatgccggttcaaatgatcggcgacattctagccgccgagttaagccacatgcaggcctatattaggttttgtagctgtcagctgaatggtgcagccctcttacagcagaaaactgacgaggacacagactttaaggagtttctaaagaaactggcatccgaccctaggtgcaaggggatgcctctgtctagtttcttacttaagcccatgcagcgcataacacgctaccccctactgatccgctctatcctggagaatactcccgaatcccatgctgaccactcctcactcaaacttgctcttgaaagagctgaggaactgtgcagccaggttaatgaaggagtcagagaaaaagagaatagcgatcgactcgaatggattcaagctcatgtacagtgtgagggcctcgccgaacagctgattttcaattccctgaccaactgtctcggaccacgtaaattgctccattcagggaaactgtacaagactaaatccaacaaagaacttcatggtttcctattcaatgactttttacttcttacgtacatggtgaaacagttcgctgttagttccgggtcggaaaagctgtttagctcaaagtcaaatgctcagttcaaaatgtataagacccccattttcctgaatgaagtgctggtgaagttgcctaccgacccgtcttccgatgagcccgtttttcacataagtcacatcgatcgggtgtacacactcagaacagataacataaacgaaaggaccgcctgggtacagaagatcaaagccgcctccgagcagtacattgatacagagaaaaaaaaaagggagaaggcataccaggctcgttcacagaagacatctggaatcggccgcttaatggttcatgtgattgaagccacagaactaaaagcttgtaagcctaacgggaaatcaaacccctactgcgagatcagcatggggagtcagtcttacactactagaacaattcaggacaccctgaaccctaagtggaattttaactgtcagttctttatcaaggatctatatcaagacgtcctgtgcttgacactgttcgatcgcgaccagtttagccctgatgacttcctgggaagaactgagatccccgtggctaaaatccggacagaacaggaaagtaagggccctatgactcgcaggctactgctgcacgaggtccctaccggagaggtctgggtgaggttcgacctacagctcttcgagcaaaagacgctactttag

SEQ ID NO: 201898 - DNA, 5013 bp, Artificial Sequence
  derived and/or modified sequence
atgatggcccaattccccacagctatgaatggtgggcctaatatgtgggctatcacaagcgaagaacgcacaaaacacgatcggcagtttgacaatttaaagccctctggaggttacatcaccggggaccaggccaggaacttctttctacagtcagggttgcctgccccagttttggcagaaatttgggccctgtctgacctcaacaaagacgggaaaatggatcaacaggaattctccatcgccatgaaactgatcaagctgaaactgcagggacagcagctcccggttgtgctgccccctatcatgaagcagccacccatgttttcccccttgatttccgcccgtttcggaatggggtccatgccaaacctgagtatccctcagcccctccctcccgcagccccaattactagcttgagttcggccacatcgggtacgaacttgccacccctgatgatgccgacacccctggttccatcggtgtccacctccagtctgcccaacggcactgccagtctgattcaacctctgccgatcccgtactcatcttcgactctgccccatgggagctcctatagtttgatgatgggcggatttggcggtgccagtattcagaaagctcagagcttgattgacctcgggtctagctcttcgacttcatcaaccgcaagcctgtctggaaattccccgaaaacaggcacatccgaatgggctgtcccacagcccacaaggctcaagtacaggcagaaattcaacactttggacaagtctatgtctggatacctgtcaggattccaggccaggaacgccctgctgcagtcaaatctgagtcagacccaactggctaccatttggacactggccgatgtggacggggacggacagctgaaggcggaagagtttatcctcgccatgcacctgactgatatggctaaagcgggacagccgcttcccctcactcttcctcccgagcttgtcccaccctctttccggggtggaaagcagatcgactccataaatgggaccttgccatcttaccagaaaatgcaggaggaggagcctcagaagaagttaccagtgacatttgaggataagcgcaaggctaactatgagaggggtaatatggaactggaaaagagacggcaggctctcatggaacaacagcagagggaagccgagagaaaggcacaaaaagaaaaggaggaatgggaacgtaagcagcgcgaactacaggaacaggagtggaagaaacagctcgagttggaaaagagattagaaaagcagcgcgagttggaaagacagcgtgaagaggaacgcaggaaggatattgagagacgagaagcggctaaacaggaactggagcgacagagacgcctcgagtgggagcggataaggcggcaggaattgttaaaccagaagaatagggaacaggaagagattgtgcggctaaatagcaagaagaagaatctgcacctagagctcgaagccctcaacgggaagcaccagcagatctcaggcaggctccaggacgtacgcctcaagaaacagacacaaaaaaccgagctagaagtgttggataaacagtgcgacctcgagataatggaaatcaaacagttgcagcaggagctacaggagtatcagaataagctgatctatttagtgccggaaaagcagctcctaaatgagcgtattaagaacatgcagttttcgaatacgccagactccggagtctccctgctgcacaaaaaatctctggagaaagaggagctctgtcaacggctgaaggagcagttggacgctctggagaaagaaaccgcgtctaaactatctgaaatggacagctttaataaccagttgaaggagcttagagagacctataacacccagcagttggccctggaacagctgtataaaataaaacgggataaattaaaggaaattgaacgtaaaaggctagagttaatgcagaaaaagaagctggaagatgaggccgctcgaaaggccaaacagggcaaagagaacctttggaaagagaaccttcgaaaggaagaggaggagaaacaaaaacggttgcaggaggagaagacacaggagaagattcaggaagaagagcgaaaggccgaggagaagcaaagaaaagacaaagacaccctgaaggcagaggaaaagaaacgcgagacagcctctgtgttggtcaactatagagcgctctatccctttgaggccaggaatcatgacgagatgagttttaacagcggggacattatccaggtggacgaaaaaacagttggagaacccggttggctctatggttctttccagggcaatttcggatggttcccctgcaattatgtagaaaaaatgccgtcttcggagaacgagaaagccgtttctcccaaaaaggctctgctgcctcccaccgtgagtttaagtgcaacgtcaacaagcagtgagcccctgagttcaaaccaacctgctagcgtaacagactaccaaaatgtctctttctccaatctgaccgtgaatacaagttggcagaagaagtctgccttcactcggactgtgtctcccggatccgtttcccccattcacggtcagggccaggtggtcgagaatctgaaagcccaggcgctatgctcgtggacagccaagaaggacaatcaccttaactttagtaaacatgatatcatcacggtgctcgaacagcaggagaactggtggttcggtgaggtgcacgggggacgaggatggttcccgaagtcctacgttaaaattattcctgggagcgaggtcaagagagaggagcctgaagccctgtatgctgcggttaacaagaagccgaccagcgcggcttacagcgttggggaggagtatattgctctgtacccctactcttctgtggagccgggagaccttacctttactgagggagaggaaatcttggtgacgcaaaaggacggagagtggtggacaggaagcatcggtgatcggtctgggattttcccaagcaactacgtcaagcctaaagatcaggagagtttcggttccgcctccaagtcaggcgcatccaataagaaacccgaaattgcgcaggtgacatctgcatatgtggcttctggctcagaacagttgtcactagctccaggccagctgattctgatcctgaaaaagaatacctctggctggtggcaaggcgagctacaggccagaggtaagaagcggcagaaaggctggttcccagctagtcatgtgaagctgctcggccctagcagcgagcgagcaactcccgctttccacccagtgtgtcaggtgatcgccatgtatgattatgcagcaaacaatgaagacgaactctcgttcagtaaaggacagttaatcaacgttatgaacaaggatgacccagattggtggcagggggaaatcaatggtgtcaccggcctgtttccaagtaactatgtgaagatgactacagattctgatccatcgcagcagtggtgcgcggacctgcagaccctggatacaatgcaaccaatcgagagaaagcggcagggttacattcatgagctgattcagacggaagagaggtatatggctgatctgcagcttgtggtggaggtgtttcaaaagcggatggctgagtccggcttcctcacagagggagagatggctcttatcttcgtcaattggaaagagctgatcatgtccaatacaaagctcctcaaggcgctgagggtgaggaaaaagactgggggtgagaaaatgcctgtgcagatgataggggatatccttgctgctgagctaagtcacatgcaagcctatatacggttttgtagttgtcaactgaatggagcagctttgctgcagcagaagacggacgaagacacggactttaaggaattcctgaaaaaacttgcatctgaccccaggtgtaagggcatgccgctcagctcttttctgctaaagcccatgcaaagaattaccagatatccactcctgatccggtccattttggaaaacactccagagagccacgcagatcatagctcccttaagctcgccctggagcgggcagaagaactgtgcagtcaggttaatgagggggttcgtgagaaggaaaattccgataggctcgagtggatacaggcccacgtgcagtgtgaaggacttgccgagcagctaatttttaactccctgactaattgtctggggccacgtaagctgcttcactccggtaaactgtacaaaactaaatccaataaagagctgcatgggtttctgtttaacgatttcctcctcctgacgtacatggttaaacagttcgctgtttccagtggctctgaaaagcttttctccagcaagtcgaacgctcaatttaaaatgtataagacccccattttcctgaacgaggtgctggtgaaactccctactgacccctcctccgacgagcctgtatttcatatctcccacattgacagggtgtacaccctgaggaccgataatatcaatgaacgaactgcatgggtccaaaagattaaggcagcatcagagcagtatatcgacaccgagaaaaaaaagcgcgagaaggcctaccaggccaggagtcagaaaactagcggaattggccgactcatggttcatgtcatcgaggctacggaactcaaagcttgtaagcctaacggtaagtcgaacccctactgcgaaatctcaatgggcagtcaatcgtataccacccgcaccatacaagacactctcaatccgaaatggaatttcaactgccagttttttattaaagacctctatcaagacgtactttgtctgacactgtttgacagagaccagtttagccccgacgactttttgggaaggaccgagatccctgtcgccaagattcgtaccgagcaggagagtaagggaccaatgactcgacgcctgctcctgcatgaagtccctacaggagaagtgtgggtgcggtttgatcttcagttattcgagcaaaaaacattgctgtag

SEQ ID NO: 201899 - DNA, 5012 bp, Artificial Sequence
  derived and/or modified sequence
atgatggctcagtttcctacggcaatgaacggcggacctaatatgtgggctatcacctcagaggagaggacaaagcatgatagacagttcgacaacctcaaaccgtccgggggttatataacaggagaccaggcccgaaatttcttcttgcagagcggattaccagccccagtgcttgccgagatatgggcgctctcagacctgaacaaagacgggaaaatggaccagcaggagttctcaattgcgatgaagctgattaagctgaaactgcagggccaacaattgccggttgtactcccccctattatgaaacagcccccaatgttctcacccttgatctccgcacgatttggtatgggtagcatgcccaacctgagtatcccacagcctctaccccctgccgcacccatcacatccctgagcagcgccacaagcggcaccaacctcccccctttgatgatgcccaccccactggtgcccagtgtgtcaacctcctctctgcccaacggcacggcgagtctgattcagccactgcccatcccatatagctccagcacactgcctcacggatcttcctacagcctgatgatgggaggctttggaggggcatctattcagaaagcgcaatcacttatcgacctcggcagctcgagctccacctccagcaccgcgagtcttagcggtaacagccctaagacaggcacctcagaatgggccgtgccgcagcctacccggctgaaatatcggcaaaaattcaatactctggacaagagcatgtctggatatctgtctgggttccaggcacgtaatgccctgttgcagtctaacctgagccaaacccagctagccactatctggacactggcggatgtagacggtgatggtcagctgaaggctgaagagttcatactggcaatgcacctcaccgacatggccaaagcagggcaaccattacccctgacactgcccccagagctggtgcctcctagtttccggggaggcaagcagatcgattcaataaatggaacactgccgtcctatcagaagatgcaagaggaggaaccgcaaaagaagctgcccgtgaccttcgaagacaagagaaaggccaattatgagcgcggaaatatggagctcgagaagagacggcaggcgctcatggaacaacagcaacgggaggctgagaggaaagcccagaaagaaaaagaggagtgggagcggaagcagcgcgagctgcaggagcaggaatggaagaagcagctggaactggagaaacggttagagaaacaaagagaactggagagacaaagagaggaggaacgtaggaaagacatcgaaaggcgggaggccgctaaacaggaactggagaggcagcgaagattggaatgggagagaatccggagacaagaactcctgaaccaaaagaaccgggaacaggaggagatcgttagactaaattccaagaagaagaacctgcacctggagctggaggccctgaatggaaagcaccagcagatttccggacgccttcaagatgtacggctgaaaaaacagacccagaagacggagcttgaggtcctcgataagcaatgtgatctggagattatggagataaagcagcttcaacaagaacttcaggaatatcagaataagctgatttatcttgtccctgaaaagcagcttcttaacgaacggattaaaaacatgcagtttagtaacacaccggatagcggcgtgtcactgcttcataagaaatctcttgagaaggaggagctttgccaaagactcaaagagcaactggacgcactggagaaggaaactgcaagcaagttgtccgagatggacagttttaataatcagctcaaagagctcagagagacttacaacacccaacagctggctctcgaacagctttacaagatcaagcgagataaactcaaagagattgagcggaaaaggctcgaactcatgcaaaagaaaaagctcgaggatgaggcggcacgcaaagccaagcaggggaaagagaacttgtggaaagaaaacctcagaaaagaggaagaggaaaaacagaaaaggttgcaggaggagaagacccaggagaagatccaggaggaggagcgaaaagcggaggagaagcagagaaaagacaaggatactctcaaggccgaagaaaagaagagagaaactgcttctgtgctcgtgaactacagagccttgtacccttttgaggcacgcaatcacgatgaaatgtctttcaatagcggtgatatcatacaggtagatgaaaagaccgtgggagaaccaggctggctttatggcagctttcagggaaactttggttggtttccatgtaattacgtggaaaagatgccgtcttccgagaatgaaaaagctgtaagtcccaagaaggctttgctgcctcccacagtctcactctccgcaaccagtacatcaagtgaaccgctcagtagcaaccagcccgctagcgtaaccgactaccagaacgttagctttagcaatctgaccgtcaatacgagttggcagaaaaaaagcgcctttacgcgaaccgtgtcccctggcagcgtcagccccattcatgggcaaggtcaggttgttgagaatctgaaggcccaggccctgtgttcatggacagccaagaaagataaccatctgaacttctccaagcacgacatcataactgtactggagcagcaggagaactggtggttcggtgaggtacacggcggtcggggatggttccctaaatcctacgtgaagattattcccggttcggaggttaaacgggaagaacctgaagcactctacgctgctgttaacaaaaagcctaccagcgcagcttactctgtaggcgaagagtatatagctctgtatccctattcctccgtcgaaccaggggatctaactttcaccgagggcgaagaaatccttgtgactcagaaggatggagagtggtggactggctctatcggcgatcggtcaggcatcttccctagtaactacgtgaagccaaaggatcaggagtcctttgggtccgcatccaagagtggtgcttcaaacaagaaaccggagattgctcaggtgacctcggcctacgtggcctcgggttccgaacagctgtcgctggcacccggacagctgatattgatcttgaaaaagaatacctcaggttggtggcagggagaactgcaggccagaggcaagaaacgtcagaagggatggttccctgcttcacatgtgaagctgctgggcccaagttcagagcgggctacaccagccttccatcccgtgtgtcaagtaatcgcgatgtacgattacgctgcaaacaacgaagatgagctcagtttctcaaagggccagctgatcaacgtgatgaacaaggatgatccagattggtggcagggtgagatcaacggcgtgactggactcttcccttctaactacgtcaagatgacgaccgactccgacccatctcaacaatggtgtgctgacttacagaccctcgacaccatgcagccgattgaaagaaaacgccaaggctatatccatgagcttattcagaccgaggaaagatacatggcggaccttcagctcgttgtggaggtcttccaaaaacgaatggccgaatcaggctttttgacggagggcgagatggccctcatttttgtgaattggaaagagctcattatgagcaacaccaaactgcttaaagctctgagggttcggaaaaagactggcggtgagaagatgcctgttcagatgattggcgatattctggccgcagaactcagtcacatgcaggcatacatccgcttttgcagctgtcagctgaacggcgcagcactcctacagcagaagaccgatgaagatacggacttcaaggaatttttgaaaaagctggcttcagatcctcgctgtaagggtatgcccctgtcctcatttctactaaagcccatgcagagaatcacaagatacccactccttatcagaagtatcctggagaacacacccgaatcgcatgcggaccactcgagcctgaagttggcacttgaacgggcagaagaactgtgctcacaggtaaacgagggcgtgagggagaaagagaactcggataggctggaatggatccaagcgcacgtgcaatgcgagggtctcgctgagcagctgatctttaatagcttgacaaactgcttgggcccaagaaaactgctgcactccggaaaactttacaagactaagtccaataaggagttgcatgggttcctgttcaatgatttcctgctgctgacgtatatggtgaaacaattcgccgtttcatctggctccgagaaacttttcagttccaagagtaatgcccagtttaagatgtacaagactccaatcttccttaatgaggttctcgtcaaattacctaccgaccccagcagcgacgagccagtgttccacatttcccatattgatagggtgtacactctccggactgacaacattaacgaacggactgcgtgggtgcaaaaaatcaaagcggctagcgaacaatatatcgacacagagaagaaaaagcgagaaaaggcctatcaggcccgtagccagaagacgtccggtattggcaggctgatggtccacgtcatcgaagccactgagctgaaagcttgtaaaccgaacggtaagagtaacccatactgtgagatctctatgggatcccagagttataccacacggacaatccaagacaccttaaaccctaagtggaactttaactgtcagttctttatcaaagatctgtaccaggacgtgttgtgcctgacgctttttgaccgagaccagttctcccctgatgattttctgggcaggaccgagatcccagtggcaaaaattagaaccgagcaggagtcgaaagggccaatgactaggcggcttctgctgcacgaggttcctacaggtgaggtttgggttagattcgacttgcagctgtttgaacagaaaacactcctgta

SEQ ID NO: 201900 - DNA, 5013 bp, Artificial Sequence
  derived and/or modified sequence
atgatggcccagttccccaccgccatgaacggcggccccaacatgtgggccatcaccagcgaggagagaaccaagcacgacagacagttcgacaacctgaagcccagcggcggctacatcaccggcgaccaggccagaaacttcttcctgcagagcggcctgcccgcccccgtgctggccgagatctgggccctgagcgacctgaacaaggacggcaagatggaccagcaggagttcagcatcgccatgaagctgatcaagctgaagctgcagggccagcagctgcccgtggtgctgccccccatcatgaagcagccccccatgttcagccccctgatcagcgccagattcggcatgggcagcatgcccaacctgagcatcccccagcccctgccccccgccgcccccatcaccagcctgagcagcgccaccagcggcaccaacctgccccccctgatgatgcccacccccctggtgcccagcgtgagcaccagcagcctgcccaacggcaccgccagcctgatccagcccctgcccatcccctacagcagcagcaccctgccccacggcagcagctacagcctgatgatgggcggcttcggcggcgccagcatccagaaggcccagagcctgatcgacctgggcagcagcagcagcaccagcagcaccgccagcctgagcggcaacagccccaagaccggcaccagcgagtgggccgtgccccagcccaccagactgaagtacagacagaagttcaacaccctggacaagagcatgagcggctacctgagcggcttccaggccagaaacgccctgctgcagagcaacctgagccagacccagctggccaccatctggaccctggccgacgtggacggcgacggccagctgaaggccgaggagttcatcctggccatgcacctgaccgacatggccaaggccggccagcccctgcccctgaccctgccccccgagctggtgccccccagcttcagaggcggcaagcagatcgacagcatcaacggcaccctgcccagctaccagaagatgcaggaggaggagccccagaagaagctgcccgtgaccttcgaggacaagagaaaggccaactacgagagaggcaacatggagctggagaagagaagacaggccctgatggagcagcagcagagagaggccgagagaaaggcccagaaggagaaggaggagtgggagagaaagcagagagagctgcaggagcaggagtggaagaagcagctggagctggagaagagactggagaagcagagagagctggagagacagagagaggaggagagaagaaaggacatcgagagaagagaggccgccaagcaggagctggagagacagagaagactggagtgggagagaatcagaagacaggagctgctgaaccagaagaacagagagcaggaggagatcgtgagactgaacagcaagaagaagaacctgcacctggagctggaggccctgaacggcaagcaccagcagatcagcggcagactgcaggacgtgagactgaagaagcagacccagaagaccgagctggaggtgctggacaagcagtgcgacctggagatcatggagatcaagcagctgcagcaggagctgcaggagtaccagaacaagctgatctacctggtgcccgagaagcagctgctgaacgagagaatcaagaacatgcagttcagcaacacccccgacagcggcgtgagcctgctgcacaagaagagcctggagaaggaggagctgtgccagagactgaaggagcagctggacgccctggagaaggagaccgccagcaagctgagcgagatggacagcttcaacaaccagctgaaggagctgagagagacctacaacacccagcagctggccctggagcagctgtacaagatcaagagagacaagctgaaggagatcgagagaaagagactggagctgatgcagaagaagaagctggaggacgaggccgccagaaaggccaagcagggcaaggagaacctgtggaaggagaacctgagaaaggaggaggaggagaagcagaagagactgcaggaggagaagacccaggagaagatccaggaggaggagagaaaggccgaggagaagcagagaaaggacaaggacaccctgaaggccgaggagaagaagagagagaccgccagcgtgctggtgaactacagagccctgtaccccttcgaggccagaaaccacgacgagatgagcttcaacagcggcgacatcatccaggtggacgagaagaccgtgggcgagcccggctggctgtacggcagcttccagggcaacttcggctggttcccctgcaactacgtggagaagatgcccagcagcgagaacgagaaggccgtgagccccaagaaggccctgctgccccccaccgtgagcctgagcgccaccagcaccagcagcgagcccctgagcagcaaccagcccgccagcgtgaccgactaccagaacgtgagcttcagcaacctgaccgtgaacaccagctggcagaagaagagcgccttcaccagaaccgtgagccccggcagcgtgagccccatccacggccagggccaggtggtggagaacctgaaggcccaggccctgtgcagctggaccgccaagaaggacaaccacctgaacttcagcaagcacgacatcatcaccgtgctggagcagcaggagaactggtggttcggcgaggtgcacggcggcagaggctggttccccaagagctacgtgaagatcatccccggcagcgaggtgaagagagaggagcccgaggccctgtacgccgccgtgaacaagaagcccaccagcgccgcctacagcgtgggcgaggagtacatcgccctgtacccctacagcagcgtggagcccggcgacctgaccttcaccgagggcgaggagatcctggtgacccagaaggacggcgagtggtggaccggcagcatcggcgacagaagcggcatcttccccagcaactacgtgaagcccaaggaccaggagagcttcggcagcgccagcaagagcggcgccagcaacaagaagcccgagatcgcccaggtgaccagcgcctacgtggccagcggcagcgagcagctgagcctggcccccggccagctgatcctgatcctgaagaagaacaccagcggctggtggcagggcgagctgcaggccagaggcaagaagagacagaagggctggttccccgccagccacgtgaagctgctgggccccagcagcgagagagccacccccgccttccaccccgtgtgccaggtgatcgccatgtacgactacgccgccaacaacgaggacgagctgagcttcagcaagggccagctgatcaacgtgatgaacaaggacgaccccgactggtggcagggcgagatcaacggcgtgaccggcctgttccccagcaactacgtgaagatgaccaccgacagcgaccccagccagcagtggtgcgccgacctgcagaccctggacaccatgcagcccatcgagagaaagagacagggctacatccacgagctgatccagaccgaggagagatacatggccgacctgcagctggtggtggaggtgttccagaagagaatggccgagagcggcttcctgaccgagggcgagatggccctgatcttcgtgaactggaaggagctgatcatgagcaacaccaagctgctgaaggccctgagagtgagaaagaagaccggcggcgagaagatgcccgtgcagatgatcggcgacatcctggccgccgagctgagccacatgcaggcctacatcagattctgcagctgccagctgaacggcgccgccctgctgcagcagaagaccgacgaggacaccgacttcaaggagttcctgaagaagctggccagcgaccccagatgcaagggcatgcccctgagcagcttcctgctgaagcccatgcagagaatcaccagataccccctgctgatcagaagcatcctggagaacacccccgagagccacgccgaccacagcagcctgaagctggccctggagagagccgaggagctgtgcagccaggtgaacgagggcgtgagagagaaggagaacagcgacagactggagtggatccaggcccacgtgcagtgcgagggcctggccgagcagctgatcttcaacagcctgaccaactgcctgggccccagaaagctgctgcacagcggcaagctgtacaagaccaagagcaacaaggagctgcacggcttcctgttcaacgacttcctgctgctgacctacatggtgaagcagttcgccgtgagcagcggcagcgagaagctgttcagcagcaagagcaacgcccagttcaagatgtacaagacccccatcttcctgaacgaggtgctggtgaagctgcccaccgaccccagcagcgacgagcccgtgttccacatcagccacatcgacagagtgtacaccctgagaaccgacaacatcaacgagagaaccgcctgggtgcagaagatcaaggccgccagcgagcagtacatcgacaccgagaagaagaagagagagaaggcctaccaggccagaagccagaagaccagcggcatcggcagactgatggtgcacgtgatcgaggccaccgagctgaaggcctgcaagcccaacggcaagagcaacccctactgcgagatcagcatgggcagccagagctacaccaccagaaccatccaggacaccctgaaccccaagtggaacttcaactgccagttcttcatcaaggacctgtaccaggacgtgctgtgcctgaccctgttcgacagagaccagttcagccccgacgacttcctgggcagaaccgagatccccgtggccaagatcagaaccgagcaggagagcaagggccccatgaccagaagactgctgctgcacgaggtgcccaccggcgaggtgtgggtgagattcgacctgcagctgttcgagcagaagaccctgctgtag

SEQ ID NO: 201901 - protein, 254 aa, Artificial Sequence
  derived and/or modified sequence
MGLSIFLLLCVLGLSQAATPKIFNGTECGRNSQPWQVGLFEGTSLRCGGVLIDHRWVLTAAHCSGSRYWVRLGEHSLSQLDWTEQIRHSGFSVTHPGYLGASTSHEHDLRLLRLRLPVRVTSSVQPLPLPNDCATAGTECHVSGWGITNHPRNPFPDLLQCLNLSIVSHATCHGVYPGRITSNMVCAGGVPGQDACQGDSGGPLVCGGVLQGLVSWGSVGPCGQDGIPGVYTYICNSTLVGLGTSWNFNSCQPF

SEQ ID NO: 201902 - DNA, 765 bp, Artificial Sequence
  derived and/or modified sequence
atgggactgtcaatattcctgttgctgtgtgtcttggggctgtcccaagccgccacacctaagattttcaatggtactgagtgcggtcggaattcccagccttggcaggttggcctctttgaaggcacatcgctacgctgtggcggtgtactgattgatcatcgctgggtccttactgctgctcactgcagtggttctcgatattgggtcagacttggggaacactccctatcccagctggactggaccgaacagattcgtcatagcggattctccgtgacgcatccgggctacttgggcgctagcacttcccatgagcatgatttgaggctgttgcggctgagactccctgtccgagtaacatccagcgtccagccactgcctcttccaaatgactgcgcgactgccggcaccgaatgccatgtgtctggatggggaatcactaaccaccctagaaatccattccccgacctcctgcagtgtctcaacctttccattgtcagccatgctacatgccacggagtgtaccccggacgtatcacctccaacatggtgtgcgccggaggcgtgcctgggcaagacgcgtgtcagggggactccggcgggcccttagtgtgcggtggggtgctccaggggctagtttcctggggaagcgtcggaccatgcggccaagacgggattcctggtgtttatacatacatctgcaattcaacgttggtgggattgggaacatcttggaattttaattcatgtcagccgttttag

SEQ ID NO: 201903 - DNA, 882 bp, Artificial Sequence
  derived and/or modified sequence
gcaggtaggtggacggagagatagcagcgacgaggacaggccaaacagtgacagccacgtagaggatctggcagacaaagagacaaggtgagaaggagactttggaagtgacccaccatggggctcagcatctttttgctcctgtgtgttcttgggctcagccaggcagccacaccgaagattttcaatggcactgagtgtgggcgtaactcacagccgtggcaggtggggctgtttgagggcaccagcctgcgctgcgggggtgtccttattgaccacaggtgggtcctcacagcggctcactgcagcggcagcaggtactgggtgcgcctgggggaacacagcctcagccagctcgactggaccgagcagatccggcacagcggcttctctgtgacccatcccggctacctgggagcctcgacgagccacgagcacgacctccggctgctgcggctgcgcctgcccgtccgcgtaaccagcagcgttcaacccctgcccctgcccaatgactgtgcaaccgctggcaccgagtgccacgtctcaggctggggcatcaccaaccacccacggaacccattcccggatctgctccagtgcctcaacctctccatcgtctcccatgccacctgccatggtgtgtatcccgggagaatcacgagcaacatggtgtgtgcaggcggcgtcccggggcaggatgcctgccagggtgattctgggggccccctggtgtgtgggggagtccttcaaggtctggtgtcctgggggtctgtggggccctgtggacaagatggcatccctggagtctacacctatatttgcaactccactcttgttggcctgggaacttcttggaactttaactcctgccagcccttctaa

SEQ ID NO: 201904 - DNA, 765 bp, Artificial Sequence
  derived and/or modified sequence
atgggcctgagcatcttcctgctgctgtgtgtgctgggcctgagccaggccgccacccccaagatcttcaacggcacagaatgtggcaggaacagccagccctggcaggtgggcctgtttgagggcaccagcctgcgctgtggcggcgtgctgattgaccaccgctgggtgctgacagctgcccactgcagcggcagccgctactgggtgcggctgggggagcacagcctgagccagctggactggacagagcagatccgccacagcggcttctctgtgacccaccctggctacctgggcgccagcaccagccatgaacatgacctgcggctgctgcggctgcggctgcctgtgcgggtgaccagctctgtgcagcccctgcccctgcccaatgactgtgccacagctggaacagaatgtcatgtgtctggctggggcatcaccaaccaccccaggaaccccttcccagacctgctgcagtgcctgaacctgagcatcgtgtcccatgccacctgccacggcgtgtacccaggccgcatcaccagcaacatggtgtgtgccggcggcgtgcccggccaggatgcctgccagggcgacagcggcggccccctggtgtgtggcggcgtgctgcagggcctggtgtcctggggctctgtgggcccctgtggccaggacggcatccctggggtgtacacctacatctgcaacagcaccctggtgggcctgggcacctcctggaacttcaacagctgccagcccttctag

SEQ ID NO: 201905 - DNA, 765 bp, Artificial Sequence
  derived and/or modified sequence
atgggcctgagcatcttcctgctgctgtgcgtgctgggcctgagccaagccgccacccccaagatcttcaacggaacagagtgtggacggaactctcaaccttggcaagtggggctctttgagggcacttcgctccggtgcggaggcgttctgatagaccataggtgggtcttgaccgccgcccattgtagcggctcccgttattgggtccgtctgggtgagcacagcctgtcccagctagactggaccgaacagatccggcattccggattttcagtgacacatcccggctacctgggcgcatcgacatcgcatgagcatgacctgagattattaaggctgcgactgcccgtgagggtcacctcttccgtgcagccactgcctctcccaaacgactgcgctacagcaggaacagagtgccacgtctcagggtgggggattaccaaccaccctcgcaacccatttcctgacctcctgcagtgcctgaatttgagtatagtatcccacgctacatgccatggggtgtacccaggacgcatcacaagtaatatggtttgtgccggtggcgtcccgggtcaagatgcctgccagggtgattccggaggccccctggtgtgcggtggcgttttgcagggtctcgtctcttgggggtctgttgggccgtgtggccaggatggcatacctggggtgtatacatacatctgcaactctacgctggtggggttgggcacctcttggaatttcaactcctgccagccattttag

SEQ ID NO: 201906 - DNA, 765 bp, Artificial Sequence
  derived and/or modified sequence
atggggttatcgatctttcttctcctttgtgtgcttggtctgagccaagcagccaccccaaagatcttcaacggcacagaatgcggccgaaactctcagccatggcaagttgggctgtttgagggcacatcactgcgttgcggtggtgtcctgatcgaccaccgttgggttttgactgcggcacattgttcgggcagccgatattgggttcgcctgggcgagcacagcctgtctcagttggattggactgaacagatccgccattcagggttctcggtgacccacccgggttatctcggtgccagtacctcccacgagcacgatctgagactgctgagactgagactgccagttcgcgtcacaagctccgttcagcctctgccgcttcccaatgattgtgccactgccggaactgagtgtcacgttagcggctggggtattaccaaccaccctaggaaccccttccccgacttgctgcagtgtctcaacctgtctattgtgagccacgcaacatgtcacggtgtctatcccggacgaattacatctaatatggtgtgcgcgggaggggtgcctgggcaagatgcctgccagggtgatagcggcggacctctagtctgtggaggcgtcctgcagggtctcgtgagttggggctctgtcggcccttgcgggcaggacggaatccccggagtgtacacttacatttgcaattcaactctggtggggttgggcacaagttggaactttaattcctgccagcccttctag

SEQ ID NO: 201907 - DNA, 765 bp, Artificial Sequence
  derived and/or modified sequence
atgggcctgagcatcttcctgctgctgtgcgtgctgggcctgagccaggccgccacccccaagatcttcaacggcaccgagtgcggcagaaacagccagccctggcaggtgggcctgttcgagggcaccagcctgagatgcggcggcgtgctgatcgaccacagatgggtgctgaccgccgcccactgcagcggcagcagatactgggtgagactgggcgagcacagcctgagccagctggactggaccgagcagatcagacacagcggcttcagcgtgacccaccccggctacctgggcgccagcaccagccacgagcacgacctgagactgctgagactgagactgcccgtgagagtgaccagcagcgtgcagcccctgcccctgcccaacgactgcgccaccgccggcaccgagtgccacgtgagcggctggggcatcaccaaccaccccagaaaccccttccccgacctgctgcagtgcctgaacctgagcatcgtgagccacgccacctgccacggcgtgtaccccggcagaatcaccagcaacatggtgtgcgccggcggcgtgcccggccaggacgcctgccagggcgacagcggcggccccctggtgtgcggcggcgtgctgcagggcctggtgagctggggcagcgtgggcccctgcggccaggacggcatccccggcgtgtacacctacatctgcaacagcaccctggtgggcctgggcaccagctggaacttcaacagctgccagcccttctag

SEQ ID NO: 201908 - protein, 299 aa, Artificial Sequence
  derived and/or modified sequence
MLESHLIIYFLLAVIQFLLGIFTNGIIVVVNGIDLIKHRKMAPLDLLLSCLAVSRIFLQLFIFYVNVIVIFFIEFIMCSANCAILLFINELELWLATWLGVFYCAKVASVRHPLFIWLKMRISKLVPWMILGSLLYVSMICVFHSKYAGFMVPYFLRKFFSQNATIQKEDTLAIQIFSFVAEFSVPLLIFLFAVLLLIFSLGRHTRQMRNTVAGSRVPGRGAPISALLSILSFLILYFSHCMIKVFLSSLKFHIRRFIFLFFILVIGIYPSGHSLILILGNPKLKQNAKKFLLHSKCCQ

SEQ ID NO: 201909 - DNA, 900 bp, Artificial Sequence
  derived and/or modified sequence
atgctggagagccacctgatcatctacttcctgctggccgtgatccagttcctgctgggcatcttcaccaacggcatcatcgtggtggtgaacggcatcgacctgatcaagcacagaaagatggcccccctggacctgctgctgagctgcctggccgtgagcagaatcttcctgcagctgttcatcttctacgtgaacgtgatcgtgatcttcttcatcgagttcatcatgtgcagcgccaactgcgccatcctgctgttcatcaacgagctggagctgtggctggccacctggctgggcgtgttctactgcgccaaggtggccagcgtgagacaccccctgttcatctggctgaagatgagaatcagcaagctggtgccctggatgatcctgggcagcctgctgtacgtgagcatgatctgcgtgttccacagcaagtacgccggcttcatggtgccctacttcctgagaaagttcttcagccagaacgccaccatccagaaggaggacaccctggccatccagatcttcagcttcgtggccgagttcagcgtgcccctgctgatcttcctgttcgccgtgctgctgctgatcttcagcctgggcagacacaccagacagatgagaaacaccgtggccggcagcagagtgcccggcagaggcgcccccatcagcgccctgctgagcatcctgagcttcctgatcctgtacttcagccactgcatgatcaaggtgttcctgagcagcctgaagttccacatcagaagattcatcttcctgttcttcatcctggtgatcggcatctaccccagcggccacagcctgatcctgatcctgggcaaccccaagctgaagcagaacgccaagaagttcctgctgcacagcaagtgctgccagtag

SEQ ID NO: 201910 - DNA, 900 bp, Artificial Sequence
  derived and/or modified sequence
atgctagagagccacctgattatctattttcttctcgccgtgatccagtttctccttggtatatttaccaacgggatcattgtagtcgtgaatggaatcgatctaattaaacataggaagatggccccgctggatctgttgttatcttgcctcgccgtctctaggatctttctccagctctttatattctacgtgaacgtgatcgtaatcttcttcattgagtttattatgtgctctgcaaattgtgccatcctgctgtttataaatgaactggagttgtggttggctacctggctgggggtcttttattgcgctaaggtagcctccgtgagacacccactgttcatctggctaaagatgcgcattagcaagctggtgccctggatgattcttgggagcttactttacgtttctatgatttgtgttttccattccaagtacgccggatttatggtgccttacttcttgcgcaagtttttctctcaaaacgcaaccattcagaaagaagacaccctggctattcagatttttagctttgtcgcagagttctcagtcccactgttgatctttctgtttgcggtcctgctcctgattttctctttagggagacacaccaggcagatgagaaacaccgtggcagggtccagggtgccgggcaggggagcccccatctccgcgctactaagcatcttgtcatttctaatcctctacttcagtcactgcatgataaaggtgtttctgtcaagtctgaagttccatatccggcggtttatctttcttttttttatcttggtgataggcatttacccttccggtcacagtctgatactaattctgggcaatccaaaacttaaacaaaatgccaagaagtttctgctccattctaagtgctgccagtag

SEQ ID NO: 201911 - DNA, 900 bp, Artificial Sequence
  derived and/or modified sequence
atgctggagagccacctgatcatctacttcctgctggccgtcatccagttcctgctgggcatcttcaccaacggcatcatcgtggtggtgaatggaattgacctgatcaagcacaggaagatggcccccctggacctgctgctgagctgcctggccgtgagccgcatcttcctgcagctgttcatcttctacgtgaatgtcatcgtcatcttcttcatcgagttcatcatgtgcagcgccaactgtgccatcctgctcttcatcaatgagctggagctgtggctggccacctggctgggcgtcttctactgtgccaaggtggcctctgtgcgccaccccctcttcatctggctgaagatgaggatcagcaagctggtgccctggatgatcctgggcagcctgctgtatgtgtccatgatctgtgtgttccacagcaaatatgccggcttcatggtgccctacttcctgaggaagttcttcagccagaatgccaccatccagaaggaggacaccctggccatccagatcttctcctttgtggccgagttctctgtgcccctgctgatcttcctgtttgctgtgctgctgctgatcttcagcctgggccgccacacccggcagatgaggaacacagtggccggcagccgggtgcccggccgcggggcccccatcagcgccctgctgagcatcctgtccttcctgatcctgtacttcagccactgcatgatcaaggtgttcctgagcagcctgaagttccacatccgccgcttcatcttcctgttcttcatcctggtgattggcatctaccccagcggccacagcctcatcctgatcctgggcaaccccaagctgaagcagaatgccaagaagttcctgctgcacagcaagtgctgccagtag

SEQ ID NO: 201912 - DNA, 900 bp, Artificial Sequence
  derived and/or modified sequence
atgctggagagccacctgatcatctacttcctgctggccgtgatccagttcctcctgggcatcttcaccaacggcattatcgtcgtggtaaatggtattgacctcataaaacacagaaaaatggctccactggatttactgttgtcctgtctggccgtgagcagaatctttctgcagctctttatcttttatgtcaacgtgattgtgatttttttcatcgaattcataatgtgttcagccaactgtgccattcttttgttcatcaacgagctcgagctatggctcgctacgtggttgggcgttttttattgcgccaaagtcgccagtgtccgacaccccctgttcatatggctcaaaatgagaatttcaaagttggtcccttggatgatcctgggatcccttctctatgtttccatgatatgcgtcttccatagcaagtacgcaggattcatggtgccatattttttaaggaagttttttagtcagaatgctaccatccagaaagaagataccttggccattcagatctttagttttgtggccgagttctccgtgcccctcctgatcttcctttttgcagtccttcttcttatcttttccctggggaggcacacccggcagatgaggaataccgtggccggcagtcgcgtcccggggcgaggggcccccatctcagccctgctaagcatcctgtcattcttaatcctgtattttagtcattgtatgataaaggttttcctgagctccttgaagtttcatatccgtcgctttattttccttttttttatcctggtgatcggcatttacccctctgggcactcattgattctaatcctgggaaaccccaagcttaagcagaatgcgaaaaaatttctgctgcacagcaaatgctgccagtag

SEQ ID NO: 201913 - DNA, 900 bp, Artificial Sequence
  derived and/or modified sequence
atgctcgaaagccacctgatcatatatttcctccttgccgtgatccaatttctgctgggcattttcaccaatggtattatagtggtggtcaatggaatcgatttaattaagcaccggaaaatggcccctcttgatttgctgctcagctgcctggccgtgagtcgcatcttcttgcaactgtttattttttatgtaaatgtcattgtgattttctttattgaattcatcatgtgctcagctaactgcgcaattcttctgtttattaacgagctcgagttgtggctggcgacttggttaggtgttttctattgcgcaaaagtagctagtgtgcggcacccccttttcatatggttgaagatgcggatcagcaagctcgtgccttggatgatactgggcagtctgctctatgtaagtatgatctgtgtctttcattcaaagtatgcaggttttatggtgccatactttctgcggaagttcttctctcagaatgccacgattcaaaaagaggacactctggctatacaaatctttagcttcgtggctgagttctccgtccccctgcttatcttcctgttcgccgttctactattaatcttctcgctgggacgccatacgagacaaatgcgtaacactgtcgcagggagtagagtcccaggacgaggcgctcctatcagcgctctgctgtccatcctgagtttcctcatcctgtactttagccactgcatgattaaggtgttcctgtcctctttgaagtttcacatcaggcgctttattttcctgttctttatactggtgatcggcatttatccgtcaggacactccttgatccttatcttaggaaacccaaaactgaaacagaatgctaagaagtttctgctgcacagtaaatgttgccagtag

SEQ ID NO: 201914 - DNA, 1355 bp, Artificial Sequence
  derived and/or modified sequence
ttctcccagctgtctgaaggtgtctgattccattatttgcctgtgatgactttgaaagctaggtaaacctgtaaaatgcaaaagccatcaataagaagcaaattgatgctagagtatctcctccttatttgactgtctcagaactaaatagagaaagcagtgacataaacaaatgtacaccaccttcctgccccatgcctttattgttagtcttcttccccagaggagtcctgatctaattgaagagcgtgaacaacccaacctgtccaaaactttataacttcattattttttaagtaaataattttttattcctaaaatgctagagtctcacctcattatctattttcttcttgcagtgatacaatttcttcttgggattttcacaaatggcatcattgtggtggtgaatggcattgacttgatcaagcacagaaaaatggctccgctggatctccttctttcttgtctggcagtttctagaatttttctgcagttgttcatcttctacgttaatgtgattgttatcttcttcatagaattcatcatgtgttctgcgaattgtgcaattctcttatttataaatgaattggaactttggcttgccacatggctcggcgttttctattgtgccaaggttgccagcgtccgtcacccactcttcatctggttgaagatgaggatatccaagctggtcccatggatgatcctggggtctctgctatatgtatctatgatttgtgttttccatagcaaatatgcagggtttatggtcccatacttcctaaggaaatttttctcccaaaatgccacaattcaaaaagaagatacactggctatacagattttctcttttgttgctgagttctcagtgccattgcttatcttcctttttgctgttttgctcttgattttctctctggggaggcacacccggcaaatgagaaacacagtggccggcagcagggttcctggcaggggtgcacccatcagcgcgttgctgtctatcctgtccttcctgatcctctacttctcccactgcatgataaaagtttttctctcttctctaaagtttcacatcagaaggttcatctttctgttcttcatccttgtgattggtatatacccttctggacactctctcatcttaattttaggaaatcctaaattgaaacaaaatgcaaaaaagttcctcctccacagtaagtgctgtcagtgagagagaagttggatcagttcaaagaacccatgattcaatgatttacccatgcctgccacacttccctcagccagacaaagcagcctgttcataaatatacaacatgtccccttcaggcctgtttatccagcctgag

SEQ ID NO: 201915 - protein, 1076 aa, Artificial Sequence
  derived and/or modified sequence
MKPDRDTLDEYFEYDAEEFLVSLALLITEGRTPECSVKGRTESFHCPPAQSCYPVTTKHECSDKLAQCRQARRTRSEVTLLWKNNLPIMVEMMLLPDCCYSDDGPTTEGIDLNDPAIKQDALLLERWILEPVPRQNGDRFIEEKTLLLAVRSFVFFSQLSAWLSVSHGAIPRNILYRISAADVDLQWNFSQTPIEHVFPVPNVSHNVALKVSVQSLPRQSNYPVLTCSIHTNIGLYEKRIQQHKLKTHQHHNPNEAEQCGTNSSQRLCSKQTWTMAPESVLHAKSGPSPEYTAAVKNIKLYPGTGSKSDHGTSQANILGFSGIGDIKSQETSVRTLKSFSMVDSSISNRQSFWQSAGETNPLIGSLIQERQEIIARIAQHLIHCDPSTSHVSGRPFNTQESSSLHSKLFRVSQENENVGKGKEAFSMTFGSPEFSSPEDTNEGKIRLKPETPRSETCISNDFYSHMPVGETNPLIGSLLQERQDVIARIAQHLEHIDPTASHIPRQSFNMHDSSSVASKVFRSSYEDKNLLKKNKDESSVSISHTKCSLLGDISDGKNLVPNKCFTSFKNNSKEKCSLKHQTRNQCQNNPSEIIQSTYQETQNKSSSLSTSSILSQHKENNLDLTSRFKEQEMSNGIDKQYSNCTTIDKQICTNKYKEKIINENYNPKFFGNLQSDDSKKNDSKIKVTVLEMSEYLNKYESMSSNKDSKRPKTCEQNTQLNSIENYLNKDNEGFKCKKSDQLKNEQDKQEDPTNEKSQNYSQRRSIKDCLSTCEQPKNTEVLRTTLKHSNVWRKHNFHSLDGTSTRAFHPQTGLPLLSSPVPQRKTQSGCFDLDSSLLHLKSFSSRSPRPCLNIEDDPDIHEKPFLSSSAPPITSLSLLGNFEESVLNYRFDPLGIVDGFTAEVGASGAFCPTHLTLPVEVSFYSVSDDNAPSPYMGVITLESLGKRGYRVPPSGTIQVTLFNPNKTVVKMFVVIYDLRDMPANHQTFLRQRTFSVPVKQEVKRSVNKENIRHTEERLLRYLIHLRFQSSKSGKIYLHRDVRLLFSRKSMEVDSGAAYELKSYTESPTNPQFSPRC

SEQ ID NO: 201916 - protein, 1076 aa, Artificial Sequence
  derived and/or modified sequence
IRPRSDTLDEYFEYDAEEFLVSLALLITEGRTPECSVKGRTESFHCPPAQSCYPVTTKHECSDKLAQCRQARRTRSEVTLLWKNNLPIMVEMMLLPDCCYSDDGPTTEGIDLNDPAIKQDALLLERWILEPVPRQNGDRFIEEKTLLLAVRSFVFFSQLSAWLSVSHGAIPRNILYRISAADVDLQWNFSQTPIEHVFPVPNVSHNVALKVSVQSLPRQSNYPVLTCSIHTNIGLYEKRIQQHKLKTHQHHNPNEAEQCGTNSSQRLCSKQTWTMAPESVLHAKSGPSPEYTAAVKNIKLYPGTGSKSDHGTSQANILGFSGIGDIKSQETSVRTLKSFSMVDSSISNRQSFWQSAGETNPLIGSLIQERQEIIARIAQHLIHCDPSTSHVSGRPFNTQESSSLHSKLFRVSQENENVGKGKEAFSMTFGSPEFSSPEDTNEGKIRLKPETPRSETCISNDFYSHMPVGETNPLIGSLLQERQDVIARIAQHLEHIDPTASHIPRQSFNMHDSSSVASKVFRSSYEDKNLLKKNKDESSVSISHTKCSLLGDISDGKNLVPNKCFTSFKNNSKEKCSLKHQTRNQCQNNPSEIIQSTYQETQNKSSSLSTSSILSQHKENNLDLTSRFKEQEMSNGIDKQYSNCTTIDKQICTNKYKEKIINENYNPKFFGNLQSDDSKKNDSKIKVTVLEMSEYLNKYESMSSNKDSKRPKTCEQNTQLNSIENYLNKDNEGFKCKKSDQLKNEQDKQEDPTNEKSQNYSQRRSIKDCLSTCEQPKNTEVLRTTLKHSNVWRKHNFHSLDGTSTRAFHPQTGLPLLSSPVPQRKTQSGCFDLDSSLLHLKSFSSRSPRPCLNIEDDPDIHEKPFLSSSAPPITSLSLLGNFEESVLNYRFDPLGIVDGFTAEVGASGAFCPTHLTLPVEVSFYSVSDDNAPSPYMGVITLESLGKRGYRVPPSGTIQVTLFNPNKTVVKMFVVIYDLRDMPANHQTFLRQRTFSVPVKQEVKRSVNKENIRHTEERLLRYLIHLRFQSSKSGKIYLHRDVRLLFSRKSMEVDSGAAYELKSYTESPTNPQFSPRC

SEQ ID NO: 201917 - protein, 958 aa, Artificial Sequence
  derived and/or modified sequence
RPDADTLDEYFEYDAEEFLVSLALLITEGRTPECSVKGRTESFHCPPAQSCYPVTTKHECSDKLAQCRQARRTRSEVTLLWKNNLPIMVEMMLLPDCCYSDDGPTTEGIDLNDPAIKQDALLLERWILEPVPRQNGDRFIEEKTLLLAVRSFVFFSQLSAWLSVSHGAIPRNILYRISAADVDLQWNFSQTPIEHVFPVPNVSHNVALKVSVQSLPRQSNYPVLTCSIHTNIGLYEKRIQQHKLKTHQHHNPNEAEQCGTNSSQRLCSKQTWTMAPESVLHAKSGPSPEYTAAVKNIKLYPGTGSKSDHGTSQANILGFSGIGDIKSQETSVRTLKSFSMVDSSISNRQSFWQSAGETNPLIGSLIQERQEIIARIAQHLIHCDPSTSHVSGRPFNTQESSSLHSKLFRVSQENENVGKGKEAFSMTFGSPEFSSPEDTNEGKIRLKPETPRSETCISNDFYSHMPVGETNPLIGSLLQERQDVIARIAQHLEHIDPTASHIPRQSFNMHDSSSVASKVFRSSYEDKNLLKKNKDESSVSISHTKCSLLGDISDGKNLVPNKCFTSFKNNSKEKCSLKHQTRNQCQNNPSEIIQSTYQETQNKSSSLSTSSILSQHKENNLDLTSRFKEQEMSNGIDKQYSNCTTIDKQICTNKYKEKIINENYNPKFFGNLQSDDSKKNDSKIKVTVLEMSEYLNKYESMSSNKDSKRPKTCEQNTQLNSIENYLNKDNEGFKCKKSDQLKNEQDKQEDPTNEKSQNYSQRRSIKDCLSTCEQPKNTEVLRTTLKHSNVWRKHNFHSLDGTSTRAFHPQTGLPLLSSPVPQRKTQSGCFDLDSSLLHLKSFSSRSPRPCLNIEDDPDIHEKPFLSSSAPPITSLSLLGNFEESVLNYRFDPLGIVDGFTAEVGASGAFCPTHLTLPVEVSFYSVSDDNAPSPYMGVITLESLGKRGYRVPPSGTIQV

SEQ ID NO: 201918 - DNA, 3231 bp, Artificial Sequence
  derived and/or modified sequence
atgaagcccgacagagacaccctggacgagtacttcgagtacgacgccgaggagttcctggtgagcctggccctgctgatcaccgagggcagaacccccgagtgcagcgtgaagggcagaaccgagagcttccactgcccccccgcccagagctgctaccccgtgaccaccaagcacgagtgcagcgacaagctggcccagtgcagacaggccagaagaaccagaagcgaggtgaccctgctgtggaagaacaacctgcccatcatggtggagatgatgctgctgcccgactgctgctacagcgacgacggccccaccaccgagggcatcgacctgaacgaccccgccatcaagcaggacgccctgctgctggagagatggatcctggagcccgtgcccagacagaacggcgacagattcatcgaggagaagaccctgctgctggccgtgagaagcttcgtgttcttcagccagctgagcgcctggctgagcgtgagccacggcgccatccccagaaacatcctgtacagaatcagcgccgccgacgtggacctgcagtggaacttcagccagacccccatcgagcacgtgttccccgtgcccaacgtgagccacaacgtggccctgaaggtgagcgtgcagagcctgcccagacagagcaactaccccgtgctgacctgcagcatccacaccaacatcggcctgtacgagaagagaatccagcagcacaagctgaagacccaccagcaccacaaccccaacgaggccgagcagtgcggcaccaacagcagccagagactgtgcagcaagcagacctggaccatggcccccgagagcgtgctgcacgccaagagcggccccagccccgagtacaccgccgccgtgaagaacatcaagctgtaccccggcaccggcagcaagagcgaccacggcaccagccaggccaacatcctgggcttcagcggcatcggcgacatcaagagccaggagaccagcgtgagaaccctgaagagcttcagcatggtggacagcagcatcagcaacagacagagcttctggcagagcgccggcgagaccaaccccctgatcggcagcctgatccaggagagacaggagatcatcgccagaatcgcccagcacctgatccactgcgaccccagcaccagccacgtgagcggcagacccttcaacacccaggagagcagcagcctgcacagcaagctgttcagagtgagccaggagaacgagaacgtgggcaagggcaaggaggccttcagcatgaccttcggcagccccgagttcagcagccccgaggacaccaacgagggcaagatcagactgaagcccgagacccccagaagcgagacctgcatcagcaacgacttctacagccacatgcccgtgggcgagaccaaccccctgatcggcagcctgctgcaggagagacaggacgtgatcgccagaatcgcccagcacctggagcacatcgaccccaccgccagccacatccccagacagagcttcaacatgcacgacagcagcagcgtggccagcaaggtgttcagaagcagctacgaggacaagaacctgctgaagaagaacaaggacgagagcagcgtgagcatcagccacaccaagtgcagcctgctgggcgacatcagcgacggcaagaacctggtgcccaacaagtgcttcaccagcttcaagaacaacagcaaggagaagtgcagcctgaagcaccagaccagaaaccagtgccagaacaaccccagcgagatcatccagagcacctaccaggagacccagaacaagagcagcagcctgagcaccagcagcatcctgagccagcacaaggagaacaacctggacctgaccagcagattcaaggagcaggagatgagcaacggcatcgacaagcagtacagcaactgcaccaccatcgacaagcagatctgcaccaacaagtacaaggagaagatcatcaacgagaactacaaccccaagttcttcggcaacctgcagagcgacgacagcaagaagaacgacagcaagatcaaggtgaccgtgctggagatgagcgagtacctgaacaagtacgagagcatgagcagcaacaaggacagcaagagacccaagacctgcgagcagaacacccagctgaacagcatcgagaactacctgaacaaggacaacgagggcttcaagtgcaagaagagcgaccagctgaagaacgagcaggacaagcaggaggaccccaccaacgagaagagccagaactacagccagagaagaagcatcaaggactgcctgagcacctgcgagcagcccaagaacaccgaggtgctgagaaccaccctgaagcacagcaacgtgtggagaaagcacaacttccacagcctggacggcaccagcaccagagccttccacccccagaccggcctgcccctgctgagcagccccgtgccccagagaaagacccagagcggctgcttcgacctggacagcagcctgctgcacctgaagagcttcagcagcagaagccccagaccctgcctgaacatcgaggacgaccccgacatccacgagaagcccttcctgagcagcagcgccccccccatcaccagcctgagcctgctgggcaacttcgaggagagcgtgctgaactacagattcgaccccctgggcatcgtggacggcttcaccgccgaggtgggcgccagcggcgccttctgccccacccacctgaccctgcccgtggaggtgagcttctacagcgtgagcgacgacaacgcccccagcccctacatgggcgtgatcaccctggagagcctgggcaagagaggctacagagtgccccccagcggcaccatccaggtgaccctgttcaaccccaacaagaccgtggtgaagatgttcgtggtgatctacgacctgagagacatgcccgccaaccaccagaccttcctgagacagagaaccttcagcgtgcccgtgaagcaggaggtgaagagaagcgtgaacaaggagaacatcagacacaccgaggagagactgctgagatacctgatccacctgagattccagagcagcaagagcggcaagatctacctgcacagagacgtgagactgctgttcagcagaaagagcatggaggtggacagcggcgccgcctacgagctgaagagctacaccgagagccccaccaacccccagttcagccccagatgctag

SEQ ID NO: 201919 - DNA, 3231 bp, Artificial Sequence
  derived and/or modified sequence
atcagacccagaagcgacaccctggacgagtacttcgagtacgacgccgaggagttcctggtgagcctggccctgctgatcaccgagggcagaacccccgagtgcagcgtgaagggcagaaccgagagcttccactgcccccccgcccagagctgctaccccgtgaccaccaagcacgagtgcagcgacaagctggcccagtgcagacaggccagaagaaccagaagcgaggtgaccctgctgtggaagaacaacctgcccatcatggtggagatgatgctgctgcccgactgctgctacagcgacgacggccccaccaccgagggcatcgacctgaacgaccccgccatcaagcaggacgccctgctgctggagagatggatcctggagcccgtgcccagacagaacggcgacagattcatcgaggagaagaccctgctgctggccgtgagaagcttcgtgttcttcagccagctgagcgcctggctgagcgtgagccacggcgccatccccagaaacatcctgtacagaatcagcgccgccgacgtggacctgcagtggaacttcagccagacccccatcgagcacgtgttccccgtgcccaacgtgagccacaacgtggccctgaaggtgagcgtgcagagcctgcccagacagagcaactaccccgtgctgacctgcagcatccacaccaacatcggcctgtacgagaagagaatccagcagcacaagctgaagacccaccagcaccacaaccccaacgaggccgagcagtgcggcaccaacagcagccagagactgtgcagcaagcagacctggaccatggcccccgagagcgtgctgcacgccaagagcggccccagccccgagtacaccgccgccgtgaagaacatcaagctgtaccccggcaccggcagcaagagcgaccacggcaccagccaggccaacatcctgggcttcagcggcatcggcgacatcaagagccaggagaccagcgtgagaaccctgaagagcttcagcatggtggacagcagcatcagcaacagacagagcttctggcagagcgccggcgagaccaaccccctgatcggcagcctgatccaggagagacaggagatcatcgccagaatcgcccagcacctgatccactgcgaccccagcaccagccacgtgagcggcagacccttcaacacccaggagagcagcagcctgcacagcaagctgttcagagtgagccaggagaacgagaacgtgggcaagggcaaggaggccttcagcatgaccttcggcagccccgagttcagcagccccgaggacaccaacgagggcaagatcagactgaagcccgagacccccagaagcgagacctgcatcagcaacgacttctacagccacatgcccgtgggcgagaccaaccccctgatcggcagcctgctgcaggagagacaggacgtgatcgccagaatcgcccagcacctggagcacatcgaccccaccgccagccacatccccagacagagcttcaacatgcacgacagcagcagcgtggccagcaaggtgttcagaagcagctacgaggacaagaacctgctgaagaagaacaaggacgagagcagcgtgagcatcagccacaccaagtgcagcctgctgggcgacatcagcgacggcaagaacctggtgcccaacaagtgcttcaccagcttcaagaacaacagcaaggagaagtgcagcctgaagcaccagaccagaaaccagtgccagaacaaccccagcgagatcatccagagcacctaccaggagacccagaacaagagcagcagcctgagcaccagcagcatcctgagccagcacaaggagaacaacctggacctgaccagcagattcaaggagcaggagatgagcaacggcatcgacaagcagtacagcaactgcaccaccatcgacaagcagatctgcaccaacaagtacaaggagaagatcatcaacgagaactacaaccccaagttcttcggcaacctgcagagcgacgacagcaagaagaacgacagcaagatcaaggtgaccgtgctggagatgagcgagtacctgaacaagtacgagagcatgagcagcaacaaggacagcaagagacccaagacctgcgagcagaacacccagctgaacagcatcgagaactacctgaacaaggacaacgagggcttcaagtgcaagaagagcgaccagctgaagaacgagcaggacaagcaggaggaccccaccaacgagaagagccagaactacagccagagaagaagcatcaaggactgcctgagcacctgcgagcagcccaagaacaccgaggtgctgagaaccaccctgaagcacagcaacgtgtggagaaagcacaacttccacagcctggacggcaccagcaccagagccttccacccccagaccggcctgcccctgctgagcagccccgtgccccagagaaagacccagagcggctgcttcgacctggacagcagcctgctgcacctgaagagcttcagcagcagaagccccagaccctgcctgaacatcgaggacgaccccgacatccacgagaagcccttcctgagcagcagcgccccccccatcaccagcctgagcctgctgggcaacttcgaggagagcgtgctgaactacagattcgaccccctgggcatcgtggacggcttcaccgccgaggtgggcgccagcggcgccttctgccccacccacctgaccctgcccgtggaggtgagcttctacagcgtgagcgacgacaacgcccccagcccctacatgggcgtgatcaccctggagagcctgggcaagagaggctacagagtgccccccagcggcaccatccaggtgaccctgttcaaccccaacaagaccgtggtgaagatgttcgtggtgatctacgacctgagagacatgcccgccaaccaccagaccttcctgagacagagaaccttcagcgtgcccgtgaagcaggaggtgaagagaagcgtgaacaaggagaacatcagacacaccgaggagagactgctgagatacctgatccacctgagattccagagcagcaagagcggcaagatctacctgcacagagacgtgagactgctgttcagcagaaagagcatggaggtggacagcggcgccgcctacgagctgaagagctacaccgagagccccaccaacccccagttcagccccagatgctag

SEQ ID NO: 201920 - DNA, 2877 bp, Artificial Sequence
  derived and/or modified sequence
agacccgacgccgacaccctggacgagtacttcgagtacgacgccgaggagttcctggtgagcctggccctgctgatcaccgagggcagaacccccgagtgcagcgtgaagggcagaaccgagagcttccactgcccccccgcccagagctgctaccccgtgaccaccaagcacgagtgcagcgacaagctggcccagtgcagacaggccagaagaaccagaagcgaggtgaccctgctgtggaagaacaacctgcccatcatggtggagatgatgctgctgcccgactgctgctacagcgacgacggccccaccaccgagggcatcgacctgaacgaccccgccatcaagcaggacgccctgctgctggagagatggatcctggagcccgtgcccagacagaacggcgacagattcatcgaggagaagaccctgctgctggccgtgagaagcttcgtgttcttcagccagctgagcgcctggctgagcgtgagccacggcgccatccccagaaacatcctgtacagaatcagcgccgccgacgtggacctgcagtggaacttcagccagacccccatcgagcacgtgttccccgtgcccaacgtgagccacaacgtggccctgaaggtgagcgtgcagagcctgcccagacagagcaactaccccgtgctgacctgcagcatccacaccaacatcggcctgtacgagaagagaatccagcagcacaagctgaagacccaccagcaccacaaccccaacgaggccgagcagtgcggcaccaacagcagccagagactgtgcagcaagcagacctggaccatggcccccgagagcgtgctgcacgccaagagcggccccagccccgagtacaccgccgccgtgaagaacatcaagctgtaccccggcaccggcagcaagagcgaccacggcaccagccaggccaacatcctgggcttcagcggcatcggcgacatcaagagccaggagaccagcgtgagaaccctgaagagcttcagcatggtggacagcagcatcagcaacagacagagcttctggcagagcgccggcgagaccaaccccctgatcggcagcctgatccaggagagacaggagatcatcgccagaatcgcccagcacctgatccactgcgaccccagcaccagccacgtgagcggcagacccttcaacacccaggagagcagcagcctgcacagcaagctgttcagagtgagccaggagaacgagaacgtgggcaagggcaaggaggccttcagcatgaccttcggcagccccgagttcagcagccccgaggacaccaacgagggcaagatcagactgaagcccgagacccccagaagcgagacctgcatcagcaacgacttctacagccacatgcccgtgggcgagaccaaccccctgatcggcagcctgctgcaggagagacaggacgtgatcgccagaatcgcccagcacctggagcacatcgaccccaccgccagccacatccccagacagagcttcaacatgcacgacagcagcagcgtggccagcaaggtgttcagaagcagctacgaggacaagaacctgctgaagaagaacaaggacgagagcagcgtgagcatcagccacaccaagtgcagcctgctgggcgacatcagcgacggcaagaacctggtgcccaacaagtgcttcaccagcttcaagaacaacagcaaggagaagtgcagcctgaagcaccagaccagaaaccagtgccagaacaaccccagcgagatcatccagagcacctaccaggagacccagaacaagagcagcagcctgagcaccagcagcatcctgagccagcacaaggagaacaacctggacctgaccagcagattcaaggagcaggagatgagcaacggcatcgacaagcagtacagcaactgcaccaccatcgacaagcagatctgcaccaacaagtacaaggagaagatcatcaacgagaactacaaccccaagttcttcggcaacctgcagagcgacgacagcaagaagaacgacagcaagatcaaggtgaccgtgctggagatgagcgagtacctgaacaagtacgagagcatgagcagcaacaaggacagcaagagacccaagacctgcgagcagaacacccagctgaacagcatcgagaactacctgaacaaggacaacgagggcttcaagtgcaagaagagcgaccagctgaagaacgagcaggacaagcaggaggaccccaccaacgagaagagccagaactacagccagagaagaagcatcaaggactgcctgagcacctgcgagcagcccaagaacaccgaggtgctgagaaccaccctgaagcacagcaacgtgtggagaaagcacaacttccacagcctggacggcaccagcaccagagccttccacccccagaccggcctgcccctgctgagcagccccgtgccccagagaaagacccagagcggctgcttcgacctggacagcagcctgctgcacctgaagagcttcagcagcagaagccccagaccctgcctgaacatcgaggacgaccccgacatccacgagaagcccttcctgagcagcagcgccccccccatcaccagcctgagcctgctgggcaacttcgaggagagcgtgctgaactacagattcgaccccctgggcatcgtggacggcttcaccgccgaggtgggcgccagcggcgccttctgccccacccacctgaccctgcccgtggaggtgagcttctacagcgtgagcgacgacaacgcccccagcccctacatgggcgtgatcaccctggagagcctgggcaagagaggctacagagtgccccccagcggcaccatccaggtgtag

SEQ ID NO: 201921 - DNA, 3231 bp, Artificial Sequence
  derived and/or modified sequence
atgaaacctgatcgggacacactcgacgagtacttcgagtatgatgcagaagagttcctggtcagcctggcgctgttaatcacagaaggtcgcacccctgagtgttctgtgaagggtcggaccgagagctttcactgcccgcccgctcagtcatgttaccctgtgacgactaagcacgagtgctccgacaaactggcgcaatgccggcaagccagacgcacaagatctgaggttacactgttatggaagaataacctccccattatggtggagatgatgcttctgcccgactgttgttactccgatgacggccccacaacagagggaattgatctgaatgatcctgctattaagcaggacgctctgttattagagcggtggattctggagcctgtgccccgtcagaacggagacagattcatcgaggagaaaactctcttgcttgcagtgcgctcatttgtcttcttctcccaactgagcgcctggttgtccgtttctcacggggctatccccaggaacattctttatagaatctcagcggctgacgtggatctacagtggaacttttcgcagacaccaatcgaacacgttttcccggtgccaaatgtgagccataatgtggccttaaaagtgagtgtacagtctctgccacgccaaagcaattaccccgttcttacctgttcaattcataccaatatcgggctttatgagaaacgcatccaacagcacaagctgaagacacaccagcaccacaatccaaacgaggcagagcagtgcggaacaaatagcagtcaaagactctgctctaaacagacctggaccatggctcctgagagtgtcctgcacgccaagtcaggacccagcccagagtatactgcggccgtcaaaaatatcaagctgtacccaggcacaggcagcaagagcgaccacgggacctcacaggctaacatactaggcttctcaggaatcggcgatattaagtctcaggagacgtccgtgcggacactgaagagtttctctatggtggattcatccatctctaacagacagtccttttggcaaagtgcaggcgaaactaatcctctgatcggaagtctcatccaggaacgccaggagattatcgccagaattgctcagcatctaatccactgcgacccttcgacctcccatgtgtcaggcagacctttcaacacacaggaatcctcctccctgcactccaaactcttccgggtctctcaagagaatgaaaatgtagggaaaggaaaggaggctttctcaatgacattcggttcccctgaatttagctccccagaagacaccaatgagggaaagattaggctcaagccggagactccgaggagcgagacgtgtatttcaaatgatttctactcccacatgcccgttggagaaacgaacccccttattggatccttgttgcaggagaggcaggatgtgatcgcacggattgctcagcaccttgaacacattgatccaaccgcttcgcacattcctagacagagttttaacatgcatgactcctcttccgtggcaagtaaagtctttaggtcctcctacgaggataaaaatcttttgaaaaagaacaaggatgagtcctctgtgtcaatttcgcataccaaatgctcactcctaggagacatcagcgatggaaaaaatctggtccccaacaagtgtttcactagctttaagaataactcgaaagagaagtgtagtttgaaacaccagactagaaaccagtgccaaaataacccctctgagattatccagagcacgtatcaggagacccagaacaagtcttcttctctgagtacaagctctatcctctcgcagcacaaggagaacaatctggatctgacaagtaggtttaaggagcaagagatgtccaacggcattgataaacagtattccaattgcacaacaatcgacaagcagatttgtactaataagtacaaggagaaaataatcaacgaaaactataatccaaagttctttgggaacctccagtccgatgattccaagaaaaacgacagcaagattaaggtgacagtccttgagatgtctgaatatctaaacaagtacgaaagcatgtcttcgaataaagattccaaacgaccaaagacgtgtgagcagaatactcagttaaactctattgaaaactatcttaataaggacaatgagggctttaaatgcaaaaagtctgaccaattgaagaacgaacaagataagcaggaagatccaacaaatgaaaagtcccagaattacagtcagagacgcagcattaaagactgtctgtccacatgcgaacagccgaaaaacactgaagtattgcgtaccacactgaagcatagtaatgtgtggcgtaaacataatttccactccctggatggaacctccacaagggccttccatccacaaacaggtctcccgctcctgtcaagccctgtgccacagcgtaagactcagagtggatgctttgatctggacagcagcctcctgcacctgaagtccttttcctcccgctccccacggccctgcctcaatattgaggatgatcctgatatccatgagaaaccattcttaagcagtagtgctccaccgataacctccctgtcattactggggaacttcgaggagtcagtgctgaactacagatttgaccccttgggcatagtggatggattcacggctgaggtcggcgccagcggagctttttgtcccacccaccttacgctccctgttgaggtaagtttttactcagtgagtgatgacaatgccccttcgccttatatgggggtcattacgctagagagtttgggtaagagaggatatcgggtacctccttcaggtaccatccaggtgacattgtttaatcccaataaaaccgttgtgaagatgttcgtcgtcatctacgacctgagggatatgccagcaaatcatcagacctttctgcggcaacggacgtttagcgttcctgtcaagcaggaggtgaagcgcagtgtgaataaggagaacattcgccacacagaagagagattacttagataccttatccacctgaggtttcaaagctcgaagagcggcaagatttaccttcatcgagatgtgcgactcctgtttagtaggaaaagcatggaggttgacagcggggctgcctacgagctgaaatcctacacggagtccccaactaatccccagttttcaccccgttgctag

SEQ ID NO: 201922 - DNA, 3231 bp, Artificial Sequence
  derived and/or modified sequence
attaggccgcggtcagacacactggacgagtacttcgaatatgacgccgaagagttcctcgtgtcactcgcactgctgattaccgagggccgaacacctgagtgctccgttaaagggcgtactgagtccttccactgccctcctgcccagtcctgctatcccgtgactaccaagcatgaatgttcagataagctggctcagtgcaggcaggctaggaggacccgctcagaggtgacgttactctggaagaataaccttcctattatggtggagatgatgctgctccctgattgctgctacagcgatgatggtccaacaactgaggggattgatctgaacgatcctgctatcaaacaggacgccctcctgctagagaggtggatactagagcccgtgccaagacagaacggagatcggttcatcgaagagaagacattgctgcttgccgtcagatcttttgtgttcttttctcagctcagcgcctggctgtctgtctctcacggtgcgatccccagaaacatcctttatagaatctccgcagccgacgtggacctacagtggaattttagccagacccccatagagcacgtgtttcccgttccaaatgtctctcataatgtcgcactgaaggtgtctgtgcagtcactgccacgtcaatctaattatcctgttctcacttgttcgattcataccaacataggcctgtatgagaaacggattcagcagcacaaacttaaaacgcatcagcaccacaaccccaacgaggctgagcagtgtggaacaaattctagccagcgattgtgctccaagcaaacctggacaatggctcctgagtctgtccttcatgccaaaagcggtccctcaccagagtatacagctgccgtgaagaacatcaagctgtatccagggaccggaagtaaaagcgatcacggaacctcacaggctaatatcctcggattttctggtatcggagacattaaatctcaagaaacatctgtgaggaccctgaagagttttagcatggtggatagcagcataagtaacaggcaaagcttttggcagagcgctggtgaaaccaatcccctcatcggctcactcattcaggaacgccaggagatcatcgctaggatcgcccagcacctaatccactgcgacccctccactagccacgtaagcggcagacccttcaacactcaggagtcttctagtctgcacagcaaattatttagagtgagccaagagaacgaaaatgtcggaaagggaaaggaagccttctccatgacttttggaagccccgagttctcaagtcccgaggacactaatgagggcaaaattcggctgaaacctgaaactcccagaagcgaaacctgcataagcaacgacttctatagccatatgcctgtcggcgaaacaaaccccctcatcggcagcctcctgcaggagagacaggacgtaattgcacgcatagctcagcacctggagcacattgaccccacagcgtctcatataccaagacagtcctttaatatgcatgattcaagcagcgtcgccagtaaagtgttccgatcctcctacgaagataagaacctgctcaagaaaaacaaagacgaaagtagcgtaagcatttcacatacgaagtgctccctactcggagatatatcagatggcaaaaacttggtgccaaataagtgttttacctctttcaagaacaatagcaaggagaagtgttcactcaaacaccaaactcgaaaccagtgtcaaaacaacccttccgaaatcatccaaagcacttaccaggagacccagaataagagctcctcactttcaacttcttccatactcagccagcataaggaaaataacctggacttgacatctaggtttaaggaacaggagatgtccaatgggatcgacaaacagtactcgaattgcactacaatcgacaaacagatctgcacaaataagtataaagaaaaaattataaacgaaaattataacccgaagttctttggcaacctgcagagcgacgactccaagaaaaatgactctaagatcaaggttacagtccttgagatgtctgagtatctgaataagtacgaaagcatgtcctccaataaggactctaagcggcccaaaacctgtgagcagaacacacagctaaatagcatcgagaactatctgaacaaggacaacgaaggcttcaagtgtaagaaatccgatcagctcaaaaatgagcaggacaagcaggaagatcccacaaatgaaaaaagccaaaattactcccagcgacgatcaattaaggactgtttgtctacttgtgaacagcccaaaaatacagaggtccttcgtacaacactcaagcattccaacgtctggaggaagcacaattttcatagtctggacggaacgtcaactcgagctttccaccctcagaccggtttaccattgctctcaagccccgtcccccagcggaaaacgcaatcagggtgctttgatctagacagcagcctcctccacttgaaatcattcagttcccgatcaccacgaccatgcctgaacatcgaggatgatccagacatccatgagaaacccttcctgtcttcctctgccccacccattaccagtctgtcattgctagggaatttcgaggagagtgtgctgaactatcggtttgatccattggggatcgtggatggcttcaccgcagaggtgggcgctagcggggccttctgccccacacacctcaccttgccagttgaagtgtctttctatagcgtttccgacgacaatgctccatcaccctatatgggagtgatcaccctggaatcactgggcaaacggggatacagagttccgccttcaggtacgatccaggtgaccctttttaatccaaataaaactgtggtcaaaatgttcgtggtcatctacgacctacgagatatgccagcaaaccaccagaccttcctgcgccagaggacattttccgttcctgtaaagcaggaggtcaagcgctccgtgaataaagagaacatccggcacactgaggagcgcctcctccgctatttaattcatttacgattccagtcctctaaatctgggaagatctatctgcatcgtgatgttaggctgctgttcagcagaaagagcatggaggtagactctggtgccgcctatgagcttaaatcatacactgaatcccctactaacccgcagttttccccgcgatgttag

SEQ ID NO: 201923 - DNA, 2877 bp, Artificial Sequence
  derived and/or modified sequence
cggccagacgccgataccctggatgagtatttcgagtatgatgctgaggaattcctggtctcccttgcccttctgattaccgaaggtcgtactcccgaatgcagcgttaaagggagaactgagagttttcactgcccccccgcccaaagctgttatcctgttacaacaaagcacgaatgcagcgacaaacttgcccaatgcagacaggctagacggacccgctcagaagtgactttattgtggaaaaataatctccctattatggtcgagatgatgctgttgcccgattgctgttacagtgacgatggccccacaacggaggggatcgatcttaatgatcctgcaataaagcaggacgctctactcctggaaagatggattctggaaccggtcccgaggcagaacggagatcggtttatcgaagagaaaacattactgctcgctgtccgatctttcgtcttcttctctcagctgagcgcttggttatcagtgtctcacggagccatcccacgaaatattctgtatcgaatctccgccgccgacgttgatttgcaatggaactttagtcagacacctatcgagcatgtttttccagttcctaacgtcagccacaatgtggcattaaaggtcagcgttcagagccttccaaggcagtccaactacccggtgctcacgtgtagtattcacacaaatatcgggttgtacgaaaagagaatacagcagcacaaattgaagacacaccagcatcataatcccaatgaggccgaacagtgcgggactaatagttcacagagactgtgctccaaacaaacttggaccatggcaccagagagcgtcctccatgctaagtccggaccttccccggagtatacagctgctgtcaagaacattaagctgtacccagggaccgggtcaaagtctgatcacggtacgagccaagccaatattcttggcttctccggcatcggggacatcaagtctcaggagaccagcgtccggactttaaaatcttttagcatggtggactcatcgattagcaaccgccaaagcttctggcagtccgccggggaaacaaaccccctgatcgggtctctaatccaggaaagacaggagattattgccaggatcgcccaacatctaatccattgcgatccaagtaccagccacgtttcaggtagacctttcaacacccaggaaagctcaagcctgcacagcaagctttttcgcgttagccaggaaaacgagaacgtagggaaaggcaaggaggcgttctctatgacctttggaagtccagagttttcatccccagaagacacaaatgagggaaagattagattaaaacccgagacaccccgctcggaaacttgtatctccaacgacttctattcccatatgccagtaggcgagacaaaccctttgatcggttccttgctccaggaacggcaggacgtgatcgccaggatcgctcaacacctagaacacattgatccaacagccagtcacattccccgccagtccttcaacatgcacgattcgtcaagcgtggcttccaaggtgttccggtctagttacgaggataaaaacttactgaagaagaataaggatgaatcctcagtgtccatctcccacacaaagtgtagcctgctcggggacatctccgatggcaagaatctagtgcctaataaatgtttcaccagcttcaagaacaactctaaggagaagtgcagcctgaagcatcagactcgaaaccaatgccagaataaccccagtgagataatccaatccacctatcaggagactcaaaacaaaagctcttcactaagcacgtcatctatcctttcacagcacaaagaaaacaaccttgatctgacctcaagattcaaggagcaggagatgagcaacggcatcgataagcagtactccaactgtacgactatagacaaacagatttgcacgaacaagtacaaagagaaaataataaacgagaactataacccaaagttcttcggcaacctgcaatcggatgattcaaaaaagaacgatagtaagatcaaagtaaccgtcctggaaatgtcagaataccttaacaaatacgaaagcatgagctctaataaagactcaaagagaccaaaaacttgcgaacagaatacgcagctgaactcaatcgaaaattatctgaataaagacaacgagggctttaaatgtaagaagtccgaccagctgaaaaatgagcaggacaagcaggaagatcccaccaacgaaaaaagtcagaactactctcagagaagaagcatcaaggattgcctatccacctgcgaacagccaaagaatactgaagtgttgaggaccacattgaaacacagcaacgtctggaggaagcataattttcatagcctggacgggacgagcactagggcctttcatccccagaccggcctacctctgttgtcctcaccggtgccacaaaggaagacccagtccgggtgcttcgacttagatagctctctcctacacctgaagtccttcagcagtcgcagcccacgcccttgcctgaacatagaggatgatcccgacatccatgagaagccctttctctcaagctcagcacctcctattacgagcctgtctctgctcggtaatttcgaggagagtgtattgaactatcgcttcgacccccttggcattgtggacggcttcactgccgaggtgggggcttctggagccttttgcccaacccacctgactctgcctgtggaggtgagtttctattctgtctccgacgacaacgcgcccagtccttacatgggagttatcaccctggaaagtctgggaaagagaggctatagggtaccacctagtggtaccattcaggtgtag

SEQ ID NO: 201924 - DNA, 4205 bp, Artificial Sequence
  derived and/or modified sequence
taaacttggccgcggttgccgcaggaaggctagccagagggtaattacacagcattttgaaagcgaagcagaagccgtagaatcagcggcgagcctgttgaaagaacccacaggtgcatttcacagcactctgggcgaaaattggatgtgaaaatgaagccagaccgagatactctggatgaatattttgaatatgatgcagaggagttcttggtctctttggccttgctgataacagaaggacgaacacctgaatgttctgtaaaaggtcgaacagaaagctttcattgccctccagcacagtcttgttacccagtaactaccaaacatgaatgtagtgacaagctggcccagtgccgccaagccagacgaactaggtctgaggtcacattgttgtggaagaataaccttccaatcatggtggaaatgatgctactaccagactgctgctacagcgatgatgggcccaccacagagggaattgatctaaatgatcctgcgattaagcaagatgcattattattagaaagatggatcttggagccagttcctcgacagaatggtgaccgatttattgaagagaagacgcttctgttggctgtccgctcatttgtgtttttttctcagttaagtgcatggctgagtgtttctcatggtgctattccacgaaatattctctacagaatcagtgctgctgatgtagacctacagtggaatttttcacagactccaattgagcatgtgtttcctgttcccaatgtttctcacaatgttgccttgaaagtcagtgttcagtccttgcccagacaatctaattatccagttttgacgtgcagtattcacactaatattggcctttatgagaaaagaattcaacaacataaacttaaaactcatcagcaccataacccaaatgaagcagaacaatgtggtacaaacagttcacagcgtctgtgtagcaaacaaacttggaccatggcacctgaaagtgtgttacatgcaaaaagtggcccaagtccagaatatactgcagctgtcaaaaatatcaaactatatccaggcactggcagtaaatctgaccatgggacatctcaagccaatattctaggctttagtggtataggtgatataaaatcacaagaaacatcagtgagaactttaaaatcattttcaatggttgattccagtatctctaaccgccagagtttctggcagtcagctggtgagactaaccctttaataggctctttaattcaggagcggcaagaaatcattgcaagaattgcccaacatttgattcattgtgatccaagcacttcacatgtttctggacgtccatttaatactcaagagtctagttcactccattcaaaacttttccgggtttcacaagaaaatgagaacgtgggaaaaggtaaagaagctttctccatgacttttggtagtccagagtttagttccccagaagacaccaatgaggggaaaattcgactaaaaccagaaactcctcgaagtgaaacttgtatttctaatgacttttattctcatatgcctgttggagagactaatcctttgataggctctttactccaggagcggcaagatgttattgcaaggattgctcaacacttggagcacattgatccaacagcatcacatatcccccggcagtcattcaacatgcatgactccagttcggttgcatctaaagtgtttaggagttcatatgaagacaaaaatttgttgaagaaaaataaggatgagtcctcagtttccatttctcacacaaaatgttccttgttaggagacatcagtgatgggaaaaacttagtacctaataaatgttttacttcttttaaaaataatagtaaagaaaagtgttctttgaaacatcaaacaagaaatcagtgtcagaacaatcctagtgaaatcatccaaagtacgtatcaggagacacagaacaaaagttctagtttatcaacttcctcaattttgtctcagcacaaagaaaataacttagatttgacaagcagattcaaggagcaagaaatgagcaatggaattgataaacagtattcaaattgcaccactattgacaaacagatttgtacaaataagtataaggaaaaaataataaatgagaactataatccaaaattctttggcaatcttcagtctgatgattccaaaaaaaatgactcaaaaataaaagttactgtgttggaaatgtctgaatatttgaacaaatatgaaagcatgtcctcaaataaagactcaaaaaggcctaagacatgtgagcaaaatactcaacttaatagcatagagaattatctcaataaagataatgaaggtttcaaatgtaaaaagtcagaccaattaaaaaatgaacaagataagcaagaagatccaactaatgaaaaatcccaaaactattctcagagaagaagtataaaagactgtttgtctacatgtgagcaaccaaaaaatacagaggtattgaggactacactgaaacattcaaatgtgtggcgaaaacataattttcattccttggatggaacttcaaccagagcctttcatcctcaaactggattgcctcttctttcaagccctgttcctcaaagaaaaacacaatcaggttgctttgatctggattcttcattactacatctgaaaagcttctcatctagaagtcctcgaccatgtttaaacattgaagatgatccagatattcatgaaaaaccatttttgagttctagtgctccacctataacaagtcttagtctcctaggaaattttgaggaatctgtcttgaactatcgtttcgatcctctcggcattgttgatggttttactgccgaggtaggggcaagtggtgctttctgccccacacatttgactcttccagttgaagtgtcattctacagtgtttcagatgacaatgctccctctccttatatgggtgtgattactttagagtcccttggtaaaaggggttatcgagtacctccttcaggaacaatacaagtgaccttatttaatcctaataagactgtggtgaagatgtttgttgtgatatatgatttacgagatatgccagccaatcatcagacattcctacgacaaagaactttttctgtacctgttaaacaagaagtgaagagaagtgttaataaagagaacatccgacacacagaagaacggttattacgctacctcatacatctgaggttccagagttctaaatctggaaagatctacctccatagagacgtacggctcctgttctctagaaagtcaatggaggttgatagcggtgctgcatatgaactcaaatcttacactgaatcaccaacaaaccctcagttttcaccaagatgttgataaggagtgatgatttaaagtatttactcagtacccaagtttgcaagtaaaaattagcatagaatggagtgtaccaaattaacaatcaggagagtggattctctcctgttatcctggaccagtttttatgaaaggattcctgaaatgaaatccatatattccatgtagactggaaaaactcatgtcctaatcctttttgtactgttgaaaccacttcattggacatgttgcaatagcaaaacccccagttagattagtgtttacacattttctcagttatttaatatttaatgttttccttaatactcaagtgatgtttgtctctagtgttctaatgtagcacaaatcctatgtaaaatcatactatgtatttttgacattaatgttgaaatcaaatatatgcacaagtctttaattttgtgtaatgtgttaagtgctgttcatttaagttattgaaaatgagaataaaatgttgagcttctttaaaagtaacacactatgcaagcatgtgtactttttatatctctcatgtttagtttttataacaccatatccaggttgctatctcacatagtagtcctttaacatattgtattagcagtgcaatgtggactaagctgcttcactttccctttgcaagttcagatcatcatgcccattcatagccaggattccttatccccaaaacagttctatttttccttaatcactactatagagtctttacattaaattactgtcgtatgctagataattttctcaaattgttaaaagaatatgtactttggaaacaaattagtatttatattgtaaatatattc

SEQ ID NO: 201925 - DNA, 4052 bp, Artificial Sequence
  derived and/or modified sequence
atcaggcccagatcagatactctggatgaatattttgaatatgatgcagaggagttcttggtctctttggccttgctgataacagaaggacgaacacctgaatgttctgtaaaaggtcgaacagaaagctttcattgccctccagcacagtcttgttacccagtaactaccaaacatgaatgtagtgacaagctggcccagtgccgccaagccagacgaactaggtctgaggtcacattgttgtggaagaataaccttccaatcatggtggaaatgatgctactaccagactgctgctacagcgatgatgggcccaccacagagggaattgatctaaatgatcctgcgattaagcaagatgcattattattagaaagatggatcttggagccagttcctcgacagaatggtgaccgatttattgaagagaagacgcttctgttggctgtccgctcatttgtgtttttttctcagttaagtgcatggctgagtgtttctcatggtgctattccacgaaatattctctacagaatcagtgctgctgatgtagacctacagtggaatttttcacagactccaattgagcatgtgtttcctgttcccaatgtttctcacaatgttgccttgaaagtcagtgttcagtccttgcccagacaatctaattatccagttttgacgtgcagtattcacactaatattggcctttatgagaaaagaattcaacaacataaacttaaaactcatcagcaccataacccaaatgaagcagaacaatgtggtacaaacagttcacagcgtctgtgtagcaaacaaacttggaccatggcacctgaaagtgtgttacatgcaaaaagtggcccaagtccagaatatactgcagctgtcaaaaatatcaaactatatccaggcactggcagtaaatctgaccatgggacatctcaagccaatattctaggctttagtggtataggtgatataaaatcacaagaaacatcagtgagaactttaaaatcattttcaatggttgattccagtatctctaaccgccagagtttctggcagtcagctggtgagactaaccctttaataggctctttaattcaggagcggcaagaaatcattgcaagaattgcccaacatttgattcattgtgatccaagcacttcacatgtttctggacgtccatttaatactcaagagtctagttcactccattcaaaacttttccgggtttcacaagaaaatgagaacgtgggaaaaggtaaagaagctttctccatgacttttggtagtccagagtttagttccccagaagacaccaatgaggggaaaattcgactaaaaccagaaactcctcgaagtgaaacttgtatttctaatgacttttattctcatatgcctgttggagagactaatcctttgataggctctttactccaggagcggcaagatgttattgcaaggattgctcaacacttggagcacattgatccaacagcatcacatatcccccggcagtcattcaacatgcatgactccagttcggttgcatctaaagtgtttaggagttcatatgaagacaaaaatttgttgaagaaaaataaggatgagtcctcagtttccatttctcacacaaaatgttccttgttaggagacatcagtgatgggaaaaacttagtacctaataaatgttttacttcttttaaaaataatagtaaagaaaagtgttctttgaaacatcaaacaagaaatcagtgtcagaacaatcctagtgaaatcatccaaagtacgtatcaggagacacagaacaaaagttctagtttatcaacttcctcaattttgtctcagcacaaagaaaataacttagatttgacaagcagattcaaggagcaagaaatgagcaatggaattgataaacagtattcaaattgcaccactattgacaaacagatttgtacaaataagtataaggaaaaaataataaatgagaactataatccaaaattctttggcaatcttcagtctgatgattccaaaaaaaatgactcaaaaataaaagttactgtgttggaaatgtctgaatatttgaacaaatatgaaagcatgtcctcaaataaagactcaaaaaggcctaagacatgtgagcaaaatactcaacttaatagcatagagaattatctcaataaagataatgaaggtttcaaatgtaaaaagtcagaccaattaaaaaatgaacaagataagcaagaagatccaactaatgaaaaatcccaaaactattctcagagaagaagtataaaagactgtttgtctacatgtgagcaaccaaaaaatacagaggtattgaggactacactgaaacattcaaatgtgtggcgaaaacataattttcattccttggatggaacttcaaccagagcctttcatcctcaaactggattgcctcttctttcaagccctgttcctcaaagaaaaacacaatcaggttgctttgatctggattcttcattactacatctgaaaagcttctcatctagaagtcctcgaccatgtttaaacattgaagatgatccagatattcatgaaaaaccatttttgagttctagtgctccacctataacaagtcttagtctcctaggaaattttgaggaatctgtcttgaactatcgtttcgatcctctcggcattgttgatggttttactgccgaggtaggggcaagtggtgctttctgccccacacatttgactcttccagttgaagtgtcattctacagtgtttcagatgacaatgctccctctccttatatgggtgtgattactttagagtcccttggtaaaaggggttatcgagtacctccttcaggaacaatacaagtgaccttatttaatcctaataagactgtggtgaagatgtttgttgtgatatatgatttacgagatatgccagccaatcatcagacattcctacgacaaagaactttttctgtacctgttaaacaagaagtgaagagaagtgttaataaagagaacatccgacacacagaagaacggttattacgctacctcatacatctgaggttccagagttctaaatctggaaagatctacctccatagagacgtacggctcctgttctctagaaagtcaatggaggttgatagcggtgctgcatatgaactcaaatcttacactgaatcaccaacaaaccctcagttttcaccaagatgttgataaggagtgatgatttaaagtatttactcagtacccaagtttgcaagtaaaaattagcatagaatggagtgtaccaaattaacaatcaggagagtggattctctcctgttatcctggaccagtttttatgaaaggattcctgaaatgaaatccatatattccatgtagactggaaaaactcatgtcctaatcctttttgtactgttgaaaccacttcattggacatgttgcaatagcaaaacccccagttagattagtgtttacacattttctcagttatttaatatttaatgttttccttaatactcaagtgatgtttgtctctagtgttctaatgtagcacaaatcctatgtaaaatcatactatgtatttttgacattaatgttgaaatcaaatatatgcacaagtctttaattttgtgtaatgtgttaagtgctgttcatttaagttattgaaaatgagaataaaatgttgagcttctttaaaagtaacacactatgcaagcatgtgtactttttatatctctcatgtttagtttttataacaccatatccaggttgctatctcacatagtagtcctttaacatattgtattagcagtgcaatgtggactaagctgcttcactttccctttgcaagttcagatcatcatgcccattcatagccaggattccttatccccaaaacagttctatttttccttaatcactactatagagtctttacattaaattactgtcgtatgctagataattttctcaaattgttaaaagaatatgtactttggaaacaaattagtatttatattgtaaatatattc

SEQ ID NO: 201926 - DNA, 4049 bp, Artificial Sequence
  derived and/or modified sequence
agaccagatgcagatactctggatgaatattttgaatatgatgcagaggagttcttggtctctttggccttgctgataacagaaggacgaacacctgaatgttctgtaaaaggtcgaacagaaagctttcattgccctccagcacagtcttgttacccagtaactaccaaacatgaatgtagtgacaagctggcccagtgccgccaagccagacgaactaggtctgaggtcacattgttgtggaagaataaccttccaatcatggtggaaatgatgctactaccagactgctgctacagcgatgatgggcccaccacagagggaattgatctaaatgatcctgcgattaagcaagatgcattattattagaaagatggatcttggagccagttcctcgacagaatggtgaccgatttattgaagagaagacgcttctgttggctgtccgctcatttgtgtttttttctcagttaagtgcatggctgagtgtttctcatggtgctattccacgaaatattctctacagaatcagtgctgctgatgtagacctacagtggaatttttcacagactccaattgagcatgtgtttcctgttcccaatgtttctcacaatgttgccttgaaagtcagtgttcagtccttgcccagacaatctaattatccagttttgacgtgcagtattcacactaatattggcctttatgagaaaagaattcaacaacataaacttaaaactcatcagcaccataacccaaatgaagcagaacaatgtggtacaaacagttcacagcgtctgtgtagcaaacaaacttggaccatggcacctgaaagtgtgttacatgcaaaaagtggcccaagtccagaatatactgcagctgtcaaaaatatcaaactatatccaggcactggcagtaaatctgaccatgggacatctcaagccaatattctaggctttagtggtataggtgatataaaatcacaagaaacatcagtgagaactttaaaatcattttcaatggttgattccagtatctctaaccgccagagtttctggcagtcagctggtgagactaaccctttaataggctctttaattcaggagcggcaagaaatcattgcaagaattgcccaacatttgattcattgtgatccaagcacttcacatgtttctggacgtccatttaatactcaagagtctagttcactccattcaaaacttttccgggtttcacaagaaaatgagaacgtgggaaaaggtaaagaagctttctccatgacttttggtagtccagagtttagttccccagaagacaccaatgaggggaaaattcgactaaaaccagaaactcctcgaagtgaaacttgtatttctaatgacttttattctcatatgcctgttggagagactaatcctttgataggctctttactccaggagcggcaagatgttattgcaaggattgctcaacacttggagcacattgatccaacagcatcacatatcccccggcagtcattcaacatgcatgactccagttcggttgcatctaaagtgtttaggagttcatatgaagacaaaaatttgttgaagaaaaataaggatgagtcctcagtttccatttctcacacaaaatgttccttgttaggagacatcagtgatgggaaaaacttagtacctaataaatgttttacttcttttaaaaataatagtaaagaaaagtgttctttgaaacatcaaacaagaaatcagtgtcagaacaatcctagtgaaatcatccaaagtacgtatcaggagacacagaacaaaagttctagtttatcaacttcctcaattttgtctcagcacaaagaaaataacttagatttgacaagcagattcaaggagcaagaaatgagcaatggaattgataaacagtattcaaattgcaccactattgacaaacagatttgtacaaataagtataaggaaaaaataataaatgagaactataatccaaaattctttggcaatcttcagtctgatgattccaaaaaaaatgactcaaaaataaaagttactgtgttggaaatgtctgaatatttgaacaaatatgaaagcatgtcctcaaataaagactcaaaaaggcctaagacatgtgagcaaaatactcaacttaatagcatagagaattatctcaataaagataatgaaggtttcaaatgtaaaaagtcagaccaattaaaaaatgaacaagataagcaagaagatccaactaatgaaaaatcccaaaactattctcagagaagaagtataaaagactgtttgtctacatgtgagcaaccaaaaaatacagaggtattgaggactacactgaaacattcaaatgtgtggcgaaaacataattttcattccttggatggaacttcaaccagagcctttcatcctcaaactggattgcctcttctttcaagccctgttcctcaaagaaaaacacaatcaggttgctttgatctggattcttcattactacatctgaaaagcttctcatctagaagtcctcgaccatgtttaaacattgaagatgatccagatattcatgaaaaaccatttttgagttctagtgctccacctataacaagtcttagtctcctaggaaattttgaggaatctgtcttgaactatcgtttcgatcctctcggcattgttgatggttttactgccgaggtaggggcaagtggtgctttctgccccacacatttgactcttccagttgaagtgtcattctacagtgtttcagatgacaatgctccctctccttatatgggtgtgattactttagagtcccttggtaaaaggggttatcgagtacctccttcaggaacaatacaagtgaccttatttaatcctaataagactgtggtgaagatgtttgttgtgatatatgatttacgagatatgccagccaatcatcagacattcctacgacaaagaactttttctgtacctgttaaacaagaagtgaagagaagtgttaataaagagaacatccgacacacagaagaacggttattacgctacctcatacatctgaggttccagagttctaaatctggaaagatctacctccatagagacgtacggctcctgttctctagaaagtcaatggaggttgatagcggtgctgcatatgaactcaaatcttacactgaatcaccaacaaaccctcagttttcaccaagatgttgataaggagtgatgatttaaagtatttactcagtacccaagtttgcaagtaaaaattagcatagaatggagtgtaccaaattaacaatcaggagagtggattctctcctgttatcctggaccagtttttatgaaaggattcctgaaatgaaatccatatattccatgtagactggaaaaactcatgtcctaatcctttttgtactgttgaaaccacttcattggacatgttgcaatagcaaaacccccagttagattagtgtttacacattttctcagttatttaatatttaatgttttccttaatactcaagtgatgtttgtctctagtgttctaatgtagcacaaatcctatgtaaaatcatactatgtatttttgacattaatgttgaaatcaaatatatgcacaagtctttaattttgtgtaatgtgttaagtgctgttcatttaagttattgaaaatgagaataaaatgttgagcttctttaaaagtaacacactatgcaagcatgtgtactttttatatctctcatgtttagtttttataacaccatatccaggttgctatctcacatagtagtcctttaacatattgtattagcagtgcaatgtggactaagctgcttcactttccctttgcaagttcagatcatcatgcccattcatagccaggattccttatccccaaaacagttctatttttccttaatcactactatagagtctttacattaaattactgtcgtatgctagataattttctcaaattgttaaaagaatatgtactttggaaacaaattagtatttatattgtaaatatattc

SEQ ID NO: 201927 - DNA, 3231 bp, Artificial Sequence
  derived and/or modified sequence
atgaagccagaccgggacaccctggatgagtactttgaatatgatgctgaggagttcctggtgtccctggccctgctgatcacagagggccgcaccccagagtgcagcgtgaagggccgcacagagagcttccactgccccccagcccagagctgctaccctgtgaccaccaagcatgagtgcagcgacaagctggcccagtgccggcaggcccggaggaccaggtctgaggtgaccctgctgtggaagaacaacctgcccatcatggtggagatgatgctgctgcctgactgctgctacagtgatgatggccccaccacagagggcatcgacctgaatgaccctgccatcaagcaggatgccctgctgctggagcgctggatcctggagcctgtgccccggcagaatggagaccgcttcatcgaggagaagaccctgctgctggccgtgcgcagctttgtgttcttcagccagctgagcgcctggctgtctgtgtcccatggagccatccccaggaacatcctgtaccgcatctctgctgctgatgtggacctgcagtggaacttcagccagacccccatcgagcacgtgtttcctgtgcccaacgtgagccacaacgtggccctgaaggtgtctgtgcagagcctgccccggcagagcaactaccctgtgctgacctgcagcatccacaccaacatcggcctgtatgagaagaggatccagcagcacaagctgaagacccaccagcaccacaaccccaatgaggccgagcagtgtggcaccaacagcagccagaggctgtgcagcaagcagacctggaccatggcccctgagagcgtgctgcacgccaagagcggccccagccctgagtacacagctgctgtgaagaacatcaagctgtacccaggcaccggcagcaagagtgaccacggcaccagccaggccaacatcctgggcttctctggaattggagacatcaagagccaggagacctctgtgaggaccctgaagagcttctccatggtggacagcagcatcagcaaccggcagagcttctggcagagcgctggggagaccaaccccctgattggcagcctcatccaggagcggcaggagatcatcgccagaattgcccagcacctgatccactgtgaccccagcaccagccacgtgtctggccggcccttcaacacccaggagagcagcagcctgcacagcaagctgttccgggtgtcccaggagaatgaaaatgtgggcaagggcaaggaggccttctccatgaccttcggcagccctgagttcagcagccctgaggacaccaatgaaggcaagatccggctgaagccagagacccccaggtctgagacctgcatcagcaatgacttctacagccacatgcctgtgggggagaccaaccccctgattggcagcctgctgcaggagcggcaggacgtcatcgccagaattgcccagcacctggagcacatcgaccccacagccagccacatcccccggcagagcttcaacatgcatgacagcagctctgtggccagcaaggtgttccgcagcagctatgaggacaagaacctgctgaagaagaacaaggatgagagctctgtgtccatcagccacaccaagtgcagcctgctgggggacatcagtgatggcaagaacctggtgcccaacaagtgcttcaccagcttcaagaacaacagcaaggagaagtgcagcctgaagcaccagaccaggaaccagtgccagaacaaccccagcgagatcatccagagcacctaccaggagacccagaacaagagcagcagcctgagcaccagcagcatcctgagccagcacaaggagaacaacctggacctgaccagccgcttcaaggagcaggagatgagcaatggaattgacaagcagtacagcaactgcaccaccatcgacaagcagatctgcaccaacaagtacaaggagaagatcatcaatgaaaactacaaccccaagttcttcggcaacctgcagagtgatgacagcaagaagaatgacagcaagatcaaggtgacagtgctggagatgtctgagtacctgaacaagtatgaatccatgagcagcaacaaggacagcaagaggcccaagacctgtgagcagaacacccagctgaacagcattgagaactacctgaacaaggacaatgaaggcttcaagtgcaagaagagtgaccagctgaagaatgagcaggacaagcaggaggaccccaccaatgagaagagccagaactacagccagaggaggagcatcaaggactgcctgagcacctgtgagcagcccaagaacacagaggtgctgcggaccaccctgaagcacagcaatgtgtggaggaagcacaacttccacagcctggatggcaccagcacccgggccttccacccccagacaggcctgcccctgctgagcagccctgtgccccagaggaagacccagagcggctgctttgacctggacagcagcctgctgcacctgaagagcttcagcagccgcagcccccggccctgcctgaacattgaagatgatcctgacatccacgagaagcccttcctgagcagcagcgccccacccatcaccagcctgagcctgctgggcaactttgaggagagcgtgctgaactacagatttgaccccctgggcatcgtggatggcttcaccgctgaggtgggcgccagcggggccttctgccccacccacctgaccctgcctgtggaggtgtccttctacagcgtgtctgatgacaatgcccccagcccctacatgggcgtcatcaccctggagagcctgggcaagaggggctacagagtgccccccagcggcaccatccaggtgaccctcttcaaccccaacaagacagtggtgaagatgtttgtggtgatctatgacctgcgggacatgcctgccaaccaccagaccttcctgcggcagaggaccttctctgtgcctgtgaagcaggaggtgaagaggtctgtgaacaaggagaacatccgccacacagaggagcggctgctgcgctacctgatccacctgcgcttccagagcagcaagagcggcaagatctacctgcacagagatgtgcggctgctcttcagcaggaagtccatggaggtggacagcggggccgcctatgagctgaagagctacacagagagccccaccaacccccagttcagcccccgctgctag

SEQ ID NO: 201928 - DNA, 3231 bp, Artificial Sequence
  derived and/or modified sequence
atccggcccaggagtgacaccctggatgagtactttgaatatgatgctgaggagttcctggtgtccctggccctgctgatcacagagggccgcaccccagagtgcagcgtgaagggccgcacagagagcttccactgccccccagcccagagctgctaccctgtgaccaccaagcatgagtgcagcgacaagctggcccagtgccggcaggcccggaggaccaggtctgaggtgaccctgctgtggaagaacaacctgcccatcatggtggagatgatgctgctgcctgactgctgctacagtgatgatggccccaccacagagggcatcgacctgaatgaccctgccatcaagcaggatgccctgctgctggagcgctggatcctggagcctgtgccccggcagaatggagaccgcttcatcgaggagaagaccctgctgctggccgtgcgcagctttgtgttcttcagccagctgagcgcctggctgtctgtgtcccatggagccatccccaggaacatcctgtaccgcatctctgctgctgatgtggacctgcagtggaacttcagccagacccccatcgagcacgtgtttcctgtgcccaacgtgagccacaacgtggccctgaaggtgtctgtgcagagcctgccccggcagagcaactaccctgtgctgacctgcagcatccacaccaacatcggcctgtatgagaagaggatccagcagcacaagctgaagacccaccagcaccacaaccccaatgaggccgagcagtgtggcaccaacagcagccagaggctgtgcagcaagcagacctggaccatggcccctgagagcgtgctgcacgccaagagcggccccagccctgagtacacagctgctgtgaagaacatcaagctgtacccaggcaccggcagcaagagtgaccacggcaccagccaggccaacatcctgggcttctctggaattggagacatcaagagccaggagacctctgtgaggaccctgaagagcttctccatggtggacagcagcatcagcaaccggcagagcttctggcagagcgctggggagaccaaccccctgattggcagcctcatccaggagcggcaggagatcatcgccagaattgcccagcacctgatccactgtgaccccagcaccagccacgtgtctggccggcccttcaacacccaggagagcagcagcctgcacagcaagctgttccgggtgtcccaggagaatgaaaatgtgggcaagggcaaggaggccttctccatgaccttcggcagccctgagttcagcagccctgaggacaccaatgaaggcaagatccggctgaagccagagacccccaggtctgagacctgcatcagcaatgacttctacagccacatgcctgtgggggagaccaaccccctgattggcagcctgctgcaggagcggcaggacgtcatcgccagaattgcccagcacctggagcacatcgaccccacagccagccacatcccccggcagagcttcaacatgcatgacagcagctctgtggccagcaaggtgttccgcagcagctatgaggacaagaacctgctgaagaagaacaaggatgagagctctgtgtccatcagccacaccaagtgcagcctgctgggggacatcagtgatggcaagaacctggtgcccaacaagtgcttcaccagcttcaagaacaacagcaaggagaagtgcagcctgaagcaccagaccaggaaccagtgccagaacaaccccagcgagatcatccagagcacctaccaggagacccagaacaagagcagcagcctgagcaccagcagcatcctgagccagcacaaggagaacaacctggacctgaccagccgcttcaaggagcaggagatgagcaatggaattgacaagcagtacagcaactgcaccaccatcgacaagcagatctgcaccaacaagtacaaggagaagatcatcaatgaaaactacaaccccaagttcttcggcaacctgcagagtgatgacagcaagaagaatgacagcaagatcaaggtgacagtgctggagatgtctgagtacctgaacaagtatgaatccatgagcagcaacaaggacagcaagaggcccaagacctgtgagcagaacacccagctgaacagcattgagaactacctgaacaaggacaatgaaggcttcaagtgcaagaagagtgaccagctgaagaatgagcaggacaagcaggaggaccccaccaatgagaagagccagaactacagccagaggaggagcatcaaggactgcctgagcacctgtgagcagcccaagaacacagaggtgctgcggaccaccctgaagcacagcaatgtgtggaggaagcacaacttccacagcctggatggcaccagcacccgggccttccacccccagacaggcctgcccctgctgagcagccctgtgccccagaggaagacccagagcggctgctttgacctggacagcagcctgctgcacctgaagagcttcagcagccgcagcccccggccctgcctgaacattgaagatgatcctgacatccacgagaagcccttcctgagcagcagcgccccacccatcaccagcctgagcctgctgggcaactttgaggagagcgtgctgaactacagatttgaccccctgggcatcgtggatggcttcaccgctgaggtgggcgccagcggggccttctgccccacccacctgaccctgcctgtggaggtgtccttctacagcgtgtctgatgacaatgcccccagcccctacatgggcgtcatcaccctggagagcctgggcaagaggggctacagagtgccccccagcggcaccatccaggtgaccctcttcaaccccaacaagacagtggtgaagatgtttgtggtgatctatgacctgcgggacatgcctgccaaccaccagaccttcctgcggcagaggaccttctctgtgcctgtgaagcaggaggtgaagaggtctgtgaacaaggagaacatccgccacacagaggagcggctgctgcgctacctgatccacctgcgcttccagagcagcaagagcggcaagatctacctgcacagagatgtgcggctgctcttcagcaggaagtccatggaggtggacagcggggccgcctatgagctgaagagctacacagagagccccaccaacccccagttcagcccccgctgctag

SEQ ID NO: 201929 - DNA, 2877 bp, Artificial Sequence
  derived and/or modified sequence
cggccagatgctgacaccctggatgagtactttgaatatgatgctgaggagttcctggtgtccctggccctgctgatcacagagggccgcaccccagaatgttctgtgaagggccgcacagagagcttccactgccccccagcccagagctgctaccctgtgaccaccaagcatgaatgtagtgacaagctggcccagtgccggcaggcccggaggaccaggtctgaggtgaccctgctgtggaagaacaacctgcccatcatggtggagatgatgctgctgcctgactgctgctacagtgatgatggccccaccacagagggcatcgacctgaatgaccctgccatcaagcaggatgccctgctgctggagcgctggatcctggagcctgtgccccggcagaatggagaccgcttcatcgaggagaagaccctgctgctggccgtgcgcagctttgtgttcttcagccagctgagcgcctggctgtctgtgagccacggggccatccccaggaacatcctgtaccgcatctctgctgctgatgtggacctgcagtggaacttcagccagacccccattgaacatgtgtttcctgtgcccaacgtgagccacaacgtggccctgaaggtgtctgtgcagagcctgccccggcagagcaactaccctgtgctgacctgcagcatccacaccaacatcggcctgtatgagaagaggatccagcagcacaagctgaagacccaccagcaccacaaccccaatgaagctgagcagtgtggcaccaacagcagccagaggctgtgcagcaagcagacctggaccatggcccctgagagcgtgctgcacgccaagagcggccccagccctgagtacacagctgctgtgaagaacatcaagctgtacccaggcaccggcagcaagagtgaccacggcaccagccaggccaacatcctgggcttcagcggcatcggggacatcaagagccaggagacctctgtgaggaccctgaagagcttctccatggtggacagcagcatcagcaaccggcagagcttctggcagagcgctggggagaccaaccccctcatcggcagcctcatccaggagcggcaggagatcatcgcccgcatcgcccagcacctgatccactgtgaccccagcaccagccacgtgtctggccggcccttcaacacccaggagagcagcagcctgcacagcaagctgttccgggtgtcccaggagaatgaaaatgtgggcaagggcaaggaggccttctccatgaccttcggcagccctgagttcagcagccctgaggacaccaatgaaggcaagatccggctgaagccagagacccccaggtctgagacctgcatcagcaatgacttctacagccacatgcctgtgggggagaccaaccccctcatcggcagcctgctgcaggagcggcaggatgtgattgcccgcatcgcccagcacctggagcacatcgaccccacagccagccacatcccccggcagagcttcaacatgcatgacagcagctctgtggccagcaaggtgttccgcagcagctatgaggacaagaacctgctgaagaagaacaaggatgagagctctgtgtccatcagccacaccaagtgcagcctgctgggggacatcagtgatggcaagaacctggtgcccaacaagtgcttcaccagcttcaagaacaacagcaaggagaagtgcagcctgaagcaccagaccaggaaccagtgccagaacaaccccagcgagatcatccagagcacctaccaggagacccagaacaagagcagcagcctgagcaccagcagcatcctgagccagcacaaggagaacaacctggacctgaccagccgcttcaaggagcaggagatgagcaatggcatcgacaagcagtacagcaactgcaccaccatcgacaagcagatctgcaccaacaagtacaaggagaagatcatcaatgaaaactacaaccccaagttctttggaaacctgcagagtgatgacagcaagaagaatgacagcaagatcaaggtgacagtgctggagatgtctgagtacctgaacaagtatgagagcatgagcagcaacaaggacagcaagaggcccaagacctgtgagcagaacacccagctgaacagcattgagaactacctgaacaaggacaatgaaggcttcaagtgcaagaagagtgaccagctgaagaatgagcaggacaagcaggaggaccccaccaatgagaagagccagaactacagccagaggaggagcatcaaggactgcctgagcacctgtgagcagcccaagaacacagaggtgctgcggaccaccctgaagcacagcaatgtgtggaggaagcacaacttccacagcctggatggcaccagcacccgggccttccacccccagacaggcctgcccctgctgagcagccctgtgccccagaggaagacccagagcggctgctttgacctggacagcagcctgctgcacctgaagagcttcagcagccgcagcccccggccctgcctgaacattgaagatgatcctgacatccacgagaagcccttcctgagcagcagcgccccacccatcaccagcctgagcctgctgggcaactttgaggagagcgtgctgaactacagatttgaccccctgggcatcgtggatggcttcaccgctgaggtgggcgccagcggggccttctgccccacccacctgaccctgcctgtggaggtgtccttctacagcgtgtctgatgacaatgcccccagcccctacatgggcgtcatcaccctggagagcctgggcaagaggggctacagagtgcccccatctggcaccatccaggtgtag

SEQ ID NO: 201930 - DNA, 3231 bp, Artificial Sequence
  derived and/or modified sequence
atgaagcccgaccgggacaccctggacgagtacttcgagtacgacgcagaagagtttttagtgtcccttgccctgctgatcacagaggggaggactccggagtgctccgtgaaaggcagaaccgagtcatttcattgcccccctgctcagtcatgttatcccgtgacaacaaagcatgagtgttccgataaattagcccagtgcagacaggcccgccggacacggagtgaggtcaccctcctgtggaagaacaaccttcctataatggtcgagatgatgctactgcctgattgttgttacagcgatgatgggcctacgaccgaggggatcgatctaaacgaccctgctataaagcaagacgcactcctgctggaacggtggatcctcgagcccgtaccgaggcagaacggagatcggttcatcgaggagaagactctgctgctggccgtccggtcgttcgtgtttttctctcagcttagtgcctggctctccgtgagtcacggagctatccctaggaatatcctgtacaggatctctgctgccgatgtggacctgcagtggaacttcagccagactccgatcgaacatgtatttcctgtgcccaatgtgtcccacaatgtcgcactcaaggtcagcgtccagagccttccacgccaatctaattaccccgttctcacctgttcaattcacacgaatattggactatacgagaaacgcattcaacaacataagctcaaaacgcaccaacatcacaacccaaatgaggcggagcagtgcggcaccaactcatcccagcggctctgttcgaagcaaacatggaccatggccccagaatctgtgctccacgcgaagagcgggccctcccctgagtataccgcagcagtcaagaacataaagctttatcccgggaccggaagcaaaagtgaccatggcacatcacaagctaacatcctaggattttcaggaatcggagacatcaagtctcaagaaactagtgtgcgtacactaaagtcattcagcatggtggatagcagtataagcaataggcagagcttctggcagtccgcaggagaaacgaaccccctcatcggaagtctgattcaagagagacaggagataattgctcggatcgcccagcatctgattcattgcgatccttctacatcccatgtttccggacgtccctttaacacgcaagaaagttcttcactgcacagcaaactgttcagagtcagtcaggagaacgagaatgtgggcaagggcaaagaagcattctctatgacgttcggcagtcccgaatttagtagccccgaagatacaaatgagggcaaaatcagattaaaacccgagacccctcgaagcgaaacctgcataagcaatgacttctattcacacatgcccgtgggcgagactaatcctctgatcgggagccttctccaagaaagacaagacgttatcgccaggatagctcagcatctggaacacattgacccaaccgccagccatataccgcgccagtcttttaacatgcacgatagctcatccgtggcttctaaagtgttcagatctagttacgaagacaagaatctcctaaaaaaaaataaggacgaatcaagcgtgtctattagtcacactaagtgttcactcctcggtgatattagcgacgggaagaatctggtgccaaacaagtgtttcacatcattcaagaataatagcaaggagaagtgttctcttaaacaccagacccggaaccagtgccagaacaatccaagcgagataatacagagcacgtatcaggagacgcagaataagtcatcttccctgtctacttccagcatcttgtcccaacataaggagaacaacctggacctgacaagtagattcaaagaacaggagatgtcaaacggtatcgataaacagtactccaattgcacaacgatcgacaaacagatctgtactaacaaatataaagaaaagattattaacgaaaactataaccctaaattttttggaaatctccagtctgacgattcgaagaagaacgacagcaagatcaaagtcaccgtgttggagatgagcgagtatctgaacaagtacgaaagtatgtcttctaataaggactcaaagcggccgaaaacatgtgagcagaatacccagttgaattcaatagagaattacctcaataaggacaatgaggggtttaagtgtaagaaatctgatcagctaaaaaacgagcaggataagcaggaagatcctactaacgagaaatcccagaattacagccaacggagatccatcaaagattgcttgagtacctgtgagcagcctaagaacaccgaagtgctgcgcacaactttgaagcacagcaatgtttggaggaaacacaacttccacagcttggacggtaccagcactagggcctttcatcctcagacgggattgcctttattaagctcccctgtgccacagaggaaaacccaatccggttgtttcgacctggattcatctctcctgcatttaaagtctttttcgagtagatccccacggccctgcctgaacattgaagatgatccagacatacatgaaaaacctttcctaagtagttctgccccccccattaccagtctttcactgctggggaacttcgaagaaagtgtgctgaactacagatttgatccgcttggaatcgtcgatggctttactgccgaagtcggcgcatccggcgctttctgcccaactcatctcactttacctgtggaagtcagcttctatagcgtgtcagatgacaatgccccttccccctatatgggagttattactctcgagagcctgggaaaacgtgggtatcgagtgcccccctctggaacaatccaagtcactctgttcaatcccaataagactgtggttaagatgttcgtcgtgatctatgacctgagagacatgccggccaaccatcagacctttctgagacagcggacattcagtgtgccagtcaaacaagaagtgaagagaagcgtgaataaggagaatattaggcacactgaggagcgactgctgcgctatcttatccacttacgtttccagtctagtaaatcaggcaaaatttacctgcaccgggacgtccgactgctctttagtcggaaatctatggaggtggattccggggccgcctatgaactgaagtcatacaccgagagccccactaacccccaatttagtcctcggtgttag

SEQ ID NO: 201931 - DNA, 3231 bp, Artificial Sequence
  derived and/or modified sequence
atccggccccggagcgacaccctggacgagtacttcgagtacgacgcggaggaatttctggtcagcttggctcttctgatcacagaggggcggactccggagtgctctgtgaagggccgtactgagtccttccactgtccgcccgcccagtcatgttatccagtgaccaccaagcacgagtgttctgacaagctagctcagtgccgtcaggcccggcggactagaagcgaagtgaccttgctgtggaagaacaatctccctattatggttgagatgatgttgttacctgattgctgttacagcgatgatgggccgaccaccgaagggattgacctcaacgatccagctatcaaacaagatgccctgctcctggagagatggatcctagagccggtgcccagacagaatggagatagattcatcgaagagaagaccctgttattggccgtacggtccttcgttttcttttctcagctgtcagcctggctgtcagtttcccatggcgcaattccccgaaatatcctgtatcggatttccgcagcggacgtggatctgcagtggaatttttcccagacccctatagagcacgtcttccctgtgccaaacgtgagccataacgtggctctgaaagtatcagtgcagtcccttccacgacagtctaattacccagtgctcacgtgcagcatacataccaacatcggcttgtacgagaagagaattcaacaacacaaactcaagactcatcagcatcacaacccaaacgaagcagagcagtgtggaacaaacagcagtcagcgcctgtgctcaaaacagacctggaccatggctccagagtcagttctgcacgcaaagtccggtccgtctcctgagtatacagcagcagtgaagaacatcaagctctaccctggcacaggctcaaagtctgaccacggcacttcccaggccaatatcctgggattttccggaattggagatattaaaagccaggagactagcgtcaggactttgaagtcattttcaatggtagacagctcaatttccaatcggcagagcttctggcagtccgcgggagaaactaacccgctgattggctcattgatccaggaacgacaggaaatcattgcacgcatcgcacagcacctcatccattgtgacccaagtacgtcccatgtgtccggacggccgtttaatacacaggaatcctcttccttgcattctaagttgttcagggtaagccaggagaatgagaatgtcggtaaagggaaagaagcctttagcatgacattcggctcacccgagttctcttctcctgaagacaccaacgagggcaagatccggttgaaaccggagaccccccgctctgagacctgtataagtaatgatttttactcccacatgcctgtgggcgaaaccaacccccttatcggatcactgttgcaggaacggcaggatgtcatcgcacggattgctcaacacctcgagcatatcgatcctactgctagccatatccctagacaatcatttaatatgcacgactctagctcggttgcttccaaggtcttccgaagtagctacgaggacaagaatctcctaaagaaaaacaaggatgagagctcagtatcaatcagtcatactaagtgttctttactgggcgacatctcagacggaaagaacctcgtacctaacaagtgttttaccagcttcaagaacaactccaaggaaaagtgcagcctaaaacaccaaacgagaaaccagtgccagaataacccttccgagattattcagtccacctaccaagaaacacagaacaaatccagctcacttagtaccagctcaatcctgtcccagcataaggagaataatcttgaccttacatcccgattcaaggaacaagaaatgtctaatggtatagataaacagtactctaactgcaccacaatcgacaagcagatatgcaccaataagtacaaagaaaagattatcaatgagaattataacccaaagttcttcgggaaccttcagtcggacgactcaaagaaaaacgacagcaagataaaagtgacagtgctggagatgagtgagtacctgaataaatacgagagcatgtctagtaacaaggattccaagcggccgaagacatgtgagcaaaacactcagctgaactctatagaaaactatctcaataaggacaatgaaggcttcaagtgtaaaaagtcagatcagttaaaaaatgagcaggataaacaagaggatcccaccaatgagaaatctcagaactactctcagcggaggagcataaaggattgcctcagtacttgtgaacaacccaagaataccgaagtgttgcgaaccaccttaaaacactctaatgtatggcggaagcataattttcactcacttgatggcactagtacaagggcttttcacccccagacgggtttaccactgctgagcagtccggttccgcagcgtaagacacagtccggttgttttgacctggacagctccctgctgcatctgaaatccttctcctctagatcccccaggccctgccttaacatagaagatgacccggacatccatgaaaaaccatttctgagctcaagtgccccgccaattaccagcctctctcttctcggcaattttgaagagtccgtcttgaattaccggttcgacccgctgggcatcgtggacggatttacagctgaggtaggtgcgagtggggcattttgccctacacatctcacactgccagtcgaagtctccttttactctgtgagcgatgacaatgcaccctccccctatatgggcgtcattaccctggagtcactgggaaagaggggttacagagtgcctccctccggcacaatccaggtgactctctttaatccaaacaagactgtggtcaagatgtttgttgttatctatgacttacgggacatgcccgctaaccaccaaacattccttcgccagcgaactttttctgtaccagttaagcaggaggtcaagaggagcgtgaacaaagaaaacattcgccacaccgaggagcgactgcttcgctacttgattcaccttagattccagagcagcaaaagcggaaaaatctatctacaccgagatgttagactgctttttagtcggaaatccatggaagttgatagcggcgcggcatatgaactgaaaagctacacagagagtcctaccaatcctcagttctcgcccagatgctag

SEQ ID NO: 201932 - DNA, 2877 bp, Artificial Sequence
  derived and/or modified sequence
cggcccgacgccgacaccctggacgagtacttcgagtacgacgccgaagagtttctggttagcttggctctgcttataactgagggcagaacacccgagtgctctgtcaaggggcgcaccgaaagctttcactgccctccagctcaaagctgttatccggtgacaactaaacatgaatgctctgacaaattggcacaatgccgccaggccagaagaacacgcagcgaggtgacactgctgtggaaaaacaacttacccataatggtggagatgatgctcctacccgattgctgttatagcgacgatgggcctaccactgaaggtatcgatctcaacgatcccgccatcaagcaggatgccctgctgctggagcgttggatcctcgagccagtccccagacaaaatggcgataggttcatcgaagagaagacactcctgctggcagtgcgctcctttgtttttttcagccaactcagcgcttggttatctgtgagccacggggcaattccccgcaatattctctacaggatctctgccgccgacgttgatttgcagtggaatttttctcaaactcccatcgagcacgtctttcccgtgcctaacgtcagtcacaatgtggccttgaaggtgtctgtgcagagcctacctagacagagcaactatccagtgctgacgtgttcaatccacacgaacataggtctctacgagaaacgcatacagcagcacaagctgaaaactcaccagcatcataatccgaacgaggcagaacagtgtggtacaaatagttctcagcggctgtgctcaaaacagacctggactatggcccccgagtctgtcttgcacgcaaagtccggaccttctccagagtacacagccgccgtgaagaacataaagctgtaccctggaacgggttccaagtcagaccatggcacgagccaggcaaacattttgggcttctctggaatcggtgacattaaatctcaagagacttcggtgaggaccctcaagtcatttagcatggttgattcttcaatcagtaatcgccagtctttttggcagtcggctggggagacgaatccacttatcggcagtctgatccaggaaagacaggaaatcattgcccgtatcgcccagcacctgattcactgtgacccttctacaagccatgtctccggccgtccatttaacactcaggaatcaagctccctccactcaaaactcttcagggtttcacaggagaacgaaaacgtgggcaagggaaaagaggctttctctatgacctttggttcgccagaatttagctcccctgaagacaccaatgaggggaagattcggctgaagcctgagacccccagaagcgaaacctgtattagtaatgatttttatagtcacatgcctgtcggcgaaacaaacccactaattggtagcctgctgcaggagagacaagacgtgatagctaggatcgcacagcacttggaacacattgatcccacagcttcgcacatcccaaggcaatctttcaacatgcacgactcctcatccgtcgctagcaaagtgttcaggtcgagctatgaagataagaacctcctgaagaaaaacaaggatgaatcttcagtctcaattagccacaccaagtgctccctgcttggagatatttccgacggcaaaaacttggtgcctaataagtgcttcacatctttcaaaaacaattcaaaggagaaatgtagcctaaagcaccagacgcggaatcagtgccagaacaacccttccgagataattcagtccacatatcaggagacgcaaaacaaaagttcaagtctgtctaccagctccatcctctcgcagcacaaggagaacaacttagacctaacgtcacgttttaaggagcaggaaatgtcaaacgggattgacaaacagtattcaaattgtaccactatagataagcagatctgtacgaataaatataaagagaaaattatcaacgagaactataaccccaagtttttcggcaacctgcagagcgatgatagcaaaaagaacgattcaaaaataaaggtcaccgtcctggaaatgtcggagtatcttaataagtacgaaagtatgtccagtaacaaagacagtaagcggcccaaaacatgtgagcagaacactcaactgaacagcatcgagaattatctcaacaaagataatgagggatttaagtgtaagaaaagtgaccagctgaagaacgaacaagataagcaggaagacccaaccaatgagaagtcgcaaaactactcccaacgaaggtccataaaagactgcttaagcacatgcgaacagccaaaaaacactgaagttctgcgtacgaccttaaaacactccaatgtgtggagaaaacacaactttcacagccttgatggtacaagtacacgggcctttcatccccagacgggactcccactgttgtctagccctgtcccccagcggaaaacccagagcggctgctttgatcttgactccagtctcctacatttgaagtctttcagcagccgctctccaagaccctgccttaacattgaggatgatcctgacatccacgagaagccttttcttagttcgagtgccccccctatcacctccctctctttgttgggtaatttcgaagaaagtgtgttaaattaccgcttcgatccccttggcattgtggatggattcaccgcagaggtgggcgcttcaggtgccttctgtccaacacatctcaccctgcccgtggaagtgtctttctactcagtgtctgacgataacgctccttcaccttatatgggagtgatcactcttgagtccctgggaaagagaggatatcgtgtgcccccatctggtactatccaggtgtag

SEQ ID NO: 201933 - DNA, 3231 bp, Artificial Sequence
  derived and/or modified sequence
atgaaacctgatcgcgatacgctcgacgagtactttgagtacgatgcagaggaatttctcgtgtcccttgctcttctgataacggaaggcagaacccctgagtgctccgtcaagggtcggacagagtccttccactgcccgcctgcccagtcgtgctatcctgtgaccacaaagcacgaatgttcagacaagctcgctcagtgtagacaggctcggagaacacgcagcgaagtgacacttctttggaagaacaatctgcctatcatggtcgagatgatgcttctgcccgactgctgctactccgacgatgggcctaccaccgagggtattgatctcaatgaccctgccatcaaacaggacgccctattacttgaacgatggatcctcgaaccggtcccaagacagaacggagacagatttattgaggaaaaaaccctccttcttgctgttcgcagttttgtgttctttagtcagctgtctgcttggctttcagtgagtcacggcgctattcctcgcaacattctgtataggatttctgccgctgatgtcgatcttcaatggaatttctcccagacccctatcgagcatgtgtttccagtgcccaatgtatcccacaatgttgctctgaaagtttcagtccagtcccttcccagacaatcgaactatcctgtccttacgtgctccatccacactaacatcgggctgtacgagaaaagaattcagcagcataagctcaaaacccatcagcatcacaatcccaatgaagccgagcaatgtggtacaaactcctctcagcggctgtgtagcaagcagacctggaccatggcacctgagagcgtgttgcacgccaagtccggtcccagccctgagtacactgccgctgtgaaaaacataaagctgtacccaggtaccgggtctaagtctgatcatggcactagtcaggccaacatcttgggattcagcggcatcggtgatattaaaagccaggaaactagcgtgagaactttaaagtcgttttccatggttgacagttccatttccaataggcaatcgttttggcagtcagccggagagactaacccactcatcggctcgctaattcaggaaagacaggagattattgctagaatcgcccagcacctcatccactgtgacccaagtacatcccacgtatccggcaggcccttcaacactcaggaaagcagcagtctgcactcaaagctctttagagtttctcaggaaaacgaaaatgtgggaaaaggcaaggaggcctttagcatgaccttcggcagccccgagttcagctcacccgaagacaccaatgaggggaagatcaggcttaagccggagactcccagaagtgagacatgtatttcaaacgacttttactcccatatgcccgttggtgagaccaatccattaatcggctctctgctacaggaacgccaggatgtgatcgctcgtattgcccaacatcttgagcacatcgatcctacggcgagccatattcctaggcaatctttcaacatgcatgactcaagctcagtggcgagcaaggtcttccgtagttcttacgaggacaaaaatctgctcaaaaaaaataaagatgagtcaagcgtctcaatttcccatacaaaatgcagcctgctgggcgatatctcagacgggaagaatttagttccaaacaaatgttttacgtcctttaagaacaattctaaggaaaagtgttcattgaagcaccagactaggaatcagtgccagaataatcctagcgagataatccaaagtacatatcaagagacacagaacaaatcgagtagtctttcaacttcttcaatcctgtcccaacacaaagaaaataacctggatctaacgtcgcgctttaaggagcaggaaatgtccaacggtatcgataagcagtattcgaattgtaccactattgacaagcagatctgtactaacaaatacaaggagaagatcatcaatgagaactataaccccaaattctttgggaatctccagagtgatgacagtaagaagaatgactccaagatcaaggtgacagttttggagatgagcgagtatctgaataagtatgagtcgatgagtagtaataaggattcgaaacgcccaaaaacgtgcgaacagaatacccagttgaattctatcgagaattatcttaataaggacaacgaagggttcaagtgcaagaagtcagatcagctaaaaaacgagcaggacaagcaggaagatccaacaaatgagaaatctcagaactattctcagagaagatctattaaagactgcttgtcaacctgtgaacaacctaaaaatactgaagtgctgagaactaccctgaagcacagcaatgtttggcgaaaacataactttcacagcctggacggcacatcaaccagggcattccacccgcaaacaggtctccctcttcttagcagccctgtccctcagagaaagacccagtcaggatgtttcgacctggattcctccctactgcatctgaaatcttttagcagtcgaagccccagaccatgtctcaacatcgaggatgaccctgatatccatgagaagccattcttgtcgagcagtgctccccctatcacctcactgtcccttttaggcaactttgaggaatctgtgctgaattataggtttgatccactgggaattgtggatgggttcaccgccgaggtgggcgcatcaggcgcattttgccctactcacctcacactgccggttgaagttagtttctactcagtgtcagatgacaacgccccttctccctacatgggtgttataaccctggaatccctgggtaagagaggataccgggtgcctccatccggcactatccaggtgactctgttcaacccgaataaaactgtggttaagatgttcgtcgttatctatgacctgagagatatgcctgcaaatcaccagacgtttctgcgtcagcggacattctccgttccagtcaagcaggaggtaaaaagaagtgtcaataaagagaacattaggcatacggaggagaggctgctgcgctacctgatacatctacgattccagagttccaagtcagggaagatatacctgcacagagatgtgcgtctgttgttttcgcggaagtccatggaagtggactcaggcgcagcgtacgaattaaagtcttatactgagtcacccacaaacccgcagttttcaccaagatgctag

SEQ ID NO: 201934 - DNA, 3231 bp, Artificial Sequence
  derived and/or modified sequence
attcgtccgagatcagacaccctagacgagtacttcgagtatgatgcagaggagttcctcgtctccctggccctcctcatcaccgaaggtcgcacacctgaatgctctgttaagggcaggaccgaatcgttccattgcccccctgctcagtcctgctatcccgtgaccacaaagcatgaatgctcggataagcttgcacagtgccggcaggccaggcggacccgttctgaggtgaccctgctttggaaaaacaatctcccaattatggtggaaatgatgctactgcccgattgctgttactcggatgatggccctaccaccgaaggcatcgatctcaatgacccagcaatcaagcaggatgccctgctgctggagcggtggattctcgaaccagtgccccgtcagaacggagatcgattcatcgaggagaaaacactcttgctggcagtcaggagctttgtttttttctcacagctctccgcatggctttccgtctcccatggcgctattccccgaaacattctgtatagaatctccgctgcagatgttgatctacaatggaatttcagccaaactccgattgagcacgtctttcccgtccccaacgtcagccataacgtcgccctgaaggtgtcggtgcaatctctgcccaggcagtccaactacccggtactcacctgcagtattcacactaacatcgggctgtacgagaagagaatccagcagcataagctcaagactcatcagcaccacaatccaaatgaagccgagcagtgcggcaccaacagcagccagagactgtgctcgaagcagacttggacgatggctcccgagtctgtgctgcatgcgaagagcggaccatcgcccgagtacacagccgcagtgaaaaatattaagctttaccctgggacgggctcaaagagcgaccatggtaccagccaggccaacattctggggttctccggcatcggagacattaagagtcaggaaacctcagtgagaactctcaagtcgttttctatggtagatagtagtatttctaatcgacaaagcttctggcaaagtgcgggagagactaatcctcttatagggtcactaattcaggaacggcaagagatcatagctcgcatcgcccagcacttgattcattgcgatccgtcaactagccatgtgtctggcaggccctttaatacccaggagtcctcttctctgcactccaagctgttccgtgtaagtcaggaaaatgagaatgtgggcaaagggaaggaagcctttagcatgacgttcggatcccccgaattctcctcacctgaagatactaacgaggggaagatcaggctcaagcccgagacgccaaggagcgagacttgcatatccaatgacttttattcccacatgccagtgggagagaccaaccccttaatcggaagtttactgcaagagcgtcaagatgtcatcgccagaatagcacaacacttagaacatatcgacccgaccgccagtcatataccccgtcaatcttttaatatgcatgattcgtcatccgtggctagcaaagtgtttaggtcatcctatgaggataagaacctgttgaaaaaaaacaaggacgagagctctgtttctatatcacataccaaatgcagcctcctcggagacatctctgatggtaagaatctggtcccgaacaagtgcttcacttcctttaaaaacaatagcaaagagaaatgtagcctaaaacaccagaccagaaatcagtgccagaacaatccttcagaaatcatccagtctacctaccaggaaacacagaataaatcctcaagtctgagcaccagcagcatcttaagtcagcacaaggaaaacaatctggatttgaccagcagattcaaagaacaggagatgtcaaatggtatagacaagcagtactccaactgtaccacaattgataaacaaatttgcactaacaagtataaggagaagatcatcaacgaaaactataacccaaaattcttcggcaacctgcagtctgatgactccaagaaaaacgatagtaaaattaaggtcactgtcctggagatgtccgagtatttaaacaaatacgagtcaatgagttccaacaaagattctaagaggcctaaaacctgcgaacagaacacgcagctgaactctatcgaaaactatttaaataaagacaatgaaggatttaagtgcaaaaaaagtgatcagttgaagaatgaacaggataagcaggaggatcctacgaatgagaaaagtcaaaactattcccagagacgtagtatcaaagactgtttgagtacatgcgaacaacctaagaacacggaggtgttacgtactacattgaaacattctaacgtctggcgcaagcataattttcacagcctagatggaacgtccaccagagcctttcatcctcagaccggcttgcctctgctgtcaagtcctgtcccgcagcggaagacacaaagcggctgctttgatttggattcaagcctgctgcacctgaaaagtttctccagtagatcccctaggccttgtctgaacattgaggatgatccagacatacatgagaagccctttttgtcatctagcgctcctcctataacgagtctatcactgttgggaaacttcgaagaatccgtactgaactatagattcgatccattgggtattgtggatggttttacagcagaggtcggcgcttccggtgctttctgcccaacacacctgactctgccagtcgaggtatctttctatagcgtctccgacgacaatgctccaagcccatacatgggcgtgattaccctggagtccctgggcaagcggggttacagagtaccgccaagcgggaccatacaggtgacactctttaatcctaacaaaaccgtggtcaagatgttcgttgttatatatgatctgagggatatgcccgctaaccatcagaccttcttgcggcaaagaacattctccgttccagtgaagcaggaagtcaagcgaagtgtaaacaaagaaaatatcaggcacaccgaggagcgcctgctgagatacctgattcacctccgcttccagtcctcgaagtccggcaagatatatctgcatagggatgtgcgactgctattcagtaggaagtcgatggaagtggactcaggggctgcctatgagcttaaaagctatacagaaagccctaccaacccccagtttagtcctaggtgttag

SEQ ID NO: 201935 - DNA, 2877 bp, Artificial Sequence
  derived and/or modified sequence
aggccagatgccgacaccctcgacgagtacttcgagtatgatgctgaggagttcctggtcagcctggccttgctcatcacagaggggcgtactcccgagtgctcagtcaaaggcagaacagagagttttcactgtccacctgcacagagttgttacccggtaactaccaaacacgaatgttcagataagcttgcacagtgcagacaggcacggcgaacccgctcagaggtcacattactctggaagaataacctgcctataatggtcgagatgatgctgctgccagattgctgctattcggacgacggcccaaccactgaggggattgacctgaacgacccagccatcaagcaggacgccttgctgctggaacgatggatcctggagccagtccctcgtcagaatggcgatcgattcattgaggagaaaacacttttgcttgctgtaagatcgtttgtatttttctcacaactgtctgcctggctctcagtctcccacggtgccatccctagaaatatcttgtataggataagcgctgcagacgttgatctgcaatggaatttctcccaaacccctatcgaacacgtcttcccagtacctaatgtctctcacaacgtggcccttaaggtttctgtgcaaagcctcccacggcaaagtaactaccctgttctgacatgtagcattcacaccaatattgggctctacgagaaacgcatccagcagcacaagctcaagactcaccaacaccataacccaaacgaggctgaacaatgtggtaccaacagtagccagcgcttgtgcagcaaacaaacctggactatggcccctgagagcgtgttgcacgcgaagtctggccctagcccagaatatacagccgcagtgaaaaatatcaagctatatccaggaacgggaagcaaatcagaccacggaaccagccaggctaacatactcggattttccggcatcggcgatatcaagtctcaagaaacaagtgtgagaacgctgaagtccttctcaatggttgattccagcattagtaatagacagtccttctggcagtcggcgggagagacaaacccactgattggaagcctgattcaggagcggcaggagatcatcgctcggatcgcccagcacttaatccactgcgatccatccacatcacatgtgtcaggcaggcccttcaatacacaggagtcaagtagtctgcacagcaagctgttccgggtgagccaggaaaacgaaaacgtgggaaagggaaaggaggccttttcaatgaccttcggttccccagaattcagctctcccgaggatacaaacgaaggaaagattcgattaaaacccgagacaccacgctctgaaacttgtataagtaatgatttttattcacacatgcccgtcggagaaacaaacccccttattggcagcttacttcaggagagacaagatgtgattgctcgtattgcacagcacctggaacacatcgaccctactgcctctcacatccccaggcaaagctttaatatgcacgattcctcctctgtcgcctctaaagtattccggtctagctatgaggacaagaacttacttaagaagaacaaggacgaaagcagtgttagcatcagccatacaaagtgttcgttgctgggtgacatctcggacggaaaaaacttagtaccaaacaaatgcttcacctcattcaaaaataactctaaagagaaatgtagcctcaagcaccagacacggaaccagtgtcagaataatcccagtgagatcatacagtctacatatcaggaaacccagaacaagtccagctccctttcgacatctagcatcttgagtcagcacaaagaaaataatctcgacctgacctctcggtttaaagagcaggaaatgtcgaatggaatcgataaacagtacagtaattgtacaaccatcgataaacagatctgcaccaataaatataaggagaaaatcataaatgagaactataaccctaagttcttcggaaacctccagtccgacgattccaaaaaaaacgactcgaagattaaggtcacagtgctggagatgtctgaatatcttaacaagtacgaatcaatgtcttccaacaaggatagcaaacgacctaaaacgtgcgaacagaatactcagctaaactctatagaaaattatctgaataaggacaatgaggggttcaaatgcaagaagtccgaccagttaaagaacgagcaagacaagcaggaggatccaactaacgagaagagccagaactactctcagagacgctctattaaggactgtctgtccacatgcgagcagcctaagaataccgaagtgctgcgcacaactttgaagcattcaaacgtatggagaaaacacaacttccattcactggatgggacctctacccgcgcatttcatccacagaccggattacccctattgtcctcacccgtgccccaacggaaaacacagagtggatgttttgatctcgactctagtctgttgcatctgaagagtttttctagcagaagccccagaccgtgcttgaatattgaggacgatccagacattcatgagaaaccattcttatcttcctccgcccctccgatcacatcgctgtctctgctcgggaactttgaggaatcggtcctgaattaccggtttgatccacttggaattgtggacgggtttaccgctgaggtcggagcctctggggctttctgtcccacacacctcaccctgccggtcgaggtctctttttacagtgtcagcgacgataatgcgcctagcccttacatgggtgtcatcacactggaaagcctggggaaacggggataccgagtgcctccttcaggcaccatccaggtctag

SEQ ID NO: 201936 - protein, 822 aa, Artificial Sequence
  derived and/or modified sequence
MKPALLPWALLLLATALGPGPGPTADAQESCSMRCGALDGPCSCHPTCSGLGTCCLDFRDFCLEILPYSGSMMGGKDFVVRHFKMSSPTDASVICRFKDSIQTLGHVDSSGQVHCVSPLLYESGRIPFTVSLDNGHSFPRAGTWLAVHPNKVSMMEKSELVNETRWQYYGTANTSGNLSLTWHVKSLPTQTITIELWGYEETGMPYSQEWTAKWSYLYPLATHIPNSGSFTFTPKPAPPSYQRWRVGALRIIDSKNYAGQKDVQALWTNDHALAWHLSDDFREDPVAWARTQCQAWEELEDQLPNFLEELPDCPCTLTQARADSGRFFTDYGCDMEQGSVCTYHPGAVHCVRSVQASLRYGSGQQCCYTADGTQLLTADSSGGSTPDRGHDWGAPPFRTPPRVPSMSHWLYDVLSFYYCCLWAPDCPRYMQRRPSNDCRNYRPPRLASAFGDPHFVTFDGTNFTFNGRGEYVLLEAALTDLRVQARAQPGTMSNGTETRGTGLTAVAVQEGNSDVVEVRLANRTGGLEVLLNQEVLSFTEQSWMDLKGMFLSVAAGDRVSIMLASGAGLEVSVQGPFLSVSVLLPEKFLTHTHGLLGTLNNDPTDDFTLHSGRVLPPGTSPQELFLFGANWTVHNASSLLTYDSWFLVHNFLYQPKHDPTFEPLFPSETTLNPSLAQEAAKLCGDDHFCNFDVAATGSLSTGTATRVAHQLHQRRMQSLQPVVSCGWLAPPPNGQKEGNRYLAGSTIYFHCDNGYSLAGAETSTCQADGTWSSPTPKCQPGRSYAVLLGIIFGGLAVVAAVALVYVLLRRRKGNTHVWGAQP

SEQ ID NO: 201937 - DNA, 2469 bp, Artificial Sequence
  derived and/or modified sequence
atgaagcccgccctgctgccctgggccctgctgctgctggccaccgccctgggccccggccccggccccaccgccgacgcccaggagagctgcagcatgagatgcggcgccctggacggcccctgcagctgccaccccacctgcagcggcctgggcacctgctgcctggacttcagagacttctgcctggagatcctgccctacagcggcagcatgatgggcggcaaggacttcgtggtgagacacttcaagatgagcagccccaccgacgccagcgtgatctgcagattcaaggacagcatccagaccctgggccacgtggacagcagcggccaggtgcactgcgtgagccccctgctgtacgagagcggcagaatccccttcaccgtgagcctggacaacggccacagcttccccagagccggcacctggctggccgtgcaccccaacaaggtgagcatgatggagaagagcgagctggtgaacgagaccagatggcagtactacggcaccgccaacaccagcggcaacctgagcctgacctggcacgtgaagagcctgcccacccagaccatcaccatcgagctgtggggctacgaggagaccggcatgccctacagccaggagtggaccgccaagtggagctacctgtaccccctggccacccacatccccaacagcggcagcttcaccttcacccccaagcccgccccccccagctaccagagatggagagtgggcgccctgagaatcatcgacagcaagaactacgccggccagaaggacgtgcaggccctgtggaccaacgaccacgccctggcctggcacctgagcgacgacttcagagaggaccccgtggcctgggccagaacccagtgccaggcctgggaggagctggaggaccagctgcccaacttcctggaggagctgcccgactgcccctgcaccctgacccaggccagagccgacagcggcagattcttcaccgactacggctgcgacatggagcagggcagcgtgtgcacctaccaccccggcgccgtgcactgcgtgagaagcgtgcaggccagcctgagatacggcagcggccagcagtgctgctacaccgccgacggcacccagctgctgaccgccgacagcagcggcggcagcacccccgacagaggccacgactggggcgccccccccttcagaaccccccccagagtgcccagcatgagccactggctgtacgacgtgctgagcttctactactgctgcctgtgggcccccgactgccccagatacatgcagagaagacccagcaacgactgcagaaactacagaccccccagactggccagcgccttcggcgacccccacttcgtgaccttcgacggcaccaacttcaccttcaacggcagaggcgagtacgtgctgctggaggccgccctgaccgacctgagagtgcaggccagagcccagcccggcaccatgagcaacggcaccgagaccagaggcaccggcctgaccgccgtggccgtgcaggagggcaacagcgacgtggtggaggtgagactggccaacagaaccggcggcctggaggtgctgctgaaccaggaggtgctgagcttcaccgagcagagctggatggacctgaagggcatgttcctgagcgtggccgccggcgacagagtgagcatcatgctggccagcggcgccggcctggaggtgagcgtgcagggccccttcctgagcgtgagcgtgctgctgcccgagaagttcctgacccacacccacggcctgctgggcaccctgaacaacgaccccaccgacgacttcaccctgcacagcggcagagtgctgccccccggcaccagcccccaggagctgttcctgttcggcgccaactggaccgtgcacaacgccagcagcctgctgacctacgacagctggttcctggtgcacaacttcctgtaccagcccaagcacgaccccaccttcgagcccctgttccccagcgagaccaccctgaaccccagcctggcccaggaggccgccaagctgtgcggcgacgaccacttctgcaacttcgacgtggccgccaccggcagcctgagcaccggcaccgccaccagagtggcccaccagctgcaccagagaagaatgcagagcctgcagcccgtggtgagctgcggctggctggcccccccccccaacggccagaaggagggcaacagatacctggccggcagcaccatctacttccactgcgacaacggctacagcctggccggcgccgagaccagcacctgccaggccgacggcacctggagcagccccacccccaagtgccagcccggcagaagctacgccgtgctgctgggcatcatcttcggcggcctggccgtggtggccgccgtggccctggtgtacgtgctgctgagaagaagaaagggcaacacccacgtgtggggcgcccagccctag

SEQ ID NO: 201938 - DNA, 2469 bp, Artificial Sequence
  derived and/or modified sequence
atgaaacctgcactgctcccctgggctctcctgcttttggcgaccgccctaggccctggacccgggccaactgccgatgcccaggagtcctgcagcatgcggtgtggcgctctggatggtccgtgctcctgtcacccaacttgttcgggccttgggacctgttgtcttgacttccgggacttttgtctagagatcctcccctacagcggctccatgatgggtggtaaagatttcgtcgtccgacacttcaagatgtcctcccccaccgacgcctcagtaatctgtcgctttaaggattccatacaaacactgggccatgtggactccagcggccaggtgcactgcgtgagccccctgctttatgagtcggggagaatcccattcaccgtttccctggataatggccattcattcccccgcgcgggaacttggctggccgtacacccgaacaaggtctctatgatggagaaaagtgagcttgtgaacgaaacccgctggcaatactacggtactgccaatacttcaggaaacctatctctgacctggcacgtgaaaagcttgccaacccagacaatcaccatagagctctggggatatgaagagactggaatgccgtactcacaggagtggaccgccaagtggagctacctctaccctttagccacacacattcccaatagtgggtcctttacatttacacctaagcctgccccaccctcatatcagcggtggagagttggagccctccgaatcattgactccaaaaattacgccggccagaaggatgtacaggcgctgtggaccaatgaccatgcccttgcttggcatcttagtgacgatttccgggaagacccagtcgcgtgggcccgcacccagtgccaggcctgggaagaactcgaagaccagctgcctaacttcttggaagaactgccagactgcccttgcactctgactcaagcccgcgccgactctgggaggttctttactgactacggatgtgatatggagcaggggtctgtgtgcacgtaccatcccggagccgtgcactgtgtcaggagcgttcaggcgtcattacggtatgggtccggacagcagtgctgttatacagctgacggcacgcaactgctgacagcagattcttctgggggatcaacaccagacagggggcacgactggggagccccgccttttaggaccccgcctcgggttcctagcatgagtcattggttgtacgatgtcttaagcttttactattgctgtctgtgggctcctgactgcccccgctacatgcagcggagacccagtaacgattgtcgtaattacagacctccaaggttagcctccgccttcggcgatcctcacttcgttactttcgacggtacgaattttactttcaatggcagaggtgagtatgttttgctggaagcggccctcaccgacttgcgagttcaggcacgcgctcaaccaggaactatgagcaatggtacagaaactcgtggcaccggtcttacagctgtcgccgtacaggagggcaatagcgacgttgtggaggtacgactcgcaaaccgcacaggcgggttggaggttcttttaaatcaagaggtgctctcatttaccgaacagtcctggatggacctgaaggggatgttcctctctgttgcagccggtgatcgcgtcagcatcatgctggcctccggggctggtctggaggtttcagtgcagggcccattcctctccgtgtcagtgctgcttccagaaaagtttttaacccacacacacggtctcctgggcactcttaacaatgatcccactgatgactttacgctccacagcggcagggtcctccctccgggtacaagcccacaggaattattcctgtttggcgccaactggactgtacacaacgcctcttccctgctgacttatgatagctggttcctggttcacaatttcctgtatcagcctaagcatgaccccactttcgaacctttgtttcccagtgagactaccctgaacccctccctggctcaagaggcggccaaactgtgtggagatgatcatttctgcaattttgacgtggcagctaccggaagcctgtccaccggcacagccactagggtcgcgcaccaactccaccaaaggcggatgcaatccttgcagcccgtcgtgtcttgcggatggcttgctcctcccccaaatgggcaaaaagaaggtaaccgctacctggcaggttcaacaatctatttccactgtgacaatggatattctctggccggcgctgagactagcacctgccaggcagatggtacttggagtagcccaacacccaagtgtcagccggggcgaagctatgccgtgctactcgggatcatcttcggaggcctggcagttgttgccgctgtggcccttgtttacgttctccttcgcagacgaaagggcaatacgcacgtatggggcgcacagccgtag

SEQ ID NO: 201939 - DNA, 2469 bp, Artificial Sequence
  derived and/or modified sequence
atgaagccagccctgctgccctgggccctgctgctgctggccacagccctgggccctggccctggccccacagcagatgcccaggagagctgcagcatgagatgtggggccctggatggcccctgcagctgccaccccacctgcagcggcctgggcacctgctgcctggacttccgggacttctgcctggagatcctgccctacagcggctccatgatgggcggcaaggactttgtggtgcgccacttcaagatgagcagccccacagatgccagcgtcatctgccgcttcaaggacagcatccagaccctgggccacgtggacagcagcggccaggtgcactgtgtgagccccctgctgtatgaaagtggccgcatccccttcaccgtgtccctggacaatggccacagcttccccagggctggcacctggctggccgtgcaccccaacaaggtgtccatgatggagaagtctgagctggtgaatgagacccgctggcagtactatggaacagccaacaccagcggcaacctgagcctgacctggcacgtgaagagcctgcccacccagaccatcaccatcgagctgtggggctatgaggagaccggcatgccctacagccaggagtggacagccaagtggagctacctgtaccccctggccacccacatccccaacagcggcagcttcaccttcacccccaagccagccccacccagctaccagcgctggagggtgggcgccctgcgcatcatcgacagcaagaactatgccggccagaaggatgtgcaggccctgtggaccaatgaccacgccctggcctggcacctgagtgatgacttcagagaagatcctgtggcctgggcccggacccagtgccaggcctgggaggagctggaggaccagctgcccaacttcctggaggagctgcctgactgcccctgcaccctgacccaggcccgggctgacagcggccgcttcttcacagattatggctgtgacatggagcagggctctgtgtgcacctaccaccctggagctgtgcactgtgtgcgctctgtgcaggccagcctgcgctatggcagcggccagcagtgctgctacacagcagatggcacccagctgctgacagctgacagcagcggcggcagcaccccagaccggggccatgactggggcgccccacccttccgcaccccaccccgggtgcccagcatgagccactggctgtatgatgtgctgtccttctactactgctgcctgtgggccccagactgcccccgctacatgcagaggcggcccagcaatgactgcaggaactacagaccaccccggctggccagcgccttcggggacccccactttgtgacctttgatggcaccaacttcaccttcaacggccgcggggagtatgtgctgctggaggccgccctgacagacctgcgggtgcaggcccgggcccagcccggcaccatgagcaatggaacagagacccggggcaccggcctgacagctgtggccgtgcaggagggcaacagtgatgtggtggaggtgcggctggccaacagaactggaggcctggaggtgctgctgaaccaggaggtgctgtccttcacagagcagagctggatggacctgaagggcatgttcctgtctgtggccgccggggacagagtgtccatcatgctggccagcggggccggcctggaggtgtctgtgcagggccccttcctgtctgtgtctgtgctgctgcctgagaagttcctgacccacacccacggcctgctgggcaccctgaacaatgaccccacagatgacttcaccctgcacagcggccgggtgctgcccccaggcaccagcccccaggagctgttcctgtttggagccaactggacagtgcacaatgccagcagcctgctgacctatgacagctggttcctggtgcacaacttcctgtaccagcccaagcatgaccccacctttgagcccctcttccccagcgagaccaccctgaaccccagcctggcccaggaggccgccaagctgtgtggagatgaccacttctgcaactttgatgtggccgccaccggcagcctgagcactggaacagccaccagggtggcccaccagctgcaccagaggaggatgcagagcctgcagcctgtggtgtcctgtggctggctggcccctcctccaaatggccagaaggagggcaaccgctacctggccggcagcaccatctacttccactgtgacaatggctacagcctggccggggctgagaccagcacctgccaggctgatggcacctggagcagccccacccccaagtgccagcccggccgctcctatgctgtgctgctgggcatcatctttggaggcctggccgtggtggccgctgtggccctggtgtatgtgctgctgcggcggaggaagggcaacacccacgtgtggggcgcccagccctag

SEQ ID NO: 201940 - DNA, 2469 bp, Artificial Sequence
  derived and/or modified sequence
atgaagcccgccctgctgccctgggccctgctgctgctggccaccgctctcggacccggtccaggtccgacagccgatgcgcaagagtcttgtagcatgagatgcggggccctggatggtccctgctcttgtcaccctacctgttccggactggggacttgttgcctagatttccgagacttttgcctggaaatcctgccatacagtggctccatgatgggcggcaaggacttcgtggtgagacacttcaagatgtctagcccgacagacgcctcagtcatttgtcggtttaaagactccattcaaacgttaggacatgtggactcttccgggcaggtccactgcgtgagtccgctgctctacgaatctggccgaatcccattcacagtctccctggataacggccactcctttcctcgggctggaacctggctagctgtgcaccccaacaaggtgtcaatgatggagaagtccgagttagtcaacgagactcgctggcaatactatgggactgccaatactagtggcaatctctctctgacatggcatgtcaagagccttcccacccagaccatcaccatcgagctgtggggctacgaagagaccggtatgccgtattcccaggaatggacggcgaaatggagctatttatacccactggccactcatataccgaatagcggcagtttcactttcacccccaaaccagctccaccgagttatcaaaggtggagggtgggcgcccttcgcatcatcgattcaaagaactatgcaggtcagaaagatgtccaggccctttggaccaatgaccatgccctggcttggcacctcagcgacgacttcagggaggaccccgttgcatgggctcggactcagtgtcaggcatgggaggagctagaggatcagttgcccaactttcttgaggaactacctgattgcccctgcactttaacacaggccagagctgactccgggcgtttcttcactgattacgggtgcgatatggagcagggttccgtgtgcacttaccaccctggggcagtccattgcgtgaggagtgtacaagcctccctgcgttacgggtccggccaacagtgttgttatactgcggatggcacgcagctgctgactgccgactctagcggtgggagtacccccgacaggggtcacgactggggggccccaccctttcgcactccgccccgggtaccatcaatgtcccactggctgtatgacgtcctcagcttttattactgctgtctctgggcccctgattgcccacgatacatgcagcgcagaccctctaacgactgtagaaactataggccaccccggctcgccagcgcgttcggagaccctcactttgtgacctttgatgggactaatttcacttttaacggcagaggagagtatgtgctgctggaagccgctctcaccgatctgcgcgtgcaagcacgtgctcagccagggaccatgagcaatggaaccgagaccaggggaaccgggttaacggcagtggctgtgcaggagggcaacagcgacgtcgtggaagtccgactcgcgaatcggaccggcggactggaggtcctactgaatcaggaggtgctttcctttaccgagcagtcctggatggacctcaagggcatgtttctgagcgtagcagccggagacagagttagtattatgctggcctctggcgcaggcctggaggtctccgtgcaggggccttttctaagtgtttcagttctgttgcccgagaagtttctcactcacacacatggcctcttgggcacgctcaacaatgatcccacagacgacttcaccctgcatagtggacgcgtccttccgcccgggactagcccgcaggaacttttcttgttcggcgctaattggacagttcataacgctagcagcctgctcacctatgactcatggttccttgttcacaactttctgtaccagcccaagcatgatcccacttttgagcctctcttcccctccgaaacaactttgaatccttcacttgcacaggaagccgcgaaactctgtggggacgatcacttctgcaatttcgatgtagccgccactggctcactgtctacaggtaccgctactcgggttgcacaccaattgcaccaaaggcggatgcagtctcttcagcctgtcgtttcctgcggatggctggccccgcctccaaatggccagaaggaagggaacagatatctggccggcagcaccatctacttccactgcgacaacgggtattcacttgccggcgccgagacctcaacctgccaggccgatggtacatggagctctccgacacccaaatgtcagcctggtcggtcttacgcagtcctgctcggtattatctttggcggcctcgctgtggtggccgcggtggccttggtttacgtgctgctgagacgccgaaaaggcaatacccacgtatggggcgctcagccttag

SEQ ID NO: 201941 - DNA, 2469 bp, Artificial Sequence
  derived and/or modified sequence
atgaaacctgctctgttgccttgggctctgctccttcttgctactgccctcgggccagggcctggcccaacagccgacgctcaagagtcctgctcgatgaggtgcggcgctctcgacggaccatgttcctgccatccgacctgtagtgggctgggcacgtgttgccttgattttagggatttttgcctggagattctgccctattccgggtcgatgatgggaggaaaggatttcgttgtccggcactttaaaatgagttcgcctaccgatgccagtgtcatctgtcgatttaaagactctattcagacgctgggacacgttgacagcagcggtcaggtgcactgcgtaagccccctgttgtacgagtccggtcgaattcctttcaccgtctctctggataatggacattcctttcctagagccggaacctggttagccgtccaccccaataaagtgagtatgatggagaagagcgagctggtgaacgaaacgcgctggcagtactacggcactgcaaatacttctggcaacctttccctcacctggcatgttaaatccctgccaacacagacaataactattgaactgtggggatatgaagagacgggaatgccttattcacaagaatggaccgcaaaatggtcgtatctgtaccctctagccactcacattcccaacagcggttcttttacgttcacccccaagccagctccaccatcttaccagagatggagggtcggggctctgcgaatcatcgatagcaaaaactatgccggtcagaaagacgtccaggctctttggaccaatgaccacgctttagcctggcacctgagtgacgatttcagagaggacccagtggcatgggcccgtacccagtgccaggcttgggaagagcttgaagatcaattaccgaatttcctggaagagttacctgattgtccgtgcacactgacccaggctcgagcagatagcggccgttttttcaccgattacggttgtgacatggagcagggatcagtgtgcacttaccatccaggagccgtgcactgcgtaagaagtgtccaggcgtcactgcgatatggctctggacagcagtgctgttacactgcggatgggactcagctcctgaccgctgattctagcggcggaagcactcccgatagagggcacgattggggggctccaccatttcgcactccgccaagggtgccctccatgtcccattggttatacgatgtgctttcattttactattgctgcctttgggctcccgattgcccaaggtacatgcaaaggagaccctccaatgactgtcggaattatcgcccaccacggctggcatccgcattcggggatcctcacttcgtcacctttgatggtactaatttcacgttcaacggacgcggagagtatgtcctgcttgaagccgcacttacagatctccgagtacaggccagagcccagcccggaacgatgagtaatgggacagagacaagaggcaccggactcacagccgttgccgttcaggaaggcaatagcgatgtcgtggaagtgcgactagccaaccgaaccgggggacttgaggtgctcctgaatcaagaggttttatctttcacggagcagtcgtggatggacctcaagggcatgttcctttctgtcgcagccggagatagggtttcgatcatgcttgcttccggtgcgggtttagaggtgtctgtccagggccctttcctatccgtgagcgtgctgctgcccgagaaatttctgacccacactcatggccttctgggtacccttaacaatgatccaaccgatgatttcaccctgcactctggccgtgtgctgccaccagggacgtctccccaggagctcttcctgttcggcgcaaattggacggtgcacaacgctagctcactcctgacatatgactcatggtttctcgtgcataattttctgtaccagcctaagcatgatcccaccttcgaacctctctttccatcagagaccaccctgaacccgtccttggctcaggaggctgccaaactgtgcggagacgaccacttttgtaacttcgacgtcgccgctacaggtagtctgtccaccggcaccgccacacgcgttgctcatcagcttcatcaaagacggatgcagtcccttcagccagtcgttagctgcggatggctagccccaccccctaacggtcaaaaagagggaaatcgctacctggccggtagcacaatttacttccactgcgacaacggatattccctggcaggtgctgaaactagcacttgccaggcggatggaacttggtcaagtcctacccctaagtgccagccagggagatcctatgccgtactgctaggaatcatttttggaggacttgctgtcgtcgcagcagtagctttggtgtatgtcctgctgagaagacggaagggaaatacgcatgtgtggggagctcaaccttag

SEQ ID NO: 201942 - DNA, 3404 bp, Artificial Sequence
  derived and/or modified sequence
ctcctcaccctcccacagggtcccagggccgatccaggcctgcgggccaggaatgtgctaacggggcaacttgggccttgctggtccacgcaggcacctgtggactttgagaggggactgggtggggaggggcggggaggggcggggcggggcggtgccgcagagtgcagggcgggcggggccaggccagcagggagtgagcttgtctggccgcctcgcctcggagccactgcactgctggctgcagacacaggctgcaccatgaagccagccctcctgccctgggccctgctgctgctggcgacagccctcggcccgggccccggacccacagcagatgcccaagagagctgctccatgcgctgtggcgccctggacgggccatgttcctgccacccgacgtgctctggccttggcacctgctgcttggatttccgggacttctgcctggagatattgccctactcaggatccatgatgggcggcaaggactttgtggtgcggcacttcaagatgtccagccccacagacgccagtgtgatctgcaggtttaaggacagcatccagaccctcggccatgtggactcctccgggcaagtgcactgtgtgtcacctctgctctatgagagcggccgcatccccttcactgtgtcactggacaacggccactccttccctcgtgcgggcacctggctggctgtgcaccccaacaaagtgtcaatgatggagaagagcgagttggtgaacgagacgcgttggcaatactacggcaccgccaacacctcaggcaacctcagcctgacctggcatgtcaagtcgctgcccacgcagaccatcaccatcgaactgtggggctacgaggagacaggaatgccctactcacaggagtggactgcaaagtggtcgtacctgtaccccctggccacacacatccccaactccggctctttcactttcaccccaaaacctgctcctcccagctaccagagatggcgagtgggtgcacttcggatcatcgacagcaaaaattacgcagggcagaaggacgtgcaggcgctctggaccaacgaccacgcactggcctggcacctgagcgatgacttccgagaggaccctgtggcctgggcacgaactcagtgccaggcctgggaggagctggaggatcagctgcccaacttcctggaggagctgccggactgcccctgcaccctgacccaggcccgggctgactccggccgcttcttcacggactacggctgtgacatggagcagggcagcgtgtgcacctaccaccccggggccgtgcactgtgtgcgttctgtgcaggccagcctccggtacggctcaggtcagcagtgctgctacacagcggacgggacgcagctcctgacagctgactccagcggcggcagcactcccgaccgcggccatgactggggcgcacccccgttccgcacgccaccccgagtgcccagcatgtcccactggctctacgatgtcctcagcttctattactgctgcctctgggcacccgactgcccccgctacatgcaacggcggccctccaatgactgccgcaactaccggcccccaagactggcctccgccttcggagacccacactttgtgaccttcgacggcaccaacttcacattcaatgggcgcggagagtacgtgctgctggaggcagcgctgaccgacctgagggtgcaggcgcgggcccagcccgggacgatgtccaacggcacggagacccgtggcactgggctgaccgcagtggccgtccaggagggcaactcagatgtggtggaagtcaggctggccaacaggaccggaggtctggaggtgctgctgaaccaggaggtgctgagcttcaccgagcagagctggatggacctgaaaggaatgttcctgtcggtggctgccggggacagggtctccatcatgctggcatcaggggccggcctggaggtcagcgtgcagggcccgttcctgagtgtgtccgtcctgctgcctgagaagttcctcacccacacccacggcctcctcgggacactcaacaacgaccccaccgacgacttcaccctgcacagcgggcgcgtcctgcccccaggcaccagtccccaggagctgttcctgtttggggccaactggaccgtgcacaatgcgtcctccctgctcacctacgattcctggttcctggtccacaacttcctgtaccaacccaagcacgaccccaccttcgagcccctcttccccagtgagaccaccctcaaccccagcctggcacaagaggcagccaaactatgtggggacgatcatttctgcaactttgatgtggcagccactgggagcctgagcacgggcactgccactcgggtggcccaccagctgcaccagcgtcgcatgcagagcctgcagccagtggtgtcctgtggctggctggccccacctcccaacggacaaaaggagggcaacaggtacctggcgggttccaccatctacttccactgtgacaacggctacagcctggccggggcagagaccagcacctgccaggctgacggcacctggtcctcacccaccccgaagtgccagccaggacgcagctacgcggtgctgttgggcatcatctttgggggcctcgcggtggtggcggcggttgcgctcgtctatgtgctgctgcgccgcaggaagggcaacacgcacgtctggggtgcacagccctgatgggagcagcttggctgtgagcaccaggccaagactcctgagaacaggcagcccagtcctgcgactcccgcatccccaggaccagacacctgggacctggatacttgatacctgggcatttaaccccctactctgtcatctcagaccccaggcaggaggcccagtgttccaacacccaagccccgtgctagcagcgctccgtgctcttccccaaatactcacggctctaattccccaaacctgaaacttcataccctgggattctaatacctatgtcctgagccctgacactcccacacctgagcctcagattccaatagctcactccctagagcctgacgccggggcccctgacccctgagcctcagattccaatacctcactccccagagcctgatgccggggcccctgacccctgatctacggaggcctgctcccggaccgtgcgggcaccagtgcagtgctgccttggttcctggacccctgggcccatcctgggaccccagatggggtaaggagaggccccagaaccccaaagcagacagcgagacccccagcggcagaggcctccctcggcactccaggcttataatttcgaactcttctggaaggtcactcaggaacaccctccctgcctgtgcaaagagaaaacaagcgccttgtttccttccctg

SEQ ID NO: 201943 - protein, 393 aa, Artificial Sequence
  derived and/or modified sequence
MWWRVLSLLAWFPLQEASLTNHTETITVEEGQTLTLKCVTSLRKNSSLQWLTPSGFTIFLNEYPALKNSKYQLLHHSANQLSITVPNVTLQDEGVYKCLHYSDSVSTKEVKVIVLATPFKPILEASVIRKQNGEEHVVLMCSTMRSKPPPQITWLLGNSMEVSGGTLHEFETDGKKCNTTSTLIIHTYGKNSTVDCIIRHRGLQGRKLVAPFRFEDLVTDEETASDALERNSLSSQDPQQPTSTVSVTEDSSTSEIDKEEKEQTTQDPDLTTEANPQYLGLARKKSGILLLTLVSFLIFILFIIVQLFIMKLRKAHVIWKKENEVSEHTLESYRSRSNNEETSSEEKNGQSSHPMRCMNYITKLYSEAKTKRKENVQHSKLEEKHIQVPESIV

SEQ ID NO: 201944 - DNA, 1182 bp, Artificial Sequence
  derived and/or modified sequence
atgtggtggagagtgctgagcctgctggcctggttccccctgcaggaggccagcctgaccaaccacaccgagaccatcaccgtggaggagggccagaccctgaccctgaagtgcgtgaccagcctgagaaagaacagcagcctgcagtggctgacccccagcggcttcaccatcttcctgaacgagtaccccgccctgaagaacagcaagtaccagctgctgcaccacagcgccaaccagctgagcatcaccgtgcccaacgtgaccctgcaggacgagggcgtgtacaagtgcctgcactacagcgacagcgtgagcaccaaggaggtgaaggtgatcgtgctggccacccccttcaagcccatcctggaggccagcgtgatcagaaagcagaacggcgaggagcacgtggtgctgatgtgcagcaccatgagaagcaagccccccccccagatcacctggctgctgggcaacagcatggaggtgagcggcggcaccctgcacgagttcgagaccgacggcaagaagtgcaacaccaccagcaccctgatcatccacacctacggcaagaacagcaccgtggactgcatcatcagacacagaggcctgcagggcagaaagctggtggcccccttcagattcgaggacctggtgaccgacgaggagaccgccagcgacgccctggagagaaacagcctgagcagccaggacccccagcagcccaccagcaccgtgagcgtgaccgaggacagcagcaccagcgagatcgacaaggaggagaaggagcagaccacccaggaccccgacctgaccaccgaggccaacccccagtacctgggcctggccagaaagaagagcggcatcctgctgctgaccctggtgagcttcctgatcttcatcctgttcatcatcgtgcagctgttcatcatgaagctgagaaaggcccacgtgatctggaagaaggagaacgaggtgagcgagcacaccctggagagctacagaagcagaagcaacaacgaggagaccagcagcgaggagaagaacggccagagcagccaccccatgagatgcatgaactacatcaccaagctgtacagcgaggccaagaccaagagaaaggagaacgtgcagcacagcaagctggaggagaagcacatccaggtgcccgagagcatcgtgtag

SEQ ID NO: 201945 - DNA, 1182 bp, Artificial Sequence
  derived and/or modified sequence
atgtggtggagagtgttatctctattagcctggttcccactacaggaagcgagcctgactaaccataccgagaccattactgtggaggagggccagaccctgaccctcaagtgcgtgacttctctgcgtaagaacagttcgctgcagtggctcacccccagcggcttcaccatcttcctgaacgagtaccccgcccttaagaactccaagtaccaactgctccaccatagtgcgaaccagctctcgattacagtccccaatgttaccctccaggatgagggcgtttacaaatgcctgcactacagtgattccgtgtcaacgaaggaggtgaaggttatcgtgttagcgacaccctttaaaccgatcctggaggcttccgtaattcggaagcagaatggggaagaacacgtagtgttaatgtgctccactatgagatctaaacctccacctcagataacttggttgctgggaaacagtatggaggtatccggcggaacactccatgagtttgaaaccgatggaaagaaatgtaatacaacatccacgctaatcattcacacatatggcaagaactccaccgtcgattgcattatccgacaccgggggcttcaaggacgcaaacttgtggccccattcaggttcgaggacctggtgacagacgaggagacagcctcagacgccttggaacgaaactctttgtccagtcaggaccctcagcagcctacaagcaccgtctccgttacggaagactccagcacttctgagattgataaagaggaaaaggaacagactactcaggatcccgacctgaccacagaagccaatcctcagtatcttggtcttgctaggaaaaaaagtgggattctccttttgacacttgtgtcttttctcatattcatcttattcatcatagttcaattgttcattatgaaactgagaaaggcccacgttatttggaagaaagagaacgaggtgtctgaacacaccttagagagctatcgctcacggtcgaataatgaggaaacttcatctgaagaaaagaacggacagagcagccatcccatgcgctgcatgaactatataacaaagttgtattctgaagccaagacaaagcggaaggagaacgtgcaacatagtaaactcgaagaaaaacacatccaggtgcccgagagcatcgtgtag

SEQ ID NO: 201946 - DNA, 1182 bp, Artificial Sequence
  derived and/or modified sequence
atgtggtggagggtgctgagcctgctggcctggttccccctgcaggaggccagcctgaccaaccacacagagaccatcaccgtggaggagggccagaccctgaccctgaagtgtgtgaccagcctgaggaagaacagcagcctgcagtggctgacccccagcggcttcaccatcttcctgaatgagtacccagccctgaagaacagcaagtaccagctgctgcaccacagcgccaaccagctgagcatcaccgtgcccaacgtgaccctgcaggatgagggcgtgtacaagtgcctgcactacagcgacagcgtgtccaccaaggaggtgaaggtgattgtgctggccacccccttcaagcccatcctggaggccagcgtcatcaggaagcagaatggagaggagcacgtggtgctgatgtgcagcaccatgaggagcaagcccccaccccagatcacctggctgctgggcaacagcatggaggtgtctgggggcaccctgcacgagtttgaaacagatggcaagaagtgcaacaccaccagcaccctcatcatccacacctacggcaagaacagcacagtggactgcatcatccgccaccggggcctgcagggcaggaagctggtggcccccttccgctttgaggacctggtgacagatgaggagacagccagtgatgccctggagaggaacagcctgagcagccaggacccccagcagcccaccagcacagtgtctgtgacagaggacagcagcaccagcgagattgacaaggaggagaaggagcagaccacccaggaccctgacctgaccacagaggccaacccccagtacctgggcctggccaggaagaagagcggcatcctgctgctgaccctggtgtccttcctgatcttcatcctcttcatcatcgtgcagctgttcatcatgaagctgaggaaggcccacgtgatctggaagaaggaaaatgaggtgtctgagcacaccctggagagctaccgcagccgcagcaacaatgaggagaccagcagcgaggagaagaatggccagagcagccaccccatgcgctgcatgaactacatcaccaagctgtacagcgaggccaagaccaagaggaaagaaaatgtgcagcacagcaagctggaggagaagcacatccaggtgcctgagagcatcgtgtag

SEQ ID NO: 201947 - DNA, 1182 bp, Artificial Sequence
  derived and/or modified sequence
atgtggtggcgggtgctgagcctgctggcctggttccccctgcaggaggcttccctgaccaaccataccgagacaattactgtagaggagggccagacactgactctgaagtgtgtcacatccttgcgcaaaaattctagcctgcagtggctgactccctcggggttcacgatttttctgaatgagtatcccgctttgaagaacagcaagtatcagctgctgcaccactccgctaaccagctgtcgataaccgtgcctaacgttaccttacaggacgaaggcgtgtataaatgcctgcactacagcgacagcgtgtctactaaagaagtgaaagtgattgtactcgccactcccttcaagccgattcttgaagcctctgtcatccgcaagcagaacggcgaagagcacgtcgtcctcatgtgctctacaatgcggtccaagcctccaccacagatcacctggctcttgggaaacagtatggaagtatccggtgggacactgcacgaattcgaaactgacgggaaaaaatgtaacaccacttcaactctgattattcatacatacgggaaaaactctacagtggattgcattattaggcacagaggactgcaaggtaggaaattggttgctcccttcagattcgaggacctagtgaccgacgaagaaacagcttcggatgctctcgaacggaatagcttgtccagccaggacccccagcaaccgacaagtacggtgtccgtgactgaagatagctctaccagtgaaatcgataaggaggagaaggaacagacaactcaagacccagacctaacaactgaggccaatcctcagtacttagggctggccaggaagaagtccgggatcctcctgctgaccttggtatcattcctaatctttatcctctttattattgtccaactatttattatgaaacttcggaaagctcacgttatatggaaaaaggagaacgaggtttctgagcacacactcgagtcttaccgctcacgatccaacaacgaggagacatcaagcgaagaaaaaaacggacaatccagccaccccatgcgatgtatgaactatattacgaaactttattctgaggcgaaaaccaagaggaaggaaaacgtgcagcactcaaagctggaggaaaaacacatccaggtgcctgagtcaatcgtatag

SEQ ID NO: 201948 - DNA, 1182 bp, Artificial Sequence
  derived and/or modified sequence
atgtggtggagagtgctgagcctgctggcctggttcccgttgcaggaagcatcactgacaaaccacactgaaacaatcaccgttgaggagggacagacgctgactctgaaatgtgtgaccagcctgagaaagaactcatctcttcagtggctgaccccttccggcttcaccatctttctaaatgaataccccgctctgaaaaactccaagtaccagctcctccaccacagcgccaatcagctgagtatcactgtgcccaacgtgactctgcaagatgaaggagtgtacaaatgtcttcactattctgattcagtaagcacgaaagaggtcaaagttatcgttctggccacaccattcaagcctattctggaggcttcggtcatccgaaagcagaacggggaggagcacgtcgttctcatgtgtagtaccatgcggagtaagccccctccgcaaatcacctggcttttgggcaacagcatggaagtcagcggtgggaccttgcatgaattcgaaactgacggaaaaaagtgcaacacgacgtcgaccctcataattcatacctacggcaagaactcaaccgtggactgtattatacggcaccgcggacttcaggggagaaaactggttgccccattcaggttcgaagaccttgtgacagatgaggagacggccagtgatgcccttgaacgtaactctcttagttctcaggatccacagcagccgactagcactgttagcgtgactgaggacagctcaacttctgaaatagacaaggaagagaaagaacagactacccaggaccctgacctcaccacagaggcaaatccccaataccttgggctggcccgtaaaaagtcaggaatcctcctgctgactctggtgtccttcctgattttcattctctttattattgtgcagctgtttatcatgaagttgaggaaggcgcacgtaatttggaagaaagagaatgaagtgtctgaacataccctggaatcctatcgcagccgttccaacaacgaagaaacctcctctgaggaaaaaaatggtcagtcttcccacccaatgaggtgtatgaactatattactaagttgtacagtgaggccaaaaccaaacgcaaagagaacgtacagcatagcaagctggaagagaaacatatccaggtgcccgagtctatagtgtag

SEQ ID NO: 201949 - DNA, 2469 bp, Artificial Sequence
  derived and/or modified sequence
agaatctagaggaagttgacaaaggtgccacagcagcacagcacagtatgtggtggagagttctcagcttgctggcatggttccccttgcaagaggcctctctgactaaccacacagaaaccatcaccgtggaggaaggccagacgctcactctaaagtgtgtcacttctctgaggaagaactcctccctccagtggctgaccccctcagggttcaccatttttttaaatgagtatcctgctttaaaaaattccaaataccagcttcttcatcactcggccaatcagctctccatcactgtgcctaacgtaaccctgcaagatgaaggcgtgtacaagtgcttacattacagcgactctgtaagcacaaaggaagtgaaagtgattgtgctggcaactcctttcaagccaatcctggaagcttcagttatcagaaagcaaaatggagaagaacatgttgtactcatgtgctccaccatgagaagcaagccccctccgcagataacctggctacttgggaatagcatggaagtgtccggtggaacgctccatgaatttgaaactgatgggaagaaatgtaatactaccagcactctcataatccacacttatggcaaaaattcaacggtggactgcattatccgacacagaggcctgcaagggagaaaactagtagcacccttccggtttgaagatttggttactgatgaagagacagcttcagatgctctggagagaaactctctatcctctcaagacccacagcagcccaccagtactgtctcagtaacggaagattctagtacatcggagattgacaaggaagagaaagaacaaaccactcaagatcctgacttgaccaccgaagcaaatcctcagtatttaggactggcaagaaagaaaagtggcatcctgctgctcacgctggtgtccttcctcattttcatactcttcatcatagtccagctcttcatcatgaagctgaggaaagcacatgtgatatggaagaaagaaaacgaagtttcagaacacacactagaaagttacagatcaaggtcaaataatgaagaaacatcatctgaagagaaaaatggccaatcttcccaccctatgcgttgcatgaactacatcacaaagttgtactcagaagcaaaaacaaagaggaaggaaaatgtacaacattcaaaattagaagaaaagcacatccaagtaccagagagtattgtgtagtgctctctgcaatggaacatgtgatttcagggttgccgcagtgtcacctcagtggaccagcctgggggaaggagcttaattgctgagacattaataatgacctcttagtgcaatgcaagatggtgtcctcggataatgatctgccccggagctagggcagcaacatgaggaccaaaccatgcacataaagcttgtagtttaaaaaagaaaagcaaaaaaataattatgcctgacactacttcagagcaggaggattctacgaagccttggggatcagggtcagtgtgagcagctaacatcctacctcaaatggaacaggattttttgatgctttgctctaatggaactgtttaaaaaatttttttttctttttaatattttcttctggtcacaaaataaagaaatttgggatgcaaagtacctaaagatctctgatcctaagaagttacttctggccaggcgcggtggctcatgcctgtaatcctagcactttgggaggctgaggtaggcagatcacttgaggtcaggagttggagaccagcctggccaacatagtgaaaccccgtctctactaaaaatgcaaaaattagccaggcgtagtggtgcgcacctgtagtctcagatacttgggaggctgagggtggagaatcgcttgaacctgggaggtggagattgcagtgagtcaagatctcaccactgcactccagcctgggcaacagagggagactctgtctcaaaaaaaaagaagttacttccaagacagacttttaagatgtaaccagcacaaagcaatgtcagggaggagtgatacatgacaataaatgagtcagatgagcaagaaggccccagaacccatgccccaaggcacaaagaggagctcagggtaggcccaaagattcgaattccttagattactaaatcacatgagcggaccttgtctgtcagataagatttttacctggaaattccatgaccaatacatgtgcaaaagaaaatgatgggttgaatttactgattattgacctaatggatggctttttaaaatgttttaataaaaagcagaatagatgtttgtttttctagtggttataccaagttatacttcctgttttcacgtgtgaaagtaacatgggacatgcctttcttttccgatcagtttatttaagctatacagcaaactttggcatttatgtggagcatttctcattgttggaatctgaataaaccaattacaaaataa

SEQ ID NO: 201950 - protein, 344 aa, Artificial Sequence
  derived and/or modified sequence
MNLLPCNPHGNGLLYAGFNQDHGCFACGMENGFRVYNTDPLKEKEKQEFLEGGVGHVEMLFRCNYLALVGGGKKPKYPPNKVMIWDDLKKKTVIEIEFSTEVKAVKLRRDRIVVVLDSMIKVFTFTHNPHQLHVFETCYNPKGLCVLCPNSNNSLLAFPGTHTGHVQLVDLASTEKPPVDIPAHEGVLSCIALNLQGTRIATASEKGTLIRIFDTSSGHLIQELRRGSQAANIYCINFNQDASLICVSSDHGTVHIFAAEDPKRNKQSSLASASFLPKYFSSKWSFSKFQVPSGSPCICAFGTEPNAVIAICADGSYYKFLFNPKGECIRDVYAQFLEMTDDKL

SEQ ID NO: 201951 - protein, 316 aa, Artificial Sequence
  derived and/or modified sequence
MENGFRVYNTDPLKEKEKQEFLEGGVGHVEMLFRCNYLALVGGGKKPKYPPNKVMIWDDLKKKTVIEIEFSTEVKAVKLRRDRIVVVLDSMIKVFTFTHNPHQLHVFETCYNPKGLCVLCPNSNNSLLAFPGTHTGHVQLVDLASTEKPPVDIPAHEGVLSCIALNLQGTRIATASEKGTLIRIFDTSSGHLIQELRRGSQAANIYCINFNQDASLICVSSDHGTVHIFAAEDPKRNKQSSLASASFLPKYFSSKWSFSKFQVPSGSPCICAFGTEPNAVIAICADGSYYKFLFNPKGECIRDVYAQFLEMTDDKL

SEQ ID NO: 201952 - DNA, 2596 bp, Artificial Sequence
  derived and/or modified sequence
gtggggcgcgggcgcgcgcacggacgtccagcacgcacgcacgcacgtccagcacacacgcacatccagcacgcacgcacgtacgtccggcacttccggccgcggcggcctcagcgccggcccgaagggaccaggccgccgtccccagcgagaggcatgcagcgctgaggagcggcgacccagcacggcggcgccatgaacctcctgccgtgtaaccctcacggcaacgggctgctctacgccggcttcaaccaggaccacggatgctttgcgtgtgggatggaaaatggattccgagtctataacactgatccactaaaagaaaaagagaaacaagaatttctagaaggaggagttggccatgttgaaatgttatttcgctgcaactatttagctttagttggtggtggaaaaaagccgaaataccctcccaacaaagtaatgatctgggatgacctgaagaagaagactgttattgaaatagaattttctacagaagtcaaggcagtcaagctgcggcgagatagaattgtggtggttttggactccatgattaaggtgttcacattcacacacaatccccatcagttgcacgtcttcgaaacctgctataaccccaaaggcctctgtgtcctttgtcccaatagtaacaactccctcctggcctttccgggcacgcacacgggccatgtgcagcttgtggacctggccagcacggagaagccacccgtggacattcctgcacacgagggtgtcctgagctgcattgcactcaacctgcagggaacaagaattgcaactgcatccgagaaagggacgcttataagaatatttgatacttcatcagggcatttaatccaggaactgcgaagaggatctcaagcagccaatatttactgcatcaacttcaatcaggatgcgtccctcatctgcgtatccagcgaccacggcacagtgcatatttttgcagctgaagatccaaaaaggaataaacagtccagtttggcctcagccagtttccttccaaaatacttcagttccaagtggagtttctccaagtttcaggttccctcaggctctccgtgcatttgtgcctttggaacagagccaaacgccgtcattgcaatttgtgcagacggcagctactacaaattcctgttcaaccccaagggggagtgcatccgagatgtctacgcgcagtttctagagatgaccgatgacaagctgtgactccagctgggggcgccacagcacccaccacctgccgccttcagactctcggggctggtgccagtgccccaggggcctcctgggccacgggctggaggggctgcccagggaccttggtctcgaagccatacgtggttgtctgctttcctaaggactcccatttccagtattaaagagagaatcatcatcaaggcaccgtaggtaactcagtggctgtgaccagctcgactggcggccactggctgttcccatgagttcagctgtgacgttagcttcagtggctccgccgcatcctcacactgacgggggctccatacggacctggggactgggctgagagggtggacgagttcaggtttgtttttgcagcagattccgtcgttcttactgagtctgcagcgggggagtgaacaagtgtgcagatgtaagttcttacatgataagcagattgaatacaacaccagcagcttgccttagaaaaggagaaaggaattccttttcccgcccgaacatgaagaaaaatgacctgaccctgtagagagaacacagtgtgaatgtttcccctcgtgtgagcccagcctgtggtcttctccgtacccgcaacgtggtcatctgtgcccgtgacgtcacctgtgcccgtgcgtggcgtccccgtctccgttggggccattagaatgaggcagacaccaggccactctagaagccgagccgtcacacctcaggcgtgtgcggggcggggacggggggtctcctggttacattttggattaaacctgtttcccggttatgtgtagggaacagcagagtgatgcacgaactttgaacattcgttatggggaaaacatcctttaacttcggggtcgtctgccagagcagggtctgggagggtccatgcagttcccgctggtgtggagggaaatgccctggtctggcctccgagcccccaggtccaccgtctcccctcccctcatttgtaagaatagctacacactaacattttgggaaggagaggcacataactttttttaacatttggtaactaggttatgggctctacattgtcagctacttgggatatatatttaattttcttaaattcccgttaaactctattttatggttttgatttcagattgcaaacatgtaaaacctgcatagcagcgagttctcggttttgccggtttctttagttctttactgtcactgtcatgtaatcagctaattctctgtggatgttgctgtaaagtatgcatgttcctttcatgtgtatttaatcatgatgtttaattttgcacacttatttgtaatgtttcttttaaataaaagtgactaattttgttgtagtctggacctgtaaaaaaaaaaa

SEQ ID NO: 201953 - DNA, 1035 bp, Artificial Sequence
  derived and/or modified sequence
atgaacctgctgccctgcaacccccacggcaacggcctgctgtacgccggcttcaaccaggaccacggctgcttcgcctgcggcatggagaacggcttcagagtgtacaacaccgaccccctgaaggagaaggagaagcaggagttcctggagggcggcgtgggccacgtggagatgctgttcagatgcaactacctggccctggtgggcggcggcaagaagcccaagtacccccccaacaaggtgatgatctgggacgacctgaagaagaagaccgtgatcgagatcgagttcagcaccgaggtgaaggccgtgaagctgagaagagacagaatcgtggtggtgctggacagcatgatcaaggtgttcaccttcacccacaacccccaccagctgcacgtgttcgagacctgctacaaccccaagggcctgtgcgtgctgtgccccaacagcaacaacagcctgctggccttccccggcacccacaccggccacgtgcagctggtggacctggccagcaccgagaagccccccgtggacatccccgcccacgagggcgtgctgagctgcatcgccctgaacctgcagggcaccagaatcgccaccgccagcgagaagggcaccctgatcagaatcttcgacaccagcagcggccacctgatccaggagctgagaagaggcagccaggccgccaacatctactgcatcaacttcaaccaggacgccagcctgatctgcgtgagcagcgaccacggcaccgtgcacatcttcgccgccgaggaccccaagagaaacaagcagagcagcctggccagcgccagcttcctgcccaagtacttcagcagcaagtggagcttcagcaagttccaggtgcccagcggcagcccctgcatctgcgccttcggcaccgagcccaacgccgtgatcgccatctgcgccgacggcagctactacaagttcctgttcaaccccaagggcgagtgcatcagagacgtgtacgcccagttcctggagatgaccgacgacaagctgtag

SEQ ID NO: 201954 - DNA, 951 bp, Artificial Sequence
  derived and/or modified sequence
atggagaacggcttcagagtgtacaacaccgaccccctgaaggagaaggagaagcaggagttcctggagggcggcgtgggccacgtggagatgctgttcagatgcaactacctggccctggtgggcggcggcaagaagcccaagtacccccccaacaaggtgatgatctgggacgacctgaagaagaagaccgtgatcgagatcgagttcagcaccgaggtgaaggccgtgaagctgagaagagacagaatcgtggtggtgctggacagcatgatcaaggtgttcaccttcacccacaacccccaccagctgcacgtgttcgagacctgctacaaccccaagggcctgtgcgtgctgtgccccaacagcaacaacagcctgctggccttccccggcacccacaccggccacgtgcagctggtggacctggccagcaccgagaagccccccgtggacatccccgcccacgagggcgtgctgagctgcatcgccctgaacctgcagggcaccagaatcgccaccgccagcgagaagggcaccctgatcagaatcttcgacaccagcagcggccacctgatccaggagctgagaagaggcagccaggccgccaacatctactgcatcaacttcaaccaggacgccagcctgatctgcgtgagcagcgaccacggcaccgtgcacatcttcgccgccgaggaccccaagagaaacaagcagagcagcctggccagcgccagcttcctgcccaagtacttcagcagcaagtggagcttcagcaagttccaggtgcccagcggcagcccctgcatctgcgccttcggcaccgagcccaacgccgtgatcgccatctgcgccgacggcagctactacaagttcctgttcaaccccaagggcgagtgcatcagagacgtgtacgcccagttcctggagatgaccgacgacaagctgtag

SEQ ID NO: 201955 - DNA, 1035 bp, Artificial Sequence
  derived and/or modified sequence
atgaatctgctcccatgtaatcctcacggtaacgggctgttatatgccggatttaatcaggaccacggatgctttgcgtgcggtatggagaatggcttccgagtttataatactgaccctctgaaggaaaaggagaaacaggaattcctagaaggaggagtagggcacgtggagatgctgtttcgatgcaactatctcgctctggtgggtggcggcaaaaagccaaaatacccccccaacaaggtcatgatctgggacgatctcaaaaagaagacagtcatcgagattgaattcagcaccgaagtcaaggccgtcaagctgcgacgggaccgcatcgtggtggtacttgatagcatgataaaggtcttcactttcacacacaacccccatcaattacacgtctttgagacttgctataatccaaaaggactctgcgtgctttgccccaatagtaacaatagtctgttggcctttccaggcactcacacagggcacgttcagctggtagatctagcaagtacagaaaagcctcctgtcgacattcccgcacacgaaggtgtcctgtcctgcatcgctctcaatcttcagggcacacgtatcgctactgcttcagaaaagggaactctcatcaggatcttcgatacatcctctggtcacctcatccaagagctaaggcgtggatcacaggctgcaaatatatactgcatcaactttaatcaggatgcctcactgatatgtgttagttctgaccacggcaccgtgcacattttcgccgccgaggacccgaaacgtaataaacagtcgagcctggcatccgccagctttctccctaagtatttctcttctaaatggtcgttttcaaagtttcaagtaccttctggaagcccatgtatctgcgcatttggaaccgagcctaacgccgtgatcgccatctgcgccgatggttcttactacaagttcttgttcaatccgaaaggagagtgcatcagagacgtctatgcacagtttcttgagatgactgacgacaagctttag

SEQ ID NO: 201956 - DNA, 951 bp, Artificial Sequence
  derived and/or modified sequence
atggaaaacggtttccgcgtctataacaccgatcctctgaaggaaaaggagaagcaagagtttctcgaaggcggggtcggccacgtggagatgctgttcagatgcaactacctggccctcgttggaggaggcaaaaaacctaagtatccccccaacaaagttatgatctgggacgaccttaagaaaaaaaccgtgatagaaatcgagttttccacagaggtgaaagccgtaaagttgcgacgagaccgtattgtggtggtgcttgattccatgattaaagtttttacatttacccacaacccgcaccaactgcacgtgtttgagacatgctacaatcccaaggggctgtgcgtcctctgtcccaatagcaacaattccctcctggcattcccagggacccacacgggccacgttcagctcgtcgatttagcatcaacagaaaaaccacccgttgacattcccgcccacgagggggtgctctcgtgtattgctctgaatctgcagggaactcggatagccacagcttccgaaaagggtaccctaattcgtattttcgacacctcatccggacaccttatccaagagttgagaaggggctcccaggccgcaaatatttattgtatcaatttcaaccaggacgcgagccttatctgtgtgtcatcagaccatggtacagtgcacatcttcgccgctgaggacccaaagagaaataagcagtccagcttagcaagcgccagcttcttgcctaaatacttctctagtaaatggtcttttagtaagtttcaggtgccctcaggatcaccctgcatctgcgccttcggcactgaacccaacgcggttattgcgatctgcgccgatggctcgtattacaagtttctgttcaatccaaaaggggaatgcattagagatgtgtacgctcagtttctggagatgacagatgacaagctgtag

SEQ ID NO: 201957 - DNA, 1035 bp, Artificial Sequence
  derived and/or modified sequence
atgaacctgctgccctgcaacccccatggaaatggcctgctgtatgccggcttcaaccaggaccacggctgctttgcctgtggcatggagaatggcttccgggtgtacaacacagaccccctgaaggagaaggagaagcaggagttcctggagggcggcgtgggccacgtggagatgctgttccgctgcaactacctggccctggtgggcggcggcaagaagcccaagtacccacccaacaaggtgatgatctgggatgacctgaagaagaagacagtcatcgagattgagttcagcacagaggtgaaggctgtgaagctgcggcgggaccgcatcgtggtggtgctggacagcatgatcaaggtgttcaccttcacccacaacccccaccagctgcacgtgtttgagacctgctacaaccccaagggcctgtgtgtgctgtgccccaacagcaacaacagcctgctggccttccctggcacccacactggacatgtgcagctggtggacctggccagcacagagaagccccctgtggacatcccagcccacgagggcgtgctgagctgcatcgccctgaacctgcagggcacccgcatcgccacagccagcgagaagggcaccctcatccgcatctttgacaccagcagcggccacctgatccaggagctgcggcggggcagccaggccgccaacatctactgcatcaacttcaaccaggatgccagcctcatctgtgtgtccagtgaccatggaacagtgcacatctttgctgctgaggaccccaagaggaacaagcagagcagcctggccagcgccagcttcctgcccaagtacttcagcagcaagtggagcttcagcaagttccaggtgcccagcggcagcccctgcatctgtgcctttggaacagagcccaatgctgtgattgccatctgtgctgatggcagctactacaagttcctgttcaaccccaagggggagtgcatcagagatgtgtatgcccagttcctggagatgacagatgacaagctgtag

SEQ ID NO: 201958 - DNA, 951 bp, Artificial Sequence
  derived and/or modified sequence
atggagaatggcttccgggtgtacaacacagaccccctgaaggagaaggagaagcaggagttcctggagggcggcgtgggccacgtggagatgctgttccgctgcaactacctggccctggtgggcggcggcaagaagcccaagtacccacccaacaaggtgatgatctgggatgacctgaagaagaagacagtcatcgagattgagttcagcacagaggtgaaggctgtgaagctgcggcgggaccgcatcgtggtggtgctggacagcatgatcaaggtgttcaccttcacccacaacccccaccagctgcacgtgtttgagacctgctacaaccccaagggcctgtgtgtgctgtgccccaacagcaacaacagcctgctggccttccctggcacccacactggacatgtgcagctggtggacctggccagcacagagaagccccctgtggacatcccagcccacgagggcgtgctgagctgcatcgccctgaacctgcagggcacccgcatcgccacagccagcgagaagggcaccctcatccgcatctttgacaccagcagcggccacctgatccaggagctgcggcggggcagccaggccgccaacatctactgcatcaacttcaaccaggatgccagcctcatctgtgtgtccagtgaccatggaacagtgcacatctttgctgctgaggaccccaagaggaacaagcagagcagcctggccagcgccagcttcctgcccaagtacttcagcagcaagtggagcttcagcaagttccaggtgcccagcggcagcccctgcatctgtgcctttggaacagagcccaatgctgtgattgccatctgtgctgatggcagctactacaagttcctgttcaaccccaagggggagtgcatcagagatgtgtatgcccagttcctggagatgacagatgacaagctgtag

SEQ ID NO: 201959 - DNA, 1035 bp, Artificial Sequence
  derived and/or modified sequence
atgaacctgctgccctgcaacccccacggcaacggcctgctgtacgcaggattcaaccaagaccacggatgttttgcctgtggcatggagaacggattccgggtctacaacacagaccccttgaaagagaaggaaaaacaggagttccttgagggtggagtgggacatgtggagatgttgtttagatgcaactatctcgccctcgtcggtgggggcaaaaaacctaaatacccccctaataaggtaatgatctgggatgacctgaaaaaaaaaaccgtcatagagatcgaatttagcacggaagtgaaggcagtcaaattgaggcgggacaggatcgtggtggttctggactctatgattaaggtctttacatttactcacaacccacaccagctacatgtgtttgagacgtgctataatcctaaaggtctgtgtgtgctatgtccgaattccaataattccctcttggcctttcccggaacccataccgggcacgttcagctcgtggaccttgcctcaaccgagaaaccccctgtggatatccccgcccatgaaggagtactttcttgcattgccttgaaccttcagggcacaagaatagccacggccagtgaaaaggggacccttattagaatcttcgacacgagtagcggacacttaatccaagagctgcggcgaggatcccaagccgccaacatttactgcattaacttcaaccaagatgcatccctaatctgtgttagttccgatcacgggactgtacatatctttgccgcggaagatcctaagcgaaacaagcaaagttcattggctagcgcttccttcctgcctaagtatttctcgtcaaaatggtcattcagcaaatttcaggtgccctccggctctccctgtatctgtgcgtttggtacggagccaaatgcggtcatcgctatctgcgcggacggctcatattacaagttcttatttaacccaaaaggcgagtgtatccgggatgtgtacgctcagttcttagaaatgactgacgacaagctgtag

SEQ ID NO: 201960 - DNA, 951 bp, Artificial Sequence
  derived and/or modified sequence
atggagaacggcttccgggtgtacaacaccgaccccctgaaggagaaggaaaagcaagaatttttagagggaggcgttgggcacgtggagatgctgttccgctgtaattatctcgccctggtggggggaggcaagaagccaaaatatccacccaacaaggttatgatttgggatgatctcaagaagaaaaccgtgattgaaatagagttctcaactgaagtcaaagctgtgaagttgagacgcgacaggatcgttgtggttctggactcaatgatcaaagttttcaccttcacacacaacccacaccagctgcacgttttcgagacatgctacaaccctaaaggtttatgtgtactgtgccctaacagtaataactccctgctcgccttccctggtactcacaccggtcacgtccagctcgtcgatttagcctctacggagaaaccacctgtagacatccctgcgcatgagggggtcctctcctgcattgcacttaatctacagggaacaaggattgctacagcaagcgagaaggggactctcatccgtatttttgatactagcagtggacatctgatccaggagctgcgccgaggcagccaggctgctaatatttactgtatcaacttcaaccaagacgcctctctgatatgcgtatcttcagaccatggaactgtgcacatttttgcggctgaggaccccaaacgtaacaaacagtcttcattggcctctgcctccttcttgccaaagtacttctcgtcaaaatggagtttctcaaaatttcaggtcccctcaggcagtccttgcatttgcgccttcggaactgaaccaaacgctgtgatcgctatctgtgctgacggcagctactataagtttctgtttaatccaaaaggcgaatgcattagggacgtatacgcgcagttcctcgagatgaccgacgacaaactgtag

SEQ ID NO: 201961 - DNA, 1035 bp, Artificial Sequence
  derived and/or modified sequence
atgaatctgctgccttgtaatccgcacgggaacgggcttttgtatgctggcttcaaccaggaccatggctgctttgcgtgtggaatggaaaacggattcagggtgtataacactgaccctttgaaagaaaaagaaaaacaggagttccttgagggcggagtgggccatgtggaaatgctctttagatgtaactatctggccttggtgggcggtggcaagaagccaaagtacccacctaacaaagttatgatatgggacgatttgaagaagaaaaccgtcatcgagatagaattttcaacagaagtaaaagcagttaagctgaggagagacaggatcgtcgtagtgctcgactctatgatcaaggtgttcactttcactcacaaccctcaccagcttcacgtgtttgaaacatgctacaatccaaaaggactgtgcgtgctttgccctaattccaacaatagcctgttggcctttccaggcacccacaccggacacgtccaactggtcgaccttgcatcaaccgaaaagcccccagtggacattcccgcacacgaaggcgttttgagctgcattgccctgaacttacaaggtacacggattgctactgccagtgagaagggcacacttatccggattttcgatacctctagtggacacctcatacaagagctgcgacgcggaagtcaggcggcaaacatttattgtattaacttcaatcaggacgcttctttgatttgcgtgtcatcagatcatggtacagtgcatatttttgccgcagaggatcctaaacgcaacaagcaatcatccttggcaagcgcctcatttctgcccaagtacttctcctctaaatggtctttctctaaatttcaggtcccctccggctctccgtgcatttgtgcctttggaaccgaacccaacgcagtgatagcgatctgtgctgacggaagctattataagtttttgttcaaccctaagggcgagtgcatcagggacgtgtacgcacaatttctcgagatgaccgacgataaattgtag

SEQ ID NO: 201962 - DNA, 951 bp, Artificial Sequence
  derived and/or modified sequence
atggagaacggcttccgggtgtacaatacggatcccctgaaggagaaggaaaagcaggagttcctcgagggaggagtgggccacgtcgagatgctgttccggtgcaactatctggcattagtgggaggaggaaagaagcctaaatacccacccaacaaggttatgatatgggacgacctcaaaaagaaaaccgtcatcgagatcgagttctcgacggaggtgaaggctgtcaaacttcgacgagaccggatcgtagtggtgctggattcaatgataaaggttttcacctttactcataacccacatcagctacacgtgtttgagacctgctacaaccctaaaggcctttgtgtcctttgccctaattccaacaactcccttctggcatttcccggaacccatactgggcacgtgcaactagttgacctagcctccaccgaaaagcctcccgtcgatatacctgctcacgagggggtgctctcttgtatcgcgctaaacctgcagggaacacgcatcgcaacagcatccgagaagggaactctgattagaattttcgacacatcatcagggcatctgattcaggaactgagacgcggatcacaggcagcaaatatttattgtatcaatttcaaccaggacgcctcactcatatgcgtgtcgtcagaccacggcactgtacacattttcgcagcggaagacccaaaaagaaataagcaaagtagtttggcttcagcgagcttcctccccaagtatttttcgagtaagtggtcattctcaaaatttcaggttcctagcggttcaccgtgcatctgcgcttttggtacagagcccaacgccgtgattgcaatctgtgcggatggctcatattacaagtttctcttcaaccctaagggagaatgcattagagacgtttatgctcagtttcttgagatgaccgacgacaagctttag

SEQ ID NO: 201963 - DNA, 2587 bp, Artificial Sequence
  derived and/or modified sequence
gtggggcgcgggcgcgcgcacggacgtccagcacgcacgcacgcacgtccagcacacacgcacatccagcacgcacgcacgtacgtccggcacttccggccgcggcggcctcagcgccggcccgaagggaccaggccgccgtccccagcgagaggcatgcagcgctgaggagcggcgacccagcacggcggcgccatgaacctcctgccgtgtaaccctcacggcaacgggctgctctacgccggcttcaaccaggaccacggatgctttgcgtgtgggatggaaaatggattccgagtctataacactgatccactaaaagaaaaagagaaacaagaatttctagaaggaggagttggccatgttgaaatgttatttcgctgcaactatttagctttagttggtggtggaaaaaagccgaaataccctcccaacaaagtaatgatctgggatgacctgaagaagaagactgttattgaaatagaattttctacagaagtcaaggcagtcaagctgcggcgagatagaattgtggtggttttggactccatgattaaggtgttcacattcacacacaatccccatcagttgcacgtcttcgaaacctgctataaccccaaaggcctctgtgtcctttgtcccaatagtaacaactccctcctggcctttccgggcacgcacacgggccatgtgcagcttgtggacctggccagcacggagaagccacccgtggacattcctgcacacgagggtgtcctgagctgcattgcactcaacctgcagggaacaagaattgcaactgcatccgagaaagggacgcttataagaatatttgatacttcatcagggcatttaatccaggaactgcgaagaggatctcaagcagccaatatttactgcatcaacttcaatcaggatgcgtccctcatctgcgtatccagcgaccacggcacagtgcatatttttgcagctgaagatccaaaaaggaataaacagtccagtttggcctcagccagtttccttccaaaatacttcagttccaagtggagtttctccaagtttcaggttccctcaggctctccgtgcatttgtgcctttggaacagagccaaacgccgtcattgcaatttgtgcagacggcagctactacaaattcctgttcaaccccaagggggagtgcatccgagatgtctacgcgcagtttctagagatgaccgatgacaagctgtgactccagctgggggcgccacagcacccaccacctgccgccttcagactctcggggctggtgccagtgccccaggggcctcctgggccacgggctggaggggctgcccagggaccttggtctcgaagccatacgtggttgtctgctttcctaaggactcccatttccagtattaaagagagaatcatcatcaaggcaccgtaggtaactcagtggctgtgaccagctcgactggcggccactggctgttcccatgagttcagctgtgacgttagcttcagtggctccgccgcatcctcacactgacgggggctccatacggacctggggactgggctgagagggtggacgagttcaggtttgtttttgcagcagattccgtcgttcttactgagtctgcagcgggggagtgaacaagtgtgcagatgtaagttcttacatgataagcagattgaatacaacaccagcagcttgccttagaaaaggagaaaggaattccttttcccgcccgaacatgaagaaaaatgacctgaccctgtagagagaacacagtgtgaatgtttcccctcgtgtgagcccagcctgtggtcttctccgtacccgcaacgtggtcatctgtgcccgtgacgtcacctgtgcccgtgcgtggcgtccccgtctccgttggggccattagaatgaggcagacaccaggccactctagaagccgagccgtcacacctcaggcgtgtgcggggcggggacggggggtctcctggttacattttggattaaacctgtttcccggttatgtgtagggaacagcagagtgatgcacgaactttgaacattcgttatggggaaaacatcctttaacttcggggtcgtctgccagagcagggtctgggagggtccatgcagttcccgctggtgtggagggaaatgccctggtctggcctccgagcccccaggtccaccgtctcccctcccctcatttgtaagaatagctacacactaacattttgggaaggagaggcacataactttttttaacatttggtaactaggttatgggctctacattgtcagctacttgggatatatatttaattttcttaaattcccgttaaactctattttatggttttgatttcagattgcaaacatgtaaaacctgcatagcagcgagttctcggttttgccggtttctttagttctttactgtcactgtcatgtaatcagctaattctctgtggatgttgctgtaaagtatgcatgttcctttcatgtgtatttaatcatgatgtttaattttgcacacttatttgtaatgtttcttttaaataaaagtgactaattttgttgtagtctggacctgtaa

SEQ ID NO: 201964 - DNA, 1322 bp, Artificial Sequence
  derived and/or modified sequence
ttcaaccaggaccacggatgctttgcgtgtgggatggaaaatggattccgagtctataacactgatccactaaaagaaaaagagaaacaagaatttctagaaggaggagttggccatgttgaaatgttatttcgctgcaactatttagctttagttggtggtggaaaaaagccgaaataccctcccaacaaagtaatgatctgggatgacctgaagaagaagactgttattgaaatagaattttctacagaagtcaaggcagtcaagctgcggcgagatagaattgtggtggttttggactccatgattaaggtgttcacattcacacacaatccccatcagttgcacgtcttcgaaacctgctataaccccaaaggcctctgtgtcctttgtcccaatagtaacaactccctcctggcctttccgggcacgcacacgggccatgtgcagcttgtggacctggccagcacggagaagccacccgtggacattcctgcacacgagggtgtcctgagctgcattgcactcaacctgcagggaacaagaattgcaactgcatccgagaaagggacgcttataagaatatttgatacttcatcagggcatttaatccaggaactgcgaagaggatctcaagcagccaatatttactgcatcaacttcaatcaggatgcgtccctcatctgcgtatccagcgaccacggcacagtgcatatttttgcagctgaagatccaaaaaggaataaacagtccagtttggcctcagccagtttccttccaaaatacttcagttccaagtggagtttctccaagtttcaggttccctcaggctctccgtgcatttgtgcctttggaacagagccaaacgccgtcattgcaatttgtgcagacggcagctactacaaattcctgttcaaccccaagggggagtgcatccgagatgtctacgcgcagtttctagagatgaccgatgacaagctgtgactccagctggcggccactggctgttcccatgagttcagctgtgacgttagcttcagtggctccgccgcatcctcacactgacgggggctccatacggacctggggactgggctgagagggtggacgagttcaggtttgtttttgcagcagattccgtcgttcttactgagtctgcagcgggggagtgaacaagtgtgcagatgtaagttcttacatgataagcagattgaatacaacaccagcagcttgccttagaaaaggagaaaggaattccttttcccgcccgaacatgaagaaaaatgacctgaccctgtagagagaacacagtgtgaatgttt

SEQ ID NO: 201965 - protein, 444 aa, Artificial Sequence
  derived and/or modified sequence
MVSQALRLLCLLLGLQGCLAAVFVTQEEAHGVLHRRRRANAFLEELRPGSLERECKEEQCSFEEAREIFKDAERTKLFWISYSDGDQCASSPCQNGGSCKDQLQSYICFCLPAFEGRNCETHKDDQLICVNENGGCEQYCSDHTGTKRSCRCHEGYSLLADGVSCTPTVEYPCGKIPILEKRNASKPQGRIVGGKVCPKGECPWQVLLLVNGAQLCGGTLINTIWVVSAAHCFDKIKNWRNLIAVLGEHDLSEHDGDEQSRRVAQVIIPSTYVPGTTNHDIALLRLHQPVVLTDHVVPLCLPERTFSERTLAFVRFSLVSGWGQLLDRGATALELMVLNVPRLMTQDCLQQSRKVGDSPNITEYMFCAGYSDGSKDSCKGDSGGPHATHYRGTWYLTGIVSWGQGCATVGHFGVYTRVSQYIEWLQKLMRSEPRPGVLLRAPFP

SEQ ID NO: 201966 - DNA, 1332 bp, Artificial Sequence
  derived and/or modified sequence
atggtgagccaggccctgcgcctgctgtgcctgctgctgggcctgcagggctgcctggccgccgtgttcgtgacccaggaggaggcccacggcgtgctgcaccgccgccgccgcgccaacgccttcctggaggagctgcgccccggcagcctggagcgcgagtgcaaggaggagcagtgcagcttcgaggaggcccgcgagatcttcaaggacgccgagcgcaccaagctgttctggatcagctacagcgacggcgaccagtgcgccagcagcccctgccagaacggcggcagctgcaaggaccagctgcagagctacatctgcttctgcctgcccgccttcgagggccgcaactgcgagacccacaaggacgaccagctgatctgcgtgaacgagaacggcggctgcgagcagtactgcagcgaccacaccggcaccaagcgcagctgccgctgccacgagggctacagcctgctggccgacggcgtgagctgcacccccaccgtggagtacccctgcggcaagatccccatcctggagaagcgcaacgccagcaagccccagggccgcatcgtgggcggcaaggtgtgccccaagggcgagtgcccctggcaggtgctgctgctggtgaacggcgcccagctgtgcggcggcaccctgatcaacaccatctgggtggtgagcgccgcccactgcttcgacaagatcaagaactggcgcaacctgatcgccgtgctgggcgagcacgacctgagcgagcacgacggcgacgagcagagccgccgcgtggcccaggtgatcatccccagcacctacgtgcccggcaccaccaaccacgacatcgccctgctgcgcctgcaccagcccgtggtgctgaccgaccacgtggtgcccctgtgcctgcccgagcgcaccttcagcgagcgcaccctggccttcgtgcgcttcagcctggtgagcggctggggccagctgctggaccgcggcgccaccgccctggagctgatggtgctgaacgtgccccgcctgatgacccaggactgcctgcagcagagccgcaaggtgggcgacagccccaacatcaccgagtacatgttctgcgccggctacagcgacggcagcaaggacagctgcaagggcgacagcggcggcccccacgccacccactaccgcggcacctggtacctgaccggcatcgtgagctggggccagggctgcgccaccgtgggccacttcggcgtgtacacccgcgtgagccagtacatcgagtggctgcagaagctgatgcgcagcgagccccgccccggcgtgctgctgcgcgcccccttcccc

SEQ ID NO: 201967 - DNA, 1335 bp, Artificial Sequence
  derived and/or modified sequence
atggtgagccaggccctgagactgctgtgcctgctgctgggcctgcagggctgcctggccgccgtgttcgtgacccaggaggaggcccacggcgtgctgcacagaagaagaagagccaacgccttcctggaggagctgagacccggcagcctggagagagagtgcaaggaggagcagtgcagcttcgaggaggccagagagatcttcaaggacgccgagagaaccaagctgttctggatcagctacagcgacggcgaccagtgcgccagcagcccctgccagaacggcggcagctgcaaggaccagctgcagagctacatctgcttctgcctgcccgccttcgagggcagaaactgcgagacccacaaggacgaccagctgatctgcgtgaacgagaacggcggctgcgagcagtactgcagcgaccacaccggcaccaagagaagctgcagatgccacgagggctacagcctgctggccgacggcgtgagctgcacccccaccgtggagtacccctgcggcaagatccccatcctggagaagagaaacgccagcaagccccagggcagaatcgtgggcggcaaggtgtgccccaagggcgagtgcccctggcaggtgctgctgctggtgaacggcgcccagctgtgcggcggcaccctgatcaacaccatctgggtggtgagcgccgcccactgcttcgacaagatcaagaactggagaaacctgatcgccgtgctgggcgagcacgacctgagcgagcacgacggcgacgagcagagcagaagagtggcccaggtgatcatccccagcacctacgtgcccggcaccaccaaccacgacatcgccctgctgagactgcaccagcccgtggtgctgaccgaccacgtggtgcccctgtgcctgcccgagagaaccttcagcgagagaaccctggccttcgtgagattcagcctggtgagcggctggggccagctgctggacagaggcgccaccgccctggagctgatggtgctgaacgtgcccagactgatgacccaggactgcctgcagcagagcagaaaggtgggcgacagccccaacatcaccgagtacatgttctgcgccggctacagcgacggcagcaaggacagctgcaagggcgacagcggcggcccccacgccacccactacagaggcacctggtacctgaccggcatcgtgagctggggccagggctgcgccaccgtgggccacttcggcgtgtacaccagagtgagccagtacatcgagtggctgcagaagctgatgagaagcgagcccagacccggcgtgctgctgagagcccccttcccctag

SEQ ID NO: 201968 - DNA, 1335 bp, Artificial Sequence
  derived and/or modified sequence
atggtgtcacaagccctgcggctgttgtgtttgctcctaggcctgcaggggtgcttagctgctgtcttcgtgacccaggaggaggcacacggcgtgctgcacaggagacgacgggcaaacgcctttctggaggagcttcggcccggcagcttagagagagaatgcaaggaagagcagtgctcgtttgaagaggcccgagagatcttcaaggacgccgaacgaactaaactattctggatatcctactcggatggtgaccagtgtgcatcgagcccctgccagaacggcggttcgtgcaaagatcagctccagagttacatttgcttctgtctgccagcattcgaaggaaggaactgcgaaacccacaaagacgatcagttgatctgtgtcaatgaaaatggaggctgcgagcagtattgctctgatcacaccggcaccaagaggtcgtgtcgctgtcatgagggctatagcctgttagcagatggcgttagttgcacgcctaccgtcgagtatccttgcggtaagattcctatcctcgaaaagaggaatgccagcaagccacagggaagaatcgtgggcggaaaggtgtgcccaaaaggggaatgcccttggcaggtactgctcctggtgaatggggctcaactgtgcggaggaaccttgataaataccatctgggtggtgtcagcagcccactgcttcgataaaatcaagaattggagaaacctaatagccgtgctaggggagcacgacctgtctgaacacgacggagacgagcagtccagacgcgtagcccaggtcatcattccgtcaacctacgtcccaggaaccaccaatcacgacatagccctgttgcgtttgcaccagcctgtcgtccttaccgaccacgtggttcccctttgcctccctgaaagaaccttttcagaacggacattggctttcgtgcgctttagtctggtgagcggctggggccagctcctggacagaggcgcaactgccctggaactcatggtcctgaatgttccacggctcatgacgcaggattgtttgcagcaaagtcggaaagtgggggacagtccaaacataacggagtacatgttttgcgccggctacagtgatggcagcaaagatagctgtaagggggatagcggaggcccccacgccacacactatcgggggacatggtatctgaccggtatcgtgtcctggggccagggttgcgccaccgttggacactttggagtgtacacaagagtgtcccagtacattgaatggctgcagaaactcatgagatccgagccacgaccaggggtgctgttgcgagccccttttccctag

SEQ ID NO: 201969 - DNA, 2409 bp, Artificial Sequence
  derived and/or modified sequence
agtcccatggggaatgtcaacaggcaggggcagcactgcagagatttcatcatggtctcccaggccctcaggctcctctgccttctgcttgggcttcagggctgcctggctgcagtcttcgtaacccaggaggaagcccacggcgtcctgcaccggcgccggcgcgccaacgcgttcctggaggagctgcggccgggctccctggagagggagtgcaaggaggagcagtgctccttcgaggaggcccgggagatcttcaaggacgcggagaggacgaagctgttctggatttcttacagtgatggggaccagtgtgcctcaagtccatgccagaatgggggctcctgcaaggaccagctccagtcctatatctgcttctgcctccctgccttcgagggccggaactgtgagacgcacaaggatgaccagctgatctgtgtgaacgagaacggcggctgtgagcagtactgcagtgaccacacgggcaccaagcgctcctgtcggtgccacgaggggtactctctgctggcagacggggtgtcctgcacacccacagttgaatatccatgtggaaaaatacctattctagaaaaaagaaatgccagcaaaccccaaggccgaattgtggggggcaaggtgtgccccaaaggggagtgtccatggcaggtcctgttgttggtgaatggagctcagttgtgtggggggaccctgatcaacaccatctgggtggtctccgcggcccactgtttcgacaaaatcaagaactggaggaacctgatcgcggtgctgggcgagcacgacctcagcgagcacgacggggatgagcagagccggcgggtggcgcaggtcatcatccccagcacgtacgtcccgggcaccaccaaccacgacatcgcgctgctccgcctgcaccagcccgtggtcctcactgaccatgtggtgcccctctgcctgcccgaacggacgttctctgagaggacgctggccttcgtgcgcttctcattggtcagcggctggggccagctgctggaccgtggcgccacggccctggagctcatggtcctcaacgtgccccggctgatgacccaggactgcctgcagcagtcacggaaggtgggagactccccaaatatcacggagtacatgttctgtgccggctactcggatggcagcaaggactcctgcaagggggacagtggaggcccacatgccacccactaccggggcacgtggtacctgacgggcatcgtcagctggggccagggctgcgcaaccgtgggccactttggggtgtacaccagggtctcccagtacatcgagtggctgcaaaagctcatgcgctcagagccacgcccaggagtcctcctgcgagccccatttccctagcccagcagccctggcctgtggagagaaagccaaggctgcgtcgaactgtcctggcaccaaatcccatatattcttctgcagttaatggggtagaggagggcatgggagggagggagaggtggggagggagacagagacagaaacagagagagacagagacagagagagactgagggagagactctgaggacatggagagagactcaaagagactccaagattcaaagagactaatagagacacagagatggaatagaaaagatgagaggcagaggcagacaggcgctggacagaggggcaggggagtgccaaggttgtcctggaggcagacagcccagctgagcctccttacctcccttcagccaagcccacctgcacgtgatctgctggcctcaggctgctgctctgccttcattgctggagacagtagaggcatgaacacacatggatgcacacacacacacgccaatgcacacacacagagatatgcacacacacggatgcacacacagatggtcacacagagatacgcaaacacaccgatgcacacgcacatagagatatgcacacacagatgcacacacagatatacacatggatgcacgcacatgccaatgcacgcacacatcagtgcacacggatgcacagagatatgcacacaccgatgtgcgcacacacagatatgcacacacatggatgagcacacacacaccaatgcgcacacacaccgatgtacacacacagatgcacacacagatgcacacacaccgatgctgactccatgtgtgctgtcctctgaaggcggttgtttagctctcacttttctggttcttatccattatcatcttcacttcagacaattcagaagcatcaccatgcatggtggcgaatgcccccaaactctcccccaaatgtatttctcccttcgctgggtgccgggctgcacagactattccccacctgcttcccagcttcacaataaacggctgcgtctcctccgcacacctgtggtgcctgccaccc

SEQ ID NO: 201970 - DNA, 1335 bp, Artificial Sequence
  derived and/or modified sequence
atggtgtcccaggccctgcggctgctgtgcctgctgctgggcctgcagggctgcctggccgctgtgtttgtgacccaggaggaggcccacggcgtgctgcacagaagaagaagagccaatgccttcctggaggagctgcggcccggcagcctggagcgggagtgcaaggaggagcagtgcagctttgaggaggcccgggagatcttcaaggatgctgagaggaccaagctgttctggatctcctacagtgatggagaccagtgtgccagcagcccctgccagaatggaggcagctgcaaggaccagctgcagagctacatctgcttctgcctgcctgcctttgagggcaggaactgtgagacccacaaggatgaccagctgatctgtgtgaatgaaaatggaggctgtgagcagtactgcagcgaccacacaggcaccaagaggagctgccgctgccacgagggctacagcctgctggctgatggagtgtcctgcacccccaccgtggagtacccctgtgggaagatccccatcctggagaagagaaatgccagcaagccccagggcagaattgtgggcggcaaggtgtgccccaagggagaatgtccctggcaggtgctgctgctggtgaatggagcccagctgtgtggcggcaccctcatcaacaccatctgggtggtgtctgctgcccactgctttgacaagatcaagaactggaggaacctgattgctgtgctgggggagcatgacctgtctgaacatgatggagatgagcagagcagaagagtggcccaggtgatcatccccagcacctacgtgcccggcaccaccaaccacgacatcgccctgctgcggctgcaccagcctgtggtgctgacagaccacgtggtgcccctgtgcctgcctgagaggaccttcagcgagaggaccctggcctttgtgcgcttcagcctggtgtctggctggggccagctgctggacagaggagccacagccctggagctgatggtgctgaatgtgccccggctgatgacccaggactgcctgcagcagagcaggaaggtgggggacagccccaacatcacagagtacatgttctgtgccggctacagtgatggcagcaaggacagctgcaagggggacagcggcggcccccacgccacccactaccggggcacctggtacctgactggaattgtgtcctggggccagggctgtgccaccgtgggccactttggagtgtacaccagggtgtcccagtacatcgagtggctgcagaagctgatgaggtctgagcccaggcctggggtgctgctgcgggcccccttcccctag

SEQ ID NO: 201971 - DNA, 1335 bp, Artificial Sequence
  derived and/or modified sequence
atggtgagccaggccctgcggctgctgtgcctgctgctgggcctgcaggggtgtttggccgctgtatttgttacccaggaagaggcgcacggcgtcctacatagacggcggcgcgctaatgccttcctggaggaactgcggcccggatctctggaacgcgagtgtaaggaggagcaatgttcttttgaagaagcacgggagatcttcaaggatgcagaacgcactaaactcttttggatatcatattctgacggtgaccagtgcgcctcatcaccctgccaaaacggcggttcatgcaaggaccagctgcagtcttacatctgcttctgtctccccgccttcgaaggccgcaattgcgagacccataaggacgatcagctgatctgcgtgaacgagaatgggggctgtgaacagtattgcagtgatcacacggggaccaaacggtcctgcaggtgtcatgaaggatacagcctcctggcagatggggtgagctgcacccctaccgttgaatatccctgtggcaagatccccatcctagagaagcggaacgcctccaagccacagggacggatagtgggtgggaaagtttgcccgaagggcgagtgcccttggcaggtactattactcgtgaacggtgctcagctatgtggcggaacgctaatcaacacaatctgggttgtgtcggcagcgcactgctttgataagatcaagaattggagaaatctgattgccgtgttgggggagcatgatctctcagaacatgacggcgacgaacaaagcagacgtgtcgctcaggtaattattccctcgacttatgtgcccggaaccactaaccacgacatcgcccttctgagattgcaccagccagttgttctgacagatcacgtggtgcctctgtgcttgccagagagaacttttagcgaacggacactggcgtttgttcgcttttccttggtttcagggtggggccaacttcttgaccggggagccaccgctctcgagctgatggtgctaaatgttccacggctcatgacacaggattgcctgcagcaatcccgaaaagtgggggatagtcctaacatcaccgaatacatgttttgcgctggctatagcgacgggagcaaagattcttgtaagggggatagcggagggccacatgctacccattatcgtgggacgtggtatctgactgggatcgtctcttggggccagggctgtgccacggtcggccacttcggggtgtacactcgcgtctcacagtatatcgaatggctccaaaaattgatgagaagtgagccccgaccgggagtgctgttgcgtgctccattcccatag

SEQ ID NO: 201972 - DNA, 1335 bp, Artificial Sequence
  derived and/or modified sequence
atggtgagccaggcgctgagactgctgtgcctattattgggcttgcagggatgcctggccgctgtcttcgttacccaggaggaggctcacggagttttgcaccggaggagaagggcaaacgccttccttgaggagctgaggccaggatctctggagagagaatgcaaagaggaacagtgcagttttgaagaggccagggagatttttaaggatgcggaaagaactaaacttttttggatttcgtattccgacggggatcagtgtgccagttccccttgccaaaatggaggcagctgcaaagaccaactgcaaagttacatttgcttctgtctgccagccttcgagggtcgaaattgtgagacccataaggacgaccagctcatctgcgttaatgaaaacggaggatgtgagcaatactgttccgatcacacaggaaccaaaagaagctgtagatgtcatgagggttactccctcctggcagatggcgtgtcctgcactccgacagtcgaatacccatgcggtaaaattccgatcctagagaaaagaaacgcttcaaagccacagggcaggatcgtgggcggaaaggtgtgtccaaagggcgaatgtccatggcaggtgctcctgttggtgaacggagctcagttgtgcggcggtacactcatcaacaccatctgggtggtatcggccgctcactgtttcgacaaaattaaaaactggcgtaatctgatcgcagtcctgggggagcacgacctctctgagcacgacggagacgaacagagccggagggtggcccaggtgataatccctagcacctatgtgccagggacaaccaatcatgacatagcactgctgagactgcatcagcccgtggtgctaactgaccacgtcgtgccgctgtgcttaccagaacgtaccttctctgagagaactctcgccttcgtgcgcttttctctggtgtccggatgggggcagctcctggatcgaggagcgactgccctcgagttgatggtactcaatgttccacgcctgatgacccaggactgtctgcagcagagtaggaaggtgggcgacagcccgaacattaccgaatatatgttctgcgccggatatagcgacgggtcaaaagattcatgcaaaggggactccggcggaccacatgcgacccactatcgaggtacctggtacttgaccgggattgtctcctggggtcagggatgcgcaactgtgggacacttcggagtgtatacccgcgtgtcccagtatattgaatggctgcaaaagctgatgcggtcagagccccgacctggtgtgctgctgagggcccctttcccctag

SEQ ID NO: 201973 - DNA, 1335 bp, Artificial Sequence
  derived and/or modified sequence
atggtctctcaggcccttagacttctgtgtctgctgctcggacttcagggctgccttgcagccgtattcgttacccaggaagaagcacacggcgtactccatagaagacggagggccaacgcatttctcgaagagctgcgaccaggatctctggagcgtgaatgtaaggaggagcagtgctcctttgaggaggctcgggagattttcaaggacgctgagcggactaagttattctggatatcctattccgacggggatcagtgtgcaagttcaccctgtcagaacggagggtcctgcaaagaccagcttcaaagttacatttgcttctgtctgcctgctttcgagggtcgcaactgtgaaacccacaaggacgatcagctgatttgcgtaaacgaaaacggtgggtgtgaacagtattgttccgaccatactgggactaaaagaagctgtcggtgccacgaagggtactcactgctggccgatggtgtctcttgcacacctaccgtggaatacccatgtgggaagattccaatcttggagaagagaaatgcctctaaaccccaggggcgaatcgtgggcggtaaagtatgcccgaagggtgagtgtccatggcaagtactgttgctcgtaaacggggctcaactttgtggcggcaccctcattaatactatatgggtagtttctgccgctcactgttttgataagattaagaactggaggaacctgattgccgtcctgggtgaacatgacctctcagaacatgacggggatgagcagagtcgccgtgtggcccaagtgattattccgagcacgtacgtccctggcacaaccaaccacgatatagccctcctcaggctgcaccagcccgttgtgcttaccgatcacgtcgtccccctttgtcttccagaaaggaccttttcagaacggacgctggctttcgtgaggttcagtcttgtcagtggctgggggcaactcctggatcgaggtgccactgccctggaactgatggtcctaaacgtgcctagactaatgactcaggattgtctacagcaatcccgcaaggttggcgattctccaaatataacagaatatatgttctgtgcaggctatagtgacggatctaaagacagctgcaaaggcgactcaggaggaccacacgcaacccactaccgaggtacttggtatttgactgggatcgttagctggggccaggggtgtgctacagtgggccatttcggtgtctacacgcgggtgtcccagtatatcgaatggctgcagaaacttatgcgctcggagcctcgcccaggtgtgctgttgcgcgctcccttcccctag

SEQ ID NO: 201974 - DNA, 1335 bp, Artificial Sequence
  derived and/or modified sequence
atggtgagccaggctcttaggctcctgtgtctgctgctgggcttgcaggggtgtctcgctgccgtctttgtaacacaggaagaggcccacggggtcctgcataggagacgccgtgccaatgcttttctggaagaactgcgacctggctcccttgagcgggaatgcaaagaagaacagtgttccttcgaagaggcccgggagatttttaaagatgccgaaagaacgaagctattttggataagttattccgatggagaccagtgcgcaagtagcccttgccagaatggaggtagttgcaaagatcagctccagtcttatatctgcttttgtctgccagcatttgaaggtcggaactgtgaaactcacaaggatgatcaactgatttgcgtcaacgagaacgggggttgtgaacagtattgctcagaccatacaggcacgaaacgctcctgtcggtgccatgagggctactcccttcttgcagatggagtgtcttgtacacctacagtcgaatacccctgcgggaaaataccaattctggaaaagaggaacgccagcaaaccacaaggaaggatcgtgggtggaaaagtgtgtcctaagggagaatgcccatggcaagtgctcctgttggtcaacggtgcccagctgtgtggaggcacattaattaacacaatttgggtcgtttctgctgctcattgcttcgacaaaattaagaactggcggaacctcattgcggtcctcggagagcacgatctaagcgagcatgacggcgacgaacagagcagaagagtcgctcaggtgatcattccttctacttacgtccccggcacaacaaaccatgatattgcgcttctccggctgcaccagcccgtcgttctgaccgaccacgtcgttcctctgtgtctgcctgagcgaacattcagtgagcggacactggccttcgtgcgattcagtctcgtgtctggatggggacagctgttagatcgaggagcaactgccttagagctcatggtcctgaacgttccccgacttatgactcaagattgccttcagcagtccagaaaggtcggagatagtcccaacattactgaatatatgttctgtgcagggtattctgatggatcaaaagactcttgtaagggcgatagcggaggcccccacgcaactcactaccgcggcacgtggtacttaactgggattgttagctggggccaaggatgtgcgactgttgggcacttcggcgtctatacgagggtctctcaatacatagaatggttacagaagctgatgaggagcgaaccccgccctggggtccttttaagagcaccgtttccctag

SEQ ID NO: 201975 - RNA, 1335 nt, Artificial Sequence
  derived and/or modified sequence
auggucucucaggcccuuagacuucugugucugcugcucggacuucagggcugccuugcagccguauucguuacccaggaagaagcacacggcguacuccauagaagacggagggccaacgcauuucucgaagagcugcgaccaggaucucuggagcgugaauguaaggaggagcagugcuccuuugaggaggcucgggagauuuucaaggacgcugagcggacuaaguuauucuggauauccuauuccgacggggaucagugugcaaguucacccugucagaacggaggguccugcaaagaccagcuucaaaguuacauuugcuucugucugccugcuuucgagggucgcaacugugaaacccacaaggacgaucagcugauuugcguaaacgaaaacggugggugugaacaguauuguuccgaccauacugggacuaaaagaagcugucggugccacgaaggguacucacugcuggccgauggugucucuugcacaccuaccguggaauacccaugugggaagauuccaaucuuggagaagagaaaugccucuaaaccccaggggcgaaucgugggcgguaaaguaugcccgaagggugaguguccauggcaaguacuguugcucguaaacggggcucaacuuuguggcggcacccucauuaauacuauauggguaguuucugccgcucacuguuuugauaagauuaagaacuggaggaaccugauugccguccugggugaacaugaccucucagaacaugacggggaugagcagagucgccguguggcccaagugauuauuccgagcacguacgucccuggcacaaccaaccacgauauagcccuccucaggcugcaccagcccguugugcuuaccgaucacgucgucccccuuugucuuccagaaaggaccuuuucagaacggacgcuggcuuucgugagguucagucuugucaguggcugggggcaacuccuggaucgaggugccacugcccuggaacugaugguccuaaacgugccuagacuaaugacucaggauugucuacagcaaucccgcaagguuggcgauucuccaaauauaacagaauauauguucugugcaggcuauagugacggaucuaaagacagcugcaaaggcgacucaggaggaccacacgcaacccacuaccgagguacuugguauuugacugggaucguuagcuggggccaggggugugcuacagugggccauuucggugucuacacgcgggugucccaguauaucgaauggcugcagaaacuuaugcgcucggagccucgcccaggugugcuguugcgcgcucccuuccccuag

SEQ ID NO: 201976 - RNA, 1335 nt, Artificial Sequence
  derived and/or modified sequence
auggugagccaggcucuuaggcuccugugucugcugcugggcuugcaggggugucucgcugccgucuuuguaacacaggaagaggcccacgggguccugcauaggagacgccgugccaaugcuuuucuggaagaacugcgaccuggcucccuugagcgggaaugcaaagaagaacaguguuccuucgaagaggcccgggagauuuuuaaagaugccgaaagaacgaagcuauuuuggauaaguuauuccgauggagaccagugcgcaaguagcccuugccagaauggagguaguugcaaagaucagcuccagucuuauaucugcuuuugucugccagcauuugaaggucggaacugugaaacucacaaggaugaucaacugauuugcgucaacgagaacggggguugugaacaguauugcucagaccauacaggcacgaaacgcuccugucggugccaugagggcuacucccuucuugcagauggagugucuuguacaccuacagucgaauaccccugcgggaaaauaccaauucuggaaaagaggaacgccagcaaaccacaaggaaggaucguggguggaaaaguguguccuaagggagaaugcccauggcaagugcuccuguuggucaacggugcccagcuguguggaggcacauuaauuaacacaauuugggucguuucugcugcucauugcuucgacaaaauuaagaacuggcggaaccucauugcgguccucggagagcacgaucuaagcgagcaugacggcgacgaacagagcagaagagucgcucaggugaucauuccuucuacuuacguccccggcacaacaaaccaugauauugcgcuucuccggcugcaccagcccgucguucugaccgaccacgucguuccucugugucugccugagcgaacauucagugagcggacacuggccuucgugcgauucagucucgugucuggauggggacagcuguuagaucgaggagcaacugccuuagagcucaugguccugaacguuccccgacuuaugacucaagauugccuucagcaguccagaaaggucggagauagucccaacauuacugaauauauguucugugcaggguauucugauggaucaaaagacucuuguaagggcgauagcggaggcccccacgcaacucacuaccgcggcacgugguacuuaacugggauuguuagcuggggccaaggaugugcgacuguugggcacuucggcgucuauacgagggucucucaauacauagaaugguuacagaagcugaugaggagcgaaccccgcccugggguccuuuuaagagcaccguuucccuag

SEQ ID NO: 201977 - protein, 199 aa, Artificial Sequence
  derived and/or modified sequence
MLAYSSVHCFREDKMKFTIVFAGLLGVFLAPALANYNINVNDDNNNAGSGQQSVSVNNEHNVANVDNNNGWDSWNSIWDYGNGFAATRLFQKKTCIVHKMNKEVMPSIQSLDALVKEKKLQGKGPGGPPPKGLMYSVNPNKVDDLSKFGKNIANMCRGIPTYMAEEMQEASLFFYSGTCYTTSVLWIVDISFCGDTVEN

SEQ ID NO: 201978 - DNA, 600 bp, Artificial Sequence
  derived and/or modified sequence
atgttggcatattcctcagttcactgctttagggaggacaagatgaagtttactatcgtctttgcgggcctgctcggcgtgttcctcgctccggcactggctaactacaacatcaacgtcaatgacgataacaacaacgctggatctggtcaacaatctgtatcagtcaacaatgagcataatgttgcaaacgtggacaacaacaatggctgggattcgtggaattccatctgggactatgggaatggctttgcagctacccgcttgtttcagaaaaagacctgtatcgtccacaagatgaacaaagaagtcatgccatctatccagtccttagacgcgctcgttaaagagaagaaacttcaggggaagggccccggcggaccccccccaaagggtctcatgtactccgtcaatccaaacaaggtggatgatctatcgaaatttggaaaaaatatcgcaaacatgtgcagggggatacccacatatatggctgaggaaatgcaggaagcctcactttttttttactctggaacatgctataccacttctgtcctgtggatcgttgacatctctttctgtggcgatactgtggaaaactag

SEQ ID NO: 201979 - DNA, 814 bp, Artificial Sequence
  derived and/or modified sequence
ataacacctagtttgagtcaacctggttaagtacaaatatgagaaggcttctcattcaggtccatgcttgcctactcctctgtccactgctttcgtgaagacaagatgaagttcacaattgtctttgctggacttcttggagtctttctagctcctgccctagctaactataatatcaacgtcaatgatgacaacaacaatgctggaagtgggcagcagtcagtgagtgtcaacaatgaacacaatgtggccaatgttgacaataacaacggatgggactcctggaattccatctgggattatggaaatggctttgctgcaaccagactctttcaaaagaagacatgcattgtgcacaaaatgaacaaggaagtcatgccctccattcaatcccttgatgcactggtcaaggaaaagaagcttcagggtaagggaccaggaggaccacctcccaagggcctgatgtactcagtcaacccaaacaaagtcgatgacctgagcaagttcggaaaaaacattgcaaacatgtgtcgtgggattccaacatacatggctgaggagatgcaagaggcaagcctgtttttttactcaggaacgtgctacacgaccagtgtactatggattgtggacatttccttctgtggagacacggtggagaactaaacaattttttaaagccactatggatttagtcatctgaatatgctgtgcagaaaaaatatgggctccagtggtttttaccatgtcattctgaaatttttctctactagttatgtttgatttctttaagtttcaataaaatcatttagcattg

SEQ ID NO: 201980 - DNA, 600 bp, Artificial Sequence
  derived and/or modified sequence
atgctggcctacagctctgtgcactgcttccgggaggacaagatgaagttcaccatcgtgtttgctggcctgctgggcgtcttcctggccccagccctggccaactacaacatcaacgtgaatgatgacaacaacaatgccggcagcggccagcagagcgtgtctgtgaacaatgagcacaacgtggccaacgtggacaacaacaacggctgggacagctggaacagcatctgggactatggaaatggatttgctgccaccaggctcttccagaagaagacctgcatcgtgcacaagatgaacaaggaggtgatgcccagcatccagagcctggatgccctggtgaaggagaagaagctgcagggcaaaggacctgggggccccccacccaagggcctgatgtacagcgtgaaccccaacaaggtggatgacctgagcaagtttgggaagaacatcgccaacatgtgccggggcatccccacctacatggccgaggagatgcaggaggccagcctcttcttctacagcggcacctgctacaccacctctgtgctgtggatcgtggacatctccttctgtggggacacagtggagaactag

SEQ ID NO: 201981 - DNA, 600 bp, Artificial Sequence
  derived and/or modified sequence
atgctggcctacagcagcgtgcactgcttccgggaggacaagatgaagtttacaatcgttttcgcgggattgctgggcgtgtttcttgccccagccttggcaaattacaacataaacgttaatgacgacaacaacaacgctggatccggccaacaaagcgtgagcgtgaataacgagcataacgtagctaatgttgataataacaacggctgggacagctggaactctatctgggactacgggaacggtttcgcagctaccagactgttccaaaagaagacttgtatagtacataagatgaataaggaggttatgccctcgattcagtctctggatgctttggtcaaggagaagaagctccagggaaaggggcccgggggaccgcctcctaagggcctcatgtactcagtgaacccaaacaaggtggacgatctttcaaagttcggcaagaacatcgctaatatgtgcaggggtattccgacatacatggctgaggaaatgcaggaagcaagtctcttcttctactctggtacctgctacactacaagtgttttgtggatagtcgatatttccttttgcggtgacaccgttgaaaactag

SEQ ID NO: 201982 - DNA, 600 bp, Artificial Sequence
  derived and/or modified sequence
atgcttgcgtactcttctgtacactgttttagggaagacaagatgaagttcaccatagtctttgcgggtctgttgggcgtgttcctggctccggctctggctaattacaatatcaatgtgaacgatgataataacaacgcagggagcggccagcagtccgtgagcgtcaataatgaacataatgtggctaacgtggataataacaatgggtgggacagttggaactccatctgggactacggcaacggttttgctgcaactcgcttgttccagaagaagacctgcatcgtccacaagatgaacaaggaggtcatgccaagtattcagtccctggatgcccttgtcaaagagaagaaacttcaaggtaagggcccagggggtccaccccctaaaggattgatgtatagcgtgaatccaaataaagtcgatgacctttctaagttcggaaaaaacatcgccaacatgtgtaggggtattcctacctatatggcggaggagatgcaggaggcttccttattcttttactccgggacgtgctatactacctccgtcctgtggatcgtggatatctcattttgcggcgatacagtagaaaactag

SEQ ID NO: 201983 - DNA, 600 bp, Artificial Sequence
  derived and/or modified sequence
atgctggcctacagcagcgtgcactgcttcagagaggacaagatgaagttcaccatcgtgttcgccggcctgctgggcgtgttcctggcccccgccctggccaactacaacatcaacgtgaacgacgacaacaacaacgccggcagcggccagcagagcgtgagcgtgaacaacgagcacaacgtggccaacgtggacaacaacaacggctgggacagctggaacagcatctgggactacggcaacggcttcgccgccaccagactgttccagaagaagacctgcatcgtgcacaagatgaacaaggaggtgatgcccagcatccagagcctggacgccctggtgaaggagaagaagctgcagggcaagggccccggcggccccccccccaagggcctgatgtacagcgtgaaccccaacaaggtggacgacctgagcaagttcggcaagaacatcgccaacatgtgcagaggcatccccacctacatggccgaggagatgcaggaggccagcctgttcttctacagcggcacctgctacaccaccagcgtgctgtggatcgtggacatcagcttctgcggcgacaccgtggagaactag

SEQ ID NO: 201984 - protein, 169 aa, Artificial Sequence
  derived and/or modified sequence
MRGTPGDADGGGRAVYQSMCKPITGTINDLNQQVWTLQGQNLVAVPRSDSVTPVTVAVITCKYPEALEQGRGDPIYLGIQNPEMCLYCEKVGEQPTLQLKEQKIMDLYGQPEPVKPFLFYRAKTGRTSTLESVAFPDWFIASSKRDQPIILTSELGKSYNTAFELNIND

SEQ ID NO: 201985 - protein, 38 aa, Artificial Sequence
  derived and/or modified sequence
MRGTPGDADGGGRAVYQSMCKPITGTINDLNQQVWTLQ

SEQ ID NO: 201986 - DNA, 510 bp, Artificial Sequence
  derived and/or modified sequence
atgagaggcacccccggcgacgccgacggcggcggcagagccgtgtaccagagcatgtgcaagcccatcaccggcaccatcaacgacctgaaccagcaggtgtggaccctgcagggccagaacctggtggccgtgcccagaagcgacagcgtgacccccgtgaccgtggccgtgatcacctgcaagtaccccgaggccctggagcagggcagaggcgaccccatctacctgggcatccagaaccccgagatgtgcctgtactgcgagaaggtgggcgagcagcccaccctgcagctgaaggagcagaagatcatggacctgtacggccagcccgagcccgtgaagcccttcctgttctacagagccaagaccggcagaaccagcaccctggagagcgtggccttccccgactggttcatcgccagcagcaagagagaccagcccatcatcctgaccagcgagctgggcaagagctacaacaccgccttcgagctgaacatcaacgactag

SEQ ID NO: 201987 - DNA, 117 bp, Artificial Sequence
  derived and/or modified sequence
atgagaggcacccccggcgacgccgacggcggcggcagagccgtgtaccagagcatgtgcaagcccatcaccggcaccatcaacgacctgaaccagcaggtgtggaccctgcagtag

SEQ ID NO: 201988 - DNA, 510 bp, Artificial Sequence
  derived and/or modified sequence
atgcgaggcactcctggcgatgccgacggtggaggtagggcagtgtaccagagcatgtgcaaacccatcacaggcactattaacgacctcaaccagcaggtctggactctgcagggccagaatctggttgcagtgccacgatccgactccgtcacccctgtaacagtggctgttatcacttgcaaatatcctgaagcactcgaacagggtaggggggatcctatctatctgggcattcagaatcccgagatgtgcctgtactgcgaaaaagtgggcgagcagccaacactgcagctcaaagagcaaaaaattatggatctgtacggccaacccgagcccgttaagcctttcttattttatcgtgctaagactggccgcacatctaccctggaatctgtggcctttcccgattggtttatcgcctcctctaaaagagaccagcccatcattctgacctcggagttgggaaagagttataacacggccttcgaacttaacatcaatgactag

SEQ ID NO: 201989 - DNA, 117 bp, Artificial Sequence
  derived and/or modified sequence
atgaggggcacccccggcgacgccgatgggggcggccgagctgtgtaccagtccatgtgtaagccaatcacgggtacaataaatgatttgaatcagcaggtctggaccctgcaatag

SEQ ID NO: 201990 - DNA, 510 bp, Artificial Sequence
  derived and/or modified sequence
atgaggggcaccccaggagatgctgatggcggcggccgggctgtgtaccagagcatgtgcaagcccatcaccggcaccatcaatgacctgaaccagcaggtgtggaccctgcagggccagaacctggtggccgtgcccaggagtgacagcgtgacccctgtgacagtggccgtcatcacctgcaagtacccagaggccctggagcagggccgcggggaccccatctacctgggcatccagaaccctgagatgtgcctgtactgtgagaaggtgggggagcagcccaccctgcagctgaaggagcagaagatcatggacctgtatggccagcctgagcctgtgaagcccttcctgttctaccgggccaagacaggccgcaccagcaccctggagagcgtggccttcccagactggttcatcgccagcagcaagagggaccagcccatcatcctgaccagcgagctgggcaagagctacaacacagcctttgagctgaacatcaatgactag

SEQ ID NO: 201991 - DNA, 117 bp, Artificial Sequence
  derived and/or modified sequence
atgaggggcaccccaggagatgctgatggcggcggccgggctgtgtaccagagcatgtgcaagcccatcaccggcaccatcaatgacctgaaccagcaggtgtggaccctgcagtag

SEQ ID NO: 201992 - DNA, 510 bp, Artificial Sequence
  derived and/or modified sequence
atgcggggcacccccggcgacgccgacggcggcggccgggccgtgtatcaaagcatgtgcaaacctatcactggcaccattaatgacttgaatcagcaggtttggaccctccagggtcagaacctggtcgcagtgccgagaagcgactctgtcacacctgtcactgtggctgttatcacatgcaagtatcctgaagcgctcgaacagggaaggggagaccccatctatctgggaatacaaaaccccgagatgtgcttatattgtgaaaaagtgggcgagcagccaacgctgcagttgaaagagcaaaagatcatggatctgtatggacagcctgaacccgtcaaaccgttcttattctacagagccaagaccggccgcacctctactctcgagtctgtcgccttccctgattggttcattgcctctagcaagagagatcaacctatcattctgacatcagagctcggaaagagctataatacggcctttgaattgaacattaacgattag

SEQ ID NO: 201993 - DNA, 117 bp, Artificial Sequence
  derived and/or modified sequence
atgcggggcacccccggcgacgccgacggcggcggccgggccgtgtaccagagtatgtgtaaacccatcacaggaacaattaatgatcttaaccagcaggtctggacccttcagtag

SEQ ID NO: 201994 - DNA, 510 bp, Artificial Sequence
  derived and/or modified sequence
atgcgcggaacaccaggcgacgctgatgggggaggcagggcagtctaccagtcaatgtgcaagcctatcacaggcactatcaacgatttgaaccaacaggtgtggaccctgcagggccaaaatctggtggcagttcccaggtcagacagcgtcactcctgtcacagtggccgtgattacatgcaagtatcctgaagcccttgaacagggccgtggcgatcctatttatctcggtatccagaatccggagatgtgtctgtactgcgagaaggtgggtgagcagcctaccctccagctcaaggagcagaagattatggacctgtacggccaacccgaaccagtgaagccgttcttattttatcgtgctaagactggaagaacctcaaccctggagtcggtggcctttccagactggtttatcgcctcctccaagagggaccaaccaattatcttaacatcagagctgggcaagagctataatactgccttcgagcttaatatcaatgattag

SEQ ID NO: 201995 - DNA, 117 bp, Artificial Sequence
  derived and/or modified sequence
atgaggggtacgcctggcgatgccgacggaggaggcagggccgtttaccagagcatgtgtaaacccatcacaggcaccatcaacgacctgaatcagcaggtctggactctacagtag

SEQ ID NO: 201996 - DNA, 1173 bp, Artificial Sequence
  derived and/or modified sequence
gagccacgattcagtcccctggactgtagataaagaccctttcttgccaggtgctgagacaaccacactatgagaggcactccaggagacgctgatggtggaggaagggccgtctatcaatcaatgtgtaaacctattactgggactattaatgatttgaatcagcaagtgtggacccttcagggtcagaaccttgtggcagttccacgaagtgacagtgtgaccccagtcactgttgctgttatcacatgcaagtatccagaggctcttgagcaaggcagaggggatcccatttatttgggaatccagaatccagaaatgtgtttgtattgtgagaaggttggagaacagcccacattgcagctaaaagagcagaagatcatggatctgtatggccaacccgagcccgtgaaacccttccttttctaccgtgccaagactggtaggacctccacccttgagtctgtggccttcccggactggttcattgcctcctccaagagagaccagcccatcattctgacttcagaacttgggaagtcatacaacactgcctttgaattaaatataaatgactgaactcagcctagaggtggcagcttggtctttgtcttaaagtttctggttcccaatgtgttttcgtctacattttcttagtgtcattttcacgctggtgctgagacaggggcaaggctgctgttatcatctcattttataatgaagaagaagcaattacttcatagcaactgaagaacaggatgtggcctcagaagcaggagagctgggtggtataaggctgtcctctcaagctggtgctgtgtaggccacaaggcatctgcatgagtgactttaagactcaaagaccaaacactgagctttcttctaggggtgggtatgaagatgcttcagagctcatgcgcgttacccacgatggcatgactagcacagagctgatctctgtttctgttttgctttattccctcttgggatgatatcatccagtctttatatgttgccaatatacctcattgtgtgtaatagaaccttcttagcattaagaccttgtaaacaaaaataattcttgtgttaagttaaatcatttttgtcctaattgtaatgtgtaatcttaaagttaaataaactttgtgtatttatataataataaagctaaaa

SEQ ID NO: 201997 - DNA, 369 bp, Artificial Sequence
  derived and/or modified sequence
tttgctttcttgtccagtcttgggagtgcctgaccacagcaggatcttctggtaggaggagctggttttctttcatgtcatacgtttctcatgccccacccaggaagctggagcctccttctctgctcatccagataaatgatccaggctccattagaacccatcactgaccttggaagctgctggagccacgattcagtcccctggactgtagataaagaccctttcttgccaggtgctgagacaaccacactatgagaggcactccaggagacgctgatggtggaggaagggccgtctatcaatcaatgtgtaaacctattactgggactattaatgatttgaatcagcaagtgtggacccttcagg

SEQ ID NO: 201998 - protein, 1356 aa, Artificial Sequence
  derived and/or modified sequence
MKVTVCFGRTRVVVPCGDGHMKVFSLIQQAVTRYRKAIAKDPNYWIQVHRLEHGDGGILDLDDILCDVADDKDRLVAVFDEQDPHHGGDGTSASSTGTQSPEIFGSELGTNNVSAFQPYQATSEIEVTPSVLRANMPLHVRRSSDPALIGLSTSVSDSNFSSEEPSRKNPTRWSTTAGFLKQNTAGSPKTCDRKKDENYRSLPRDTSNWSNQFQRDNARSSLSASHPMVGKWLEKQEQDEDGTEEDNSRVEPVGHADTGLEHIPNFSLDDMVKLVEVPNDGGPLGIHVVPFSARGGRTLGLLVKRLEKGGKAEHENLFRENDCIVRINDGDLRNRRFEQAQHMFRQAMRTPIIWFHVVPAANKEQYEQLSQSEKNNYYSSRFSPDSQYIDNRSVNSAGLHTVQRAPRLNHPPEQIDSHSRLPHSAHPSGKPPSAPASAPQNVFSTTVSSGYNTKKIGKRLNIQLKKGTEGLGFSITSRDVTIGGSAPIYVKNILPRGAAIQDGRLKAGDRLIEVNGVDLVGKSQEEVVSLLRSTKMEGTVSLLVFRQEDAFHPRELNAEPSQMQIPKETKAEDEDIVLTPDGTREFLTFEVPLNDSGSAGLGVSVKGNRSKENHADLGIFVKSIINGGAASKDGRLRVNDQLIAVNGESLLGKTNQDAMETLRRSMSTEGNKRGMIQLIVARRISKCNELKSPGSPPGPELPIETALDDRERRISHSLYSGIEGLDESPSRNAALSRIMGESGKYQLSPTVNMPQDDTVIIEDDRLPVLPPHLSDQSSSSSHDDVGFVTADAGTWAKAAISDSADCSLSPDVDPVLAFQREGFGRQSMSEKRTKQFSDASQLDFVKTRKSKSMDLGIADETKLNTVDDQKAGSPSRDVGPSLGLKKSSSLESLQTAVAEVTLNGDIPFHRPRPRIIRGRGCNESFRAAIDKSYDKPAVDDDDEGMETLEEDTEESSRSGRESVSTASDQPSHSLERQMNGNQEKGDKTDRKKDKTGKEKKKDRDKEKDKMKAKKGMLKGLGDMFRFGKHRKDDKIEKTGKIKIQESFTSEEERIRMKQEQERIQAKTREFRERQARERDYAEIQDFHRTFGCDDELMYGGVSSYEGSMALNARPQSPREGHMMDALYAQVKKPRNSKPSPVDSNRSTPSNHDRIQRLRQEFQQAKQDEDVEDRRRTYSFEQPWPNARPATQSGRHSVSVEVQMQRQRQEERESSQQAQRQYSSLPRQSRKNASSVSQDSWEQNYSPGEGFQSAKENPRYSSYQGSRNGYLGGHGFNARVMLETQELLRQEQRRKEQQMKKQPPSEGPSNYDSYKKVQDPSYAPPKGPFRQDVPPSPSQVARLNRLQTPEKGRPFYS

SEQ ID NO: 201999 - DNA, 4071 bp, Artificial Sequence
  derived and/or modified sequence
atgaaagtgacggtctgctttggcagaactagggtcgtggtgccatgcggggatggccacatgaaagtgtttagcctaattcagcaagccgtcactcggtacaggaaagcaattgcaaaagacccgaattactggatacaagtgcaccgcctggagcacggcgatggaggcattttagatctggatgacatattgtgcgacgtcgcggatgataaagaccggctagtggcagtgtttgatgagcaagatccccatcacggaggggatggtacctccgccagcagcacaggcacgcaatcacctgaaatctttggctctgagttaggtaccaataacgtgtctgcttttcaaccttaccaggccacctcagagatcgaggttacaccgtccgttctcagagctaatatgcctctgcacgttcgacggtcctctgaccccgcccttatcggtctttccacttctgtgtctgattccaattttagctctgaggagccctccaggaagaacccaactcgatggtcaactaccgccgggttcctgaagcagaacacagccggatctccaaaaacttgcgaccgaaagaaggatgaaaattatagaagtctgcctagagacacgtcgaactggagcaaccagttccaacgggacaatgcacgaagtagtctctctgcctctcatccaatggtaggaaaatggctggagaagcaggaacaggatgaagatgggacggaagaagataactctcgggtcgagcccgtggggcacgccgataccggcctggagcatatcccaaactttagtcttgacgacatggttaagcttgtagaggttcctaacgatggtggcccattgggtatccatgtggtgccattttccgcccgtggcggaaggacactaggactgctggtgaaaaggctagaaaaaggtggcaaagcagagcatgagaatctcttccgggaaaacgactgtattgtcaggatcaatgatggcgatcttcggaatagaagattcgagcaggctcagcacatgttcagacaggcaatgcgcacccctattatttggttccacgtagtaccggccgcaaacaaagaacagtatgagcaactgagccagagtgagaaaaataactactattcttccaggttctcacctgacagccagtacatagataatagatctgtcaatagtgccggcctgcacacagttcaacgtgctcccagactcaaccaccccccagaacagattgacagccactcccgccttccacacagtgcccacccatctgggaagccaccttctgcccctgcctcagccccccagaacgtattctcaacaactgtgagcagcggctataataccaagaagatagggaagcgtcttaatattcaactgaagaaaggaacagaaggtctgggattctctattacgtcaagggatgttacgattggcgggagcgccccgatctatgtcaaaaacatcctcccacgcggggccgccatccaggatgggagattgaaggccggtgaccggttgattgaagtaaacggagtagacctggttgggaagagtcaggaggaagtggtttctctactgcggagtactaagatggagggaaccgtgagcctcctcgtgttccgccaggaagatgcctttcatccgagagagctgaatgccgaaccaagtcagatgcagataccaaaagagaccaaagccgaagacgaggacatcgtactgacccctgatggaactagggaattcctaacctttgaggtgccactgaatgattcgggcagcgccggcctcggagtgagcgtcaagggcaatcgcagcaaggaaaaccatgctgacctgggcatattcgtgaagtctatcataaatggcggggccgcctccaaagatggaaggctaagagtgaatgaccaactgattgccgtcaatggcgaaagcctgctcgggaaaaccaatcaggatgccatggagacgcttaggcgcagcatgtccactgagggtaataagcggggtatgatacagcttatcgttgcgaggaggattagtaaatgtaacgaactcaagtctcctgggtcacctccaggcccagagcttccaattgaaaccgcgctggatgacagggaaaggaggatcagccactccttatattcaggcatcgaagggttggatgagagccccagcagaaacgctgccctgtccagaattatgggcgagtctgggaagtatcagctgtctcctaccgttaatatgccacaggacgatacagtgataatcgaagatgatcgtctaccggtcttgcctccacacttgagtgaccaatcaagctcctcctcccatgacgacgtggggttcgtgaccgcggacgccggaacatgggccaaggcagccatcagcgactccgccgactgttctctcagccccgacgtagaccccgtcttagctttccagcgcgaagggttcggacgacagtctatgtccgaaaaacgcacaaaacagttttctgatgcctcccagctcgactttgtgaaaacacggaaatccaagtccatggatctcggaatcgccgatgagacaaaattaaacaccgtagacgaccagaaggcagggtccccttctcgcgatgtggggccttcactaggcctgaagaagagctcttctttggaatcgctgcagactgcagtggcagaagtaactctgaacggagacattccctttcaccggcctagaccaaggatcatccggggccgcggatgtaatgaatccttcagggctgccatagataagtcatacgataagcctgccgtggatgacgacgatgaaggaatggagacactggaagaagatactgaggaaagtagtaggtccggtcgtgaaagtgtgtctacagcttccgatcagccttcccatagcctggagcgccagatgaatggcaatcaagagaaaggggataagactgatagaaaaaaggacaagaccggcaaagagaaaaaaaaggaccgtgataaggaaaaagacaagatgaaggcaaagaaggggatgctgaaagggctcggtgacatgtttagattcggaaaacatcgaaaggacgacaaaatcgaaaagacaggtaagattaaaatccaagaatctttcacatcagaggaggagaggattcggatgaagcaggaacaggagcgcattcaggcaaagacgcgagaatttcgagagaggcaggctagggagcgcgactatgctgaaattcaagatttccacaggacttttggttgcgacgacgaattaatgtatggtggcgtcagctcttatgagggctccatggccctgaatgcccgtccccaaagtccacgggaaggtcatatgatggacgccctctacgcacaggtgaagaagcccagaaactctaaaccttcaccagtggatagcaaccgctctactcccagcaatcacgataggatccaacgcctgcggcaggagtttcagcaggccaaacaggacgaggatgttgaggacagacggcgaacctattcctttgaacaaccctggccgaacgcacggccagcaacacagagtggtagacactccgtctcagtggaggtgcagatgcagagacagagacaggaagaaagagagtctagccaacaggctcagagacaatactcctcactgcctcgccagagtcggaaaaatgcctcctccgtgagtcaggactcgtgggaacagaactactcgcccggggagggattccagagcgccaaagaaaacccacgatatagttcttatcaagggagtagaaatgggtacttgggcggccacgggttcaacgcaagggtgatgttagaaacgcaagagctgctccgtcaggagcagcggaggaaagaacaacagatgaaaaagcagccgccttctgagggcccctcaaattacgattcctataagaaagtgcaggacccgtcctacgccccaccgaaaggaccattccgacaggatgtacctccttcacctagccaggtcgcgagactaaatcgtttgcagacccccgagaagggccgccctttctatagttag

SEQ ID NO: 202000 - DNA, 4071 bp, Artificial Sequence
  derived and/or modified sequence
atgaaggtgacagtgtgctttggaagaaccagggtggtggtgccctgtggagatggccacatgaaggtgttcagcctcatccagcaggccgtgacccgctacaggaaggccatcgccaaggaccccaactactggatccaggtgcaccggctggagcacggagatggcggcatcctggacctggatgacatcctgtgtgatgtggctgatgacaaggaccggctggtggccgtgtttgatgagcaggacccccaccacggcggagatggcaccagcgccagcagcacaggcacccagagccctgagatcttcggcagcgagctgggcaccaacaacgtgtctgccttccagccctaccaggccaccagcgagattgaggtgacccccagcgtgctgcgggccaacatgcccctgcacgtgagaagaagcagtgaccctgccctgattggcctgagcacctctgtgtctgacagcaacttcagcagcgaggagcccagcaggaagaaccccacccgctggagcaccacagctggcttcctgaagcagaacacagctggcagccccaagacctgtgacaggaagaaggatgagaactaccgcagcctgccccgggacaccagcaactggagcaaccagttccagagggacaatgcccggagcagcctgagcgccagccaccccatggtgggcaagtggctggagaagcaggagcaggatgaagatggaacagaggaggacaacagccgggtggagcctgtgggccacgccgacaccggcctggagcacatccccaacttcagcctggatgacatggtgaagctggtggaggtgcccaatgatggcggccccctgggcatccacgtggtgcccttcagcgcccggggcggccgcaccctgggcctgctggtgaagaggctggagaagggcggcaaggccgagcatgaaaatctcttccgggagaatgactgcatcgtgcgcatcaatgatggagacctgaggaacagaagatttgagcaggcccagcacatgttccggcaggccatgaggacccccatcatctggttccacgtggtgcctgctgccaacaaggagcagtatgagcagctgagccagagcgagaagaacaactactacagcagccgcttctccccagacagccagtacatcgacaacagatctgtgaacagcgctggcctgcacacagtgcagagggccccccggctgaaccaccccccagagcagattgacagccacagccggctgccccacagcgcccaccccagcggcaagcccccatctgccccagccagcgccccccagaatgtgttcagcaccaccgtgagcagcggctacaacaccaagaagattggcaagaggctgaacatccagctgaagaagggcacagagggcctgggcttcagcatcaccagcagagatgtgaccatcggcggcagcgcccccatctacgtgaagaacatcctgcccaggggggccgccatccaggacggccgcctgaaggccggggacaggctcatcgaggtgaatggagtggacctggtgggcaagagccaggaggaggtggtgtccctgctgcggagcaccaagatggagggcaccgtgtccctgctggtgttccggcaggaggatgccttccacccccgggagctgaatgctgagcccagccagatgcagatccccaaggagaccaaggccgaggatgaggacatcgtgctgaccccagatggcacccgggagttcctgacctttgaggtgcccctgaatgacagcggcagcgctggcctgggcgtgtctgtgaagggcaacagaagcaaggagaaccacgccgacctgggcatctttgtgaagagcatcatcaatggaggagctgccagcaaggatggccgcctgcgggtgaatgaccagctgattgctgtgaatggagagagcctgctgggcaagaccaaccaggatgccatggagaccctgcggcgctccatgagcacagagggcaacaagaggggcatgatccagctgattgtggcccggcgcatcagcaagtgcaatgagctgaagagccctggcagccccccaggccctgagctgcccattgaaacagccctggatgaccgggagcggcgcatcagccacagcctgtacagcggcatcgagggcctggatgagagccccagcagaaatgctgccctgagccgcatcatgggagagagcggcaagtaccagctgagccccaccgtgaacatgccccaggatgacaccgtcatcattgaagatgaccggctgcctgtgctgcccccccacctgagtgaccagagcagcagcagcagccatgatgatgtgggctttgtgacagcagatgctggcacctgggccaaggccgccatcagtgacagcgctgactgcagcctgagcccagatgtggaccctgtgctggccttccagcgggagggcttcggccggcagagcatgtctgagaagaggaccaagcagttcagtgatgccagccagctggactttgtgaagaccaggaagagcaagtccatggacctgggcattgctgatgagaccaagctgaacacagtggatgaccagaaggccggcagccccagcagagatgtgggccccagcctgggcctgaagaagagcagcagcctggagagcctgcagacagctgtggccgaggtgaccctgaatggagacatccccttccaccggccccggccccgcatcatccggggccggggctgcaatgaaagcttccgggccgccatcgacaagagctatgacaagccagctgtggatgatgatgatgagggcatggagaccctggaggaggacacagaggagagcagccgcagcggccgggagagcgtgtccacagccagtgaccagcccagccacagcctggagcggcagatgaatggaaaccaggagaagggggacaagacagacaggaagaaggacaagacaggcaaggagaagaagaaggaccgggacaaggagaaggacaagatgaaggccaagaagggcatgctgaagggcctgggggacatgttccgctttgggaagcacaggaaggatgacaagattgagaagacaggcaagatcaagatccaggagagcttcaccagcgaggaggagcgcatccgcatgaagcaggagcaggagcgcatccaggccaagacccgggagttccgggagcggcaggcccgggagcgggactatgcagagatccaggacttccacaggaccttcggctgtgatgatgagctgatgtatggaggagtgtcctcctatgagggctccatggccctgaatgcccggccccagagcccccgggagggccacatgatggatgccctgtatgcccaggtgaagaagcccaggaacagcaagcccagccctgtggacagcaacagaagcacccccagcaaccacgaccgcatccagaggctgcggcaggagttccagcaggccaagcaggatgaagatgtggaggacagaagaaggacctacagctttgagcagccctggcccaatgcccggcctgccacccagagcggccgccacagcgtgtctgtggaggtgcagatgcagaggcagaggcaggaggagcgggagagcagccagcaggcccagaggcagtacagcagcctgccccggcagagcaggaagaatgccagctctgtgtcccaggacagctgggagcagaactacagccctggagagggcttccagagcgccaaggagaacccccgctacagcagctaccagggcagcagaaatggctacctgggcggccacggcttcaatgcccgggtgatgctggagacccaggagctgctgcggcaggagcagaggaggaaggagcagcagatgaagaagcagccccccagcgagggccccagcaactatgacagctacaagaaggtgcaggaccccagctatgccccacccaagggccccttccggcaggatgtgccccccagccccagccaggtggcccggctgaaccggctgcagaccccagagaagggccggcccttctacagctag

SEQ ID NO: 202001 - DNA, 4071 bp, Artificial Sequence
  derived and/or modified sequence
atgaaggtgaccgtgtgcttcggccggacccgggtggtggtgccctgcggggatggccatatgaaagtgttttcacttatccagcaggctgttacaaggtatcggaaagccatcgcaaaggaccctaactattggattcaggtgcacaggctggagcacggcgatggcggcatcctcgatctcgacgatattctctgtgacgtcgccgacgataaagatcgcctcgtcgccgtcttcgatgaacaggacccccaccacgggggagatggaacctccgcaagttccacaggaacccagagccccgagatctttggaagtgaacttggaacaaacaacgtgtccgcttttcagccgtatcaggctacaagcgaaattgaggttaccccttctgtattgagggcaaatatgcctctacatgtccgccgctcatctgatccggctttaatcggtctgtcaaccagtgtgagcgattctaacttttcttcagaggagccatcacggaaaaacccaacgagatggagtactacagcagggtttcttaagcagaatacagccggaagcccgaagacgtgtgataggaagaaggatgaaaattaccggtcgctgccaagagatacttctaattggtcgaaccagtttcaacgcgacaacgctcgctcaagcctgtccgcttctcatcctatggtgggcaagtggctggagaagcaagagcaggacgaggatggaaccgaggaagataactcccgagtagagcccgtgggccacgcggacaccggtctggaacacatccctaacttcagcttggacgacatggtgaagttggtggaggttcccaatgacgggggcccgctgggaatccatgttgtgcctttttcggctaggggtggaaggacattaggcctgctggtcaagaggctggagaagggtggcaaagccgaacacgaaaatttattccgggagaatgactgcatcgtgagaataaacgatggggaccttagaaatcggcgattcgagcaggcccagcacatgtttcggcaggccatgcgcacccctatcatttggttccacgttgttcccgccgcaaataaggaacagtacgaacagctgtctcagtctgaaaaaaacaattactactctagtaggttttcgcctgattctcagtacatcgacaacaggagtgtgaacagtgcgggcctgcatacagtgcaacgagccccaaggcttaaccaccctccagagcagatagatagccattcacgcttgccccattctgcccacccatcaggtaaaccaccatctgctcctgcttccgccccacagaatgtcttctcaacaaccgttagttctggatataacactaaaaaaatcggcaagagacttaatattcagctgaagaagggaaccgagggcctgggtttcagtattacttcgcgtgacgtgaccatcgggggctccgcacccatctacgtgaaaaatattctgccgcgcggcgctgccattcaagatggtaggctgaaagcgggggatcggttgatcgaggtgaacggagttgacctggtaggtaagagccaggaagaagtagtgtccctcctccggtctacgaagatggaaggcactgtcagcctcctggtgtttaggcaggaagatgccttccaccctcgagagcttaacgcagagccgtcccagatgcagatccccaaagaaaccaaagctgaagatgaggatattgtgttgacaccagatggaacgagggaattcttaacattcgaggtgccccttaatgactccggctcagcaggccttggggtgtcagtgaagggaaataggtctaaagaaaatcacgctgatctgggaattttcgttaagagtatcatcaacggcggagctgcctcaaaagacggcaggctccgcgtgaatgaccagctgatagctgttaacggcgagagtttactcggaaagacgaatcaggatgcaatggagacgctgcgtagatctatgtcaacagaaggcaataagcggggaatgattcagctcatagttgctcgacggatcagcaagtgcaacgaattaaaatctccaggctcaccacctggaccagaattacctattgaaacggctttggatgaccgagaacggcgcatcagtcactctctgtacagcggaattgagggccttgacgaaagccccagcagaaatgctgccctgtcacggatcatgggggagtctgggaagtaccagctgagccctacagtgaacatgcctcaggacgacactgttataattgaggacgacagactaccagtactccccccccacctcagcgatcagagtagcagcagttcgcatgatgatgtaggcttcgtcactgccgatgcagggacttgggcaaaggcagcgatcagtgactccgccgactgcagcctcagccctgatgttgatcctgtacttgcgtttcagcgagaaggctttggccgccagtccatgtccgagaagcgcacaaagcagtttagcgatgcgagtcagttggatttcgtcaaaacgcgtaagtccaaaagtatggatttgggaattgctgatgaaaccaaactaaacaccgtggatgaccagaaggctggatccccttctcgcgacgttggtccttctctcggactaaaaaaatcctcatccctagaatctctgcagacagctgtcgccgaggttactctcaacggtgacatccccttccatcgcccccgaccacggatcatacggggaagaggttgcaacgagtctttccgagcagccatcgacaaatcttacgataagcccgctgtcgatgatgatgacgagggaatggaaaccttagaggaagatacagaggagagctcccgttccggccgcgagagtgtaagtaccgccagtgatcaaccctcccacagtttggagcgccaaatgaatggaaatcaggagaagggtgacaaaaccgatcgaaaaaaagataagactggcaaggaaaaaaagaaggatagagacaaggagaaagacaagatgaaagcaaagaaagggatgttaaaaggccttggtgacatgttcaggttcggaaaacataggaaggatgataaaatcgagaaaacaggcaagataaagattcaggagagcttcacaagtgaagaggaaagaatccgcatgaaacaggagcaggagcggattcaggccaagacaagagaatttagagagcggcaggctagggagcgagattacgctgagatacaggattttcaccgcacttttggctgcgatgacgagctgatgtatggaggtgtgagcagctatgagggcagtatggccttgaacgctagaccccaatcccctcgggagggacacatgatggatgccctgtatgctcaggtaaagaagccacggaacagcaaaccgagcccagtggactctaacaggtccaccccatctaaccacgaccgaatacagcgacttcggcaagagttccagcaggcaaagcaagatgaggacgtcgaagatagacgcagaacatactcttttgagcagccatggccgaatgcccggcctgctacccagtccggccggcatagtgtatctgtggaggtgcagatgcagcgccagagacaagaggaacgcgagagctcacaacaggcccaacgccaatactctagcctgccccggcagtcacggaaaaacgcgtcttcagtgagccaggacagttgggagcagaactacagccccggcgaggggttccagtctgccaaggaaaaccctcgctacagctcttaccagggctctagaaacggctaccttggaggtcacgggtttaatgcacgcgtgatgctggaaacccaggagcttttgcggcaggaacaaagacggaaggagcagcagatgaaaaagcagccacctagcgagggccctagcaactacgatagctataaaaaagtccaggacccatcatatgcccccccaaaaggtcccttccgccaagatgtcccgccgtccccgagtcaggtggcccgtctaaacaggttgcagacacctgaaaaaggcagacccttctattcttag

SEQ ID NO: 202002 - DNA, 6005 bp, Artificial Sequence
  derived and/or modified sequence
gcggccccgagcgagcgccagcgccacacagccccgggcagccgccggcgagcgcgccgcgacgccgaacaggtggccggaggctgcgggcgccgcggcggggagaggcgaggcaagccccgggcgaagcgaggcgaggcgagggcggccgggccgggcatgcgagctgagcggccccccggcgtcgccgccgcctgcccgcgcccctagccgcccgcgcgcccgagtccccagcggctcctccgcgcccagcgtcctcggtcccggcctcggctgctccggctgcgctcggcgaggggcgcgggcccgcccgcggcggcggcggcatgaaagtgaccgtgtgcttcggacggacccgggtggtcgtgccgtgcggggacggccacatgaaagttttcagcctcatccagcaggcggtgacccgctaccggaaggccatcgccaaggatccaaactactggatacaggtgcatcgcttggaacatggagatggaggaatactagaccttgatgacattctttgtgatgtagcagacgataaagacagactggtagcagtgtttgatgagcaggatccacatcacggaggtgatggcaccagtgccagttccacgggtacccagagcccagagatatttggtagtgagcttggcaccaacaatgtctcagcctttcagccttaccaagcaacaagtgaaattgaggtcacaccttcagtccttcgagcaaatatgcctcttcatgttcgacgcagtagtgacccagctctaattggcctctccacttctgtcagtgatagtaatttttcctctgaagagccttcaaggaaaaatcccacacgctggtcaacaacagctggcttcctcaagcagaacactgctgggagtcctaaaacctgcgacaggaagaaagatgaaaactacagaagcctcccgcgggatactagtaactggtctaaccaatttcagagagacaatgctcgctcgtctctgagtgccagtcacccaatggtgggcaagtggctggagaaacaagaacaggatgaggatgggacagaagaggataacagtcgtgttgaacctgttggacatgctgacacgggtttggagcatatacccaacttttctctggatgatatggtaaagctcgtagaagtccccaacgatggagggcctctgggaatccacgtagtgcctttcagtgctcgaggcggcagaaccctggggttattagtaaaacgattggagaaaggtggtaaagctgaacatgaaaatctttttcgtgagaatgattgcattgtcaggattaatgatggcgaccttcgaaatagaagatttgaacaagcacaacatatgtttcgccaagccatgcgtacacccatcatttggttccatgtggttcctgcagcaaataaagagcagtatgaacaactatcccaaagtgagaagaacaattactattcaagccgttttagccctgacagccagtatattgacaacaggagtgtgaacagtgcagggcttcacacggtgcagagagcaccccgactgaaccacccgcctgagcagatagactctcactcaagactacctcatagcgcacacccctcgggaaaaccaccatccgctccagcctcggcacctcagaatgtatttagtacgactgtaagcagtggttataacaccaaaaaaataggcaagaggcttaatatccagcttaagaaaggtacagaaggtttgggattcagcatcacttccagagatgtaacaataggtggctcagctccaatctatgtgaaaaacattctcccccggggggcggccattcaggatggccgacttaaggcaggagacagacttatagaggtaaatggagtagatttagtgggcaaatcccaagaggaagttgtttcgctgttgagaagcaccaagatggaaggaactgtgagccttctggtctttcgccaggaagacgccttccacccaagggaactgaatgcagagccaagccagatgcagattccaaaagaaacgaaagcagaagatgaggatattgttcttacacctgatggcaccagggaatttctgacatttgaagtcccacttaatgattcaggatctgcaggccttggtgtcagtgtcaaaggtaaccggtcaaaagagaaccacgcagatttgggaatctttgtcaagtccattattaatggaggagcagcatctaaagatggaaggcttcgggtgaatgatcaactgatagcagtaaatggagaatccctgttgggcaagacaaaccaagatgccatggaaaccctaagaaggtctatgtctactgaaggcaataaacgaggaatgatccagcttattgttgcaaggagaataagcaagtgcaatgagctgaagtcacctgggagcccccctggacctgagctgcccattgaaacagcgttggatgatagagaacgaagaatttcccattccctctacagtgggattgaggggcttgatgaatcgcccagcagaaatgctgccctcagtaggataatgggtgagtcaggtaaataccagctgtcccctacagtgaatatgccccaagatgacactgtcattatagaagatgacaggttgccagtgcttcctccacatctctctgaccagtcctcttccagctcccatgatgatgtggggtttgtgacggcagatgctggtacttgggccaaggctgcaatcagtgattcagccgactgctctttgagtccagatgttgatccagttcttgcttttcaacgagaaggatttggacgtcagagtatgtcagaaaaacgcacaaagcaattttcagatgccagtcaattggatttcgttaaaacacgaaaatcaaaaagcatggatttaggtatagctgacgagactaaactcaatacagtggatgaccagaaagcaggttctcccagcagagatgtgggtccttccctgggtctgaagaagtcaagctcgttggagagtctgcagaccgcagttgccgaggtgactttgaatggggatattcctttccatcgtccacggccgcggataatcagaggcaggggatgcaatgagagcttcagagctgccatcgacaaatcttatgataaacccgcggtagatgatgatgatgaaggcatggagaccttggaagaagacacagaagaaagttcaagatcagggagagagtctgtatccacagccagtgatcagccttcccactctctggagagacaaatgaatggaaaccaagagaaaggtgataagactgatagaaaaaaggataaaactggaaaagaaaagaagaaagatagagataaggagaaggataaaatgaaagccaagaagggaatgctgaagggcttgggagacatgttcaggtttggcaaacatcgaaaagatgacaagattgagaaaacgggtaaaataaaaatacaggaatcctttacatcagaagaggagaggatacgaatgaagcaggagcaggagaggattcaagccaaaactcgagaatttagggaacgacaagctcgagagcgtgactatgctgaaattcaagattttcatcggacatttggctgtgatgatgagttaatgtatgggggagtttcttcttatgaaggttccatggctctcaacgctagacctcagagcccacgagaagggcatatgatggatgctttgtatgcccaagtcaagaagccgcggaattccaaaccctcacctgtagacagtaacagatcaactcctagcaatcatgatcggatacagcgtctgaggcaagaatttcagcaagcaaagcaagatgaagatgtagaagatcgtcggcggacctatagttttgagcaaccctggccgaacgcacggccggcgacgcagagcgggcgacactcggtgtccgtggaggtgcagatgcagcggcagcggcaggaggagcgcgagagctcccagcaggcccagcgccagtacagctctctgcctcggcaaagcaggaaaaatgccagctcggtctcccaggactcttgggagcagaactactcccctggggaaggcttccagagtgccaaagagaaccccaggtactccagctaccaaggctccaggaacggctacctgggaggacatggcttcaacgccagggtcatgctggaaactcaggagctccttcgccaggaacagaggcggaaggagcagcagatgaagaagcagcctccttccgaggggcccagcaactatgactcgtataagaaagtccaggaccccagttacgcccctcccaaggggcccttccggcaagatgtgcccccctccccttctcaggttgcgaggctgaacagacttcagactcctgagaaagggaggcccttctattcctgagcacgcaaataacggatgcttcatgtcgcgcaataaaagacattttcctatgaagacttgtattttgggagtttttttaaaacctcgatggtactatggagtatttctgttgttggtatcagtgcctttaagcggtgtaggcaaagaaatggaaggccttaatgtctttgccactatgtctcaagtgtctgtttcatggaaggatttcccaccctgtgacaatcatctgtttgaggtgttcatatgctctgcgcctctccacagtaccaggaatctcggccctactcatgagttgtccgcggcttggttgtaacatccctgcaccacttgcagtgacaaattcacctgaagtggaggatgacgtgcggccctgtttctccctctaagttctcttagctatgggatgacatcttagtctctggtggaggaaaagtgggcgacatacaccaaaaattggggctttctggtacttcacagcacagccatttgtcgtactttgtcatcactgtggttttctctttcctttctcagctctttgtgacgggagagtcggtcatcctattacagaagctaagccatagtccaacattgtttggtcaccatgggggtccttttgtaactgccttatgactcaacattaccaataaagtgatgatcctggtctgcgtttatacatacgcttgttcggtcctgttcctgacacgtgggttgagtcaccacagctctgtgtggggaacgtgggagacaggagtggctcctgccgggggaagctgggcctgccattggccctgtgtctatcatgaggggagagctaagaaagaaattctcctaggaagagctcatggcccagtacatcctagtaattattttaattagtttttgttctgacagcttgtcaggaagggcacagaatgggacagagataaaccagacagtcattttgatctgctctctacggtttttcaagtcagaggcaattgatgcttgtctaatgcatccacacactgcatgtctgactggcgatgccgcgctcctaagtagttctgccatgaaacataaaagacaaaggaaaagccgttacacatcacacagagaacattttcgggtcccacagcggtggtggcaggaagctcactctcgcgtcagtattagagtgtgtgtgtgggtctcggggatctcggtggctcccatcttccttcattgttctgaacatcctgtattgtaaaccatggctggggtgctaaagtgcctgtgaatcccgatgtggaaaaagctggaggtgaaagctcagcataccatgtatttactttaaaaacagaaaaaaagacatgtatggatatgtctattttttttttattggcacattgtatttttgtgttgacttgtttttagaaatgatgtgtccacacacgtacccgtgtctcttctgcatttctgtgtcatggttctgtttcttaatcacgtgcggcggtgtctaagtggtgttaccagtgtacgcgcagtgaccttggatgacagtggctctttctcacagcctcccctgagctgtgagaaacagctttctctgtacatatgcaactcctaataaaaggcatatttcttcctgtt

SEQ ID NO: 202003 - DNA, 4071 bp, Artificial Sequence
  derived and/or modified sequence
atgaaggtcactgtgtgctttggccgtacgagggtggtggtgccctgcggcgacggacacatgaaggttttcagtttaatccaacaggctgtgacccgatacaggaaggccatagcgaaagaccccaattactggattcaggtgcaccgattagaacacggagatgggggaattctagacctcgacgacattctgtgcgatgtcgctgacgataaggaccggcttgtggcagtatttgatgagcaggacccccaccatgggggtgacggcactagcgccagtagtacaggcacgcagtccccagagatcttcggcagtgaacttggcacaaacaatgtttccgctttccagccctatcaggctacctctgagatcgaagtgactccaagtgttttgcgagcaaatatgcctctgcacgtcagacggagttctgatccagcccttattgggttgtcaaccagcgtcagcgattccaacttttcctctgaggagccttcaagaaagaaccccactaggtggagtactacagccggttttctgaaacagaataccgctggctcaccgaaaacctgcgacaggaagaaggacgagaattatcggtcccttcccagagacacctcaaattggtccaaccagtttcagagagataacgcccgaagctcactgtctgcttcacatccaatggtgggaaagtggctggagaaacaggaacaggatgaggacggaacagaggaggataacagtcgcgtagaacctgtgggccacgctgacaccgggttagaacacatccccaacttcagtctggacgacatggtgaagctagtggaagtcccaaacgatggcggaccattaggcatccacgtggtacccttcagcgccagagggggaaggactctgggacttttagtgaagcggctagagaagggcggtaaagccgaacatgagaatctcttcagggagaatgactgcattgtccgcatcaacgatggggatctgcgcaaccggcgtttcgaacaggctcagcatatgttcagacaagctatgcgaacgcccatcatctggtttcacgtggtcccggcagccaataaagagcagtatgagcagttgagccagtctgaaaagaacaattattatagcagccgcttcagccccgattcacagtacatcgacaacagatccgtgaactccgctgggctgcacaccgtacagagggccccacggctgaaccatccaccggaacagatagatagccatagtaggctgcctcactccgcccacccaagtgggaaacctccatctgctccggctagtgccccacagaacgttttcagcacgactgtgagctcagggtataacacaaagaagattggtaagcgcctgaatattcagctcaaaaagggcacagagggcctgggcttctccattaccagcagagatgttacgatcggagggtcagctcccatttacgtgaagaacattcttcctcgaggcgctgcgatccaggatgggaggcttaaagccggagacagactaatcgaggtgaatggggtcgacctggtcggtaagtcccaagaagaggtggtgagccttcttcggtcaaccaagatggaaggaacagtttcactcctagtgttccggcaagaagacgctttccaccccagggaactgaatgctgagccatcccagatgcagataccaaaagagaccaaggcagaggacgaggacattgtactgacgcctgacggtaccagagaatttttaaccttcgaggtccctttgaatgactccggctccgcaggactgggggtatccgtgaaagggaaccgttcaaaggaaaaccacgcggacctcggaatctttgtcaaatcaataataaatgggggtgcagcatcaaaggacggaaggttgagagtgaatgatcaattgattgctgtaaatggggaatctctcctggggaagacaaaccaggatgccatggagactctgagacgcagcatgtcaacagaaggtaacaagcgcggtatgattcagctgattgtcgccaggcgcatatccaagtgcaacgagttgaagtctccaggatctccaccaggtcccgagctgccaattgagactgctttagatgaccgtgaaaggcgcatatctcactcgctctattctggaatcgaggggctggatgagtcaccaagcagaaatgctgctctatcccgaattatgggggagagcgggaaatatcagctctcaccaactgttaacatgccgcaggatgataccgtcattatcgaggatgatagactacccgtgctgccccctcacctaagcgaccagtcatcctccagctcccatgacgacgtgggcttcgtgaccgcagacgctggcacatgggccaaggcggcaattagcgattcagccgactgctcactctctccagacgtcgacccagtccttgccttccagagagagggctttggtaggcagtccatgtctgaaaaacgcaccaagcagttcagtgacgcttcacagttagattttgtgaaaacgcggaagtctaaaagcatggacctgggcatagccgacgaaactaagctcaacacagtggacgaccagaaggccggttctccttcgcgcgacgtcggcccatcactcggcctaaagaagtcatcttcactcgagagtttgcagacggctgtcgcagaagttaccctgaatggcgatattccatttcaccgcccacggcctagaataatcagaggcaggggctgcaatgagagtttccgcgctgctatagacaaatcctatgacaaacctgctgtggatgatgatgacgaggggatggagactctcgaagaggacaccgaggagagctcgaggtcggggagagagagcgttagcacggcttccgaccaaccgtcacacagcctggaacgacagatgaacgggaatcaggagaagggagacaagaccgatcgaaagaaagataaaacaggaaaagagaagaagaaagatagggacaaggagaaggataagatgaaagccaaaaagggcatgcttaagggactgggagacatgtttcgatttgggaaacatcgaaaggatgacaagattgaaaagacgggtaaaataaaaatccaagagtccttcacctctgaggaagagagaatcagaatgaaacaggagcaggaaagaatccaggcgaaaacccgggagttcagagagcggcaggccagagaaagagattatgccgagatccaggactttcaccggacctttggctgcgatgatgagctcatgtatggaggcgtttcatcctatgagggctctatggcactgaatgccaggcctcaaagtcctagagaaggacatatgatggacgcactttatgcccaggtgaaaaaacccaggaattccaagcccagccccgtggatagcaatcgttctaccccctccaatcacgaccgtatccaaagattgcgacaggaattccagcaggccaagcaggatgaggacgtggaggaccgcagaagaacatacagctttgaacagccgtggcctaacgctagaccggcaacacagtctgggcgacattcagtatcagtagaggtccaaatgcagagacagaggcaggaagaaagggagtcgagtcagcaagctcagcgccagtactcgagtctgcctagacagtccagaaagaatgcctcttctgtgtcgcaagacagctgggaacaaaattacagccctggcgagggatttcagtctgcaaaagaaaatcccagatattcatcttatcaaggaagtcgcaatggttatctaggaggccacggattcaacgccagggtaatgctcgagacacaagaactgctccgccaggaacagcgaagaaaggagcagcagatgaagaagcagcctccaagtgaagggccttctaattatgatagttacaagaaagtgcaagatccttcctacgcaccacccaagggtccctttcgccaggatgtccctccgagccccagccaggtcgcccgtcttaaccgcttacaaacacccgaaaagggccgacctttttactcttag

SEQ ID NO: 202004 - DNA, 4071 bp, Artificial Sequence
  derived and/or modified sequence
atgaaggtgaccgtgtgcttcggcagaaccagagtggtggtgccctgcggcgacggccacatgaaggtgttcagcctgatccagcaggccgtgaccagatacagaaaggccatcgccaaggaccccaactactggatccaggtgcacagactggagcacggcgacggcggcatcctggacctggacgacatcctgtgcgacgtggccgacgacaaggacagactggtggccgtgttcgacgagcaggacccccaccacggcggcgacggcaccagcgccagcagcaccggcacccagagccccgagatcttcggcagcgagctgggcaccaacaacgtgagcgccttccagccctaccaggccaccagcgagatcgaggtgacccccagcgtgctgagagccaacatgcccctgcacgtgagaagaagcagcgaccccgccctgatcggcctgagcaccagcgtgagcgacagcaacttcagcagcgaggagcccagcagaaagaaccccaccagatggagcaccaccgccggcttcctgaagcagaacaccgccggcagccccaagacctgcgacagaaagaaggacgagaactacagaagcctgcccagagacaccagcaactggagcaaccagttccagagagacaacgccagaagcagcctgagcgccagccaccccatggtgggcaagtggctggagaagcaggagcaggacgaggacggcaccgaggaggacaacagcagagtggagcccgtgggccacgccgacaccggcctggagcacatccccaacttcagcctggacgacatggtgaagctggtggaggtgcccaacgacggcggccccctgggcatccacgtggtgcccttcagcgccagaggcggcagaaccctgggcctgctggtgaagagactggagaagggcggcaaggccgagcacgagaacctgttcagagagaacgactgcatcgtgagaatcaacgacggcgacctgagaaacagaagattcgagcaggcccagcacatgttcagacaggccatgagaacccccatcatctggttccacgtggtgcccgccgccaacaaggagcagtacgagcagctgagccagagcgagaagaacaactactacagcagcagattcagccccgacagccagtacatcgacaacagaagcgtgaacagcgccggcctgcacaccgtgcagagagcccccagactgaaccacccccccgagcagatcgacagccacagcagactgccccacagcgcccaccccagcggcaagccccccagcgcccccgccagcgccccccagaacgtgttcagcaccaccgtgagcagcggctacaacaccaagaagatcggcaagagactgaacatccagctgaagaagggcaccgagggcctgggcttcagcatcaccagcagagacgtgaccatcggcggcagcgcccccatctacgtgaagaacatcctgcccagaggcgccgccatccaggacggcagactgaaggccggcgacagactgatcgaggtgaacggcgtggacctggtgggcaagagccaggaggaggtggtgagcctgctgagaagcaccaagatggagggcaccgtgagcctgctggtgttcagacaggaggacgccttccaccccagagagctgaacgccgagcccagccagatgcagatccccaaggagaccaaggccgaggacgaggacatcgtgctgacccccgacggcaccagagagttcctgaccttcgaggtgcccctgaacgacagcggcagcgccggcctgggcgtgagcgtgaagggcaacagaagcaaggagaaccacgccgacctgggcatcttcgtgaagagcatcatcaacggcggcgccgccagcaaggacggcagactgagagtgaacgaccagctgatcgccgtgaacggcgagagcctgctgggcaagaccaaccaggacgccatggagaccctgagaagaagcatgagcaccgagggcaacaagagaggcatgatccagctgatcgtggccagaagaatcagcaagtgcaacgagctgaagagccccggcagcccccccggccccgagctgcccatcgagaccgccctggacgacagagagagaagaatcagccacagcctgtacagcggcatcgagggcctggacgagagccccagcagaaacgccgccctgagcagaatcatgggcgagagcggcaagtaccagctgagccccaccgtgaacatgccccaggacgacaccgtgatcatcgaggacgacagactgcccgtgctgcccccccacctgagcgaccagagcagcagcagcagccacgacgacgtgggcttcgtgaccgccgacgccggcacctgggccaaggccgccatcagcgacagcgccgactgcagcctgagccccgacgtggaccccgtgctggccttccagagagagggcttcggcagacagagcatgagcgagaagagaaccaagcagttcagcgacgccagccagctggacttcgtgaagaccagaaagagcaagagcatggacctgggcatcgccgacgagaccaagctgaacaccgtggacgaccagaaggccggcagccccagcagagacgtgggccccagcctgggcctgaagaagagcagcagcctggagagcctgcagaccgccgtggccgaggtgaccctgaacggcgacatccccttccacagacccagacccagaatcatcagaggcagaggctgcaacgagagcttcagagccgccatcgacaagagctacgacaagcccgccgtggacgacgacgacgagggcatggagaccctggaggaggacaccgaggagagcagcagaagcggcagagagagcgtgagcaccgccagcgaccagcccagccacagcctggagagacagatgaacggcaaccaggagaagggcgacaagaccgacagaaagaaggacaagaccggcaaggagaagaagaaggacagagacaaggagaaggacaagatgaaggccaagaagggcatgctgaagggcctgggcgacatgttcagattcggcaagcacagaaaggacgacaagatcgagaagaccggcaagatcaagatccaggagagcttcaccagcgaggaggagagaatcagaatgaagcaggagcaggagagaatccaggccaagaccagagagttcagagagagacaggccagagagagagactacgccgagatccaggacttccacagaaccttcggctgcgacgacgagctgatgtacggcggcgtgagcagctacgagggcagcatggccctgaacgccagaccccagagccccagagagggccacatgatggacgccctgtacgcccaggtgaagaagcccagaaacagcaagcccagccccgtggacagcaacagaagcacccccagcaaccacgacagaatccagagactgagacaggagttccagcaggccaagcaggacgaggacgtggaggacagaagaagaacctacagcttcgagcagccctggcccaacgccagacccgccacccagagcggcagacacagcgtgagcgtggaggtgcagatgcagagacagagacaggaggagagagagagcagccagcaggcccagagacagtacagcagcctgcccagacagagcagaaagaacgccagcagcgtgagccaggacagctgggagcagaactacagccccggcgagggcttccagagcgccaaggagaaccccagatacagcagctaccagggcagcagaaacggctacctgggcggccacggcttcaacgccagagtgatgctggagacccaggagctgctgagacaggagcagagaagaaaggagcagcagatgaagaagcagccccccagcgagggccccagcaactacgacagctacaagaaggtgcaggaccccagctacgccccccccaagggccccttcagacaggacgtgccccccagccccagccaggtggccagactgaacagactgcagacccccgagaagggcagacccttctacagctag

SEQ ID NO: 202005 - protein, 723 aa, Artificial Sequence
  derived and/or modified sequence
MRLWKAVVVTLAFMSVDICVTTAIYVFSHLDRSLLEDIRHFNIFDSVLDLWAACLYRSCLLLGATIGVAKNSALGPRRLRASWLVITLVCLFVGIYAMVKLLLFSEVRRPIRDPWFWALFVWTYISLGASFLLWWLLSTVRPGTQALEPGAATEAEGFPGSGRPPPEQASGATLQKLLSYTKPDVAFLVAASFFLIVAALGETFLPYYTGRAIDGIVIQKSMDQFSTAVVIVCLLAIGSSFAAGIRGGIFTLIFARLNIRLRNCLFRSLVSQETSFFDENRTGDLISRLTSDTTMVSDLVSQNINVFLRNTVKVTGVVVFMFSLSWQLSLVTFMGFPIIMMVSNIYGKYYKRLSKEVQNALARASNTAEETISAMKTVRSFANEEEEAEVYLRKLQQVYKLNRKEAAAYMYYVWGSGSVGSVYSGLMQGVGAAEKVFEFIDRQPTMVHDGSLAPDHLEGRVDFENVTFTYRTRPHTQVLQNVSFSLSPGKVTALVGPSGSGKSSCVNILENFYPLEGGRVLLDGKPISAYDHKYLHRVISLVSQEPVLFARSITDNISYGLPTVPFEMVVEAAQKANAHGFIMELQDGYSTETGEKGAQLSGGQKQRVAMARALVRNPPVLILDEATSALDAESEYLIQQAIHGNLQKHTVLIIAHRLSTVEHAHLIVVLDKGRVVQQGTHQQLLAQGGLYAKLVQRQMLGLQPAADFTAGHNEPVANGSHKA

SEQ ID NO: 202006 - DNA, 2172 bp, Artificial Sequence
  derived and/or modified sequence
atgcgcctctggaaggccgtcgtggtcacattggccttcatgtcagtggatatttgcgtaaccactgcgatttacgtgttcagtcacttggatagatctctgctcgaagacattaggcacttcaatatctttgattcagtgttagacctgtgggccgcttgtctgtataggagctgtctgctgctgggtgccaccatcggcgtcgctaagaattctgcactgggaccgaggcggctgagggccagctggctggtcatcacactggtgtgcctgttcgtcgggatatatgcgatggtaaagctgcttttgttctccgaagttcgacggcctataagggacccatggttctgggccttatttgtgtggacatacatttctctgggggcatccttcttgttgtggtggctgttgagtacggtgcggcctggcactcaggccctcgaacccggagccgcaactgaagccgagggatttccaggaagtggtcgacccccacccgaacaggcttctggagcaacactccagaagctgctgagttataccaaaccggacgtggctttcctagtggccgcctcctttttccttattgtagctgcactcggtgagaccttcctaccatactatacaggtagggctattgatgggatagtgatccagaagtccatggatcaattttccactgcagttgtcatcgtgtgtttattggctattgggtcctcttttgccgcaggaatccgcggaggaatcttcaccttaatcttcgctcgcttgaatatacgactccgtaactgccttttccggagccttgtgtcccaagagacctccttctttgatgaaaaccgcacgggggatctgataagccgtttgacaagcgatacaacgatggtgagcgacctcgtgtcacagaacattaatgtctttttgcgcaacacagtgaaagtgacgggggtggtggtgtttatgttttctttgtcatggcaactctcactggtgacctttatgggatttcccataatcatgatggtgtctaacatctacgggaagtattataagcgtctgagtaaggaagtgcaaaatgctctggctcgggccagtaataccgccgaggagaccatctctgcgatgaaaacggtgcgatcctttgcgaacgaggaagaggaggcagaggtatatctgagaaagctccaacaagtgtacaaattaaacaggaaggaggccgctgcctacatgtactacgtatgggggtcagggtccgtgggaagcgtgtactctggattaatgcagggtgtcggggctgctgagaaagtctttgaattcatcgaccgacagcctactatggttcacgacggcagtctggcacccgatcacctggagggtcgcgtcgacttcgagaatgtgacttttacatacagaactcgcccccatacccaggtgctgcaaaatgtctccttcagcctgtctcccggaaaggtgactgctcttgtgggaccctcagggtcgggtaagtcaagctgcgtcaacattctcgaaaatttctaccctctagagggcgggcgtgtactgttggatggaaaaccgatatccgcatatgatcacaagtacttgcatcgagttatcagtctggtgtcccaggagccagtactcttcgcccggagcatcacggataatatctcatacggactaccgacagtgccatttgagatggtcgtcgaagccgcacagaaggccaacgcccacgggttcattatggaactgcaggatggatacagtacggagaccggggaaaagggagcgcagctgtccggtggtcagaagcaaagagttgccatggcccgagctctagtgcggaacccacctgtgctcatcctggacgaagccacatcagccttggatgccgagagcgagtacttgattcaacaagcaatccacgggaaccttcaaaaacacacagtgttgattatcgcccacagactgtctactgtcgaacacgctcacctcattgtggtgctggataaaggacgcgtagtacagcaagggactcaccagcagctgcttgctcagggggggctgtatgccaagctggtccagagacagatgttgggtcttcagcctgccgccgacttcacagctggtcacaatgaacccgttgccaacggtagtcacaaggcctag

SEQ ID NO: 202007 - DNA, 2172 bp, Artificial Sequence
  derived and/or modified sequence
atgaggctgtggaaggctgtggtggtgaccctggccttcatgtctgtggacatctgtgtgaccacagccatctacgtgttcagccacctggacaggagcctgctggaggacatccgccacttcaacatctttgacagcgtgctggacctgtgggccgcctgcctgtaccgcagctgcctgctgctgggcgccaccatcggcgtggccaagaacagcgccctgggcccccggcggctgcgggcctcctggctggtgatcaccctggtgtgcctgtttgtgggcatctatgccatggtgaagctgctgctcttcagcgaggtgcggcggcccatccgggacccctggttctgggccctgtttgtgtggacctacatcagcctgggcgccagcttcctgctgtggtggctgctgagcacagtgcggcccggcacccaggccctggagcctggagctgccacagaagctgagggcttccctggcagcggccggcccccacctgagcaggccagcggggccaccctgcagaagctgctgagctacaccaagccagatgtggccttcctggtggccgccagcttcttcctgattgtggccgccctgggggagaccttcctgccctactacacaggccgggccattgatggcatcgtcatccagaagtccatggaccagttcagcacagctgtggtgattgtgtgcctgctggccatcggcagcagctttgctgctggcatccggggcggcatcttcaccctcatctttgcccggctgaacatccggctgaggaactgcctcttccgcagcctggtgtcccaggagaccagcttctttgatgaaaatagaactggagacctgatcagccggctgaccagtgacaccaccatggtgtctgacctggtgtcccagaacatcaacgtgttcctgaggaacacagtgaaggtgactggagtggtggtgttcatgttcagcctgtcctggcagctgagcctggtgaccttcatgggcttccccatcatcatgatggtgagcaacatctacggcaagtactacaagaggctgagcaaggaggtgcagaatgccctggcccgggccagcaacacagctgaggagaccatcagcgccatgaagacagtgcgcagctttgccaatgaggaggaggaggccgaggtgtacctgaggaagctgcagcaggtgtacaagctgaacaggaaggaggccgccgcctacatgtactacgtgtggggcagcggctctgtgggctctgtgtacagcggcctgatgcagggcgtgggcgctgctgagaaggtgtttgagttcatcgaccggcagcccaccatggtgcatgatggcagcctggccccagaccacctggagggccgggtggactttgaaaatgtgaccttcacctaccgcacccggccccacacccaggtgctgcagaatgtgtccttcagcctgagccctgggaaggtgacagccctggtgggccccagcggcagcggcaagagcagctgtgtgaacatcctggagaacttctaccccctggagggcggccgggtgctgctggatggcaagcccatcagcgcctatgaccacaagtacctgcacagggtcatcagcctggtgtcccaggagcctgtgctgtttgcccggagcatcacagacaacatctcctatggcctgcccaccgtgccctttgagatggtggtggaggccgcccagaaggccaatgcccacggcttcatcatggagctgcaggacggctacagcacagaaacaggagagaagggggcccagctgagcggcggccagaagcagagggtggccatggcccgggccctggtgaggaacccccctgtgctgatcctggatgaggccaccagcgccctggatgctgagagcgagtacctgatccagcaggccatccacggcaacctgcagaagcacacagtgctgatcatcgcccaccggctgagcacagtggagcacgcccacctgattgtggtgctggacaagggccgggtggtgcagcagggcacccaccagcagctgctggcccagggcggcctgtatgccaagctggtgcagaggcagatgctgggcctgcagcctgctgctgacttcaccgctggccacaatgaacctgtggccaacggcagccacaaggcctag

SEQ ID NO: 202008 - DNA, 2172 bp, Artificial Sequence
  derived and/or modified sequence
atgcggctgtggaaggccgtggtggtgaccctggccttcatgagcgtcgatatttgcgtcacaacagctatttacgttttttcccacctcgacaggtcattacttgaagatattaggcacttcaacatcttcgattccgttcttgacctttgggctgcgtgtctctataggtcttgcttactgttgggggcgaccataggagtagccaagaatagtgctcttggtcccagacgtttgcgggcctcctggctggtgataactctcgtttgcctgtttgtcggcatctacgcaatggtgaagctgctgctgttctccgaagtgcgtcgccccatcagggacccttggttctgggccctgtttgtgtggacatacatctccttgggagcaagctttcttctctggtggcttctgagcacagtgcggcctgggacgcaggctctggagccaggcgctgctacggaagcagagggtttccccggcagcggaagacctccccccgagcaggcctcaggtgctaccctgcagaagctgctttcttacactaagcctgacgttgcattcctggtggctgcctctttctttctgattgtcgccgcgctgggcgagacctttttgccatactacaccggcagagccattgacggcatcgttatccaaaaatctatggaccaatttagtaccgccgtagtgatcgtgtgccttctggcaatcggcagcagcttcgctgccggcatccgcggtggaattttcacactgattttcgccaggctgaatatccgtctaaggaactgcctatttcgctctttggtttcacaggagacctccttcttcgacgagaaccggacaggcgacctgatctcacgcctgacatccgatactacaatggtgtctgatctggtgagtcaaaacattaacgtttttttgaggaacactgttaaagttacaggggtggtggtgtttatgttttccttaagctggcaactctccctcgtgacattcatgggctttccaattattatgatggtctctaatatctacgggaaatattataagagattaagtaaagaagttcagaatgccctagcccgcgcatctaacacggcagaggagacaatttcagccatgaagacagtcaggtccttcgccaacgaagaagaggaagccgaagtatatctcagaaaacttcagcaagtttacaagctgaacagaaaagaggcagccgcctatatgtattatgtgtgggggtccggctcggtgggcagcgtgtactccggactgatgcaaggagtgggtgccgcagagaaagtctttgaattcattgatcgccagccaacgatggttcacgatgggtctctggcgcccgaccacctggagggccgggtggattttgagaacgtcacttttacctataggacccgcccccatacacaggtgctccagaatgtctcttttagccttagtccgggcaaagtgactgcccttgttgggccctctgggagtggaaagtccagttgcgttaatatcctggaaaacttttatccccttgagggaggacgcgtgctcctcgacggcaagcccatcagtgcctacgaccataaatatctgcaccgcgtgatctcacttgtaagccaggagccggtcctgttcgccagaagcatcaccgataatattagttatgggctgccaactgtcccctttgaaatggtggtcgaagccgctcagaaggctaacgctcatggttttatcatggaattacaagacggctatagtacagagaccggcgagaagggtgctcagctgtccggcgggcagaagcagcgcgtagctatggcgcgcgcactagtgcgcaacccccccgtgctcatcctcgacgaagctacctctgccctggatgccgaatcagaatacctgatacagcaggcgatccatggtaaccttcaaaagcataccgtgctgattatcgcccatagactcagcaccgtagagcatgcccatttgatcgtggttctagacaaaggacgtgtagtgcagcaaggaactcaccagcagctgctggctcagggtggcctgtacgccaagctggtccaacggcagatgctgggactgcagcccgctgcagattttacggctgggcataacgagcccgtagccaacggaagtcacaaggcctag

SEQ ID NO: 202009 - DNA, 2172 bp, Artificial Sequence
  derived and/or modified sequence
atgcgcttatggaaagccgtggttgtcacgctggcttttatgagtgttgatatctgcgtgaccacggctatttacgttttttctcacctcgatcgcagcctgctggaggatatacgacattttaatatttttgactccgtgctggatctctgggctgcctgcctgtatcggtcctgtcttctgcttggcgctacaattggcgtcgccaaaaactccgctttgggaccccgtcgccttcgtgcatcctggctggtgattaccctggtgtgtctgttcgtaggcatttatgctatggtgaagctcctgttgtttagcgaggttcgcaggccaattagagatccatggttctgggccttgttcgtgtggacatatattagcctcggggcttccttccttctgtggtggttgttatctaccgtcaggcccggaacccaagcactcgaacccggagccgctactgaggcggagggcttccctggaagtgggcgacctccccctgaacaggcctctggggcaaccctacaaaagttattaagctacaccaaacctgatgtagctttcctggtggctgcctcattttttttaatcgtggccgctctcggcgagactttcctgccctactacaccggaagggctattgatgggatcgtaattcagaagagcatggaccaattctcaaccgcagtggtgatcgtgtgccttctggctatcggctcatccttcgccgctggcattcggggaggcattttcaccctaatatttgctaggcttaacatacggcttcgtaattgtctatttagatctctggtttctcaagaaacatcatttttcgacgaaaatcggaccggcgacttaatcagtaggttgacctcagacacaacaatggtgagtgatttggtctcgcagaacatcaacgtgttcctccggaacacagtcaaagtcaccggggtggtggtgtttatgttctccctgtcctggcaacttagcctggtgacatttatgggcttccccatcatcatgatggtgtctaacatttatggcaagtactacaagcgcctatccaaggaagtgcaaaatgctttggccagagcttccaacacggccgaggaaactatttccgccatgaagactgtgcgcagttttgctaacgaggaggaggaggctgaggtgtatcttcggaaactccagcaggtctataagctcaaccggaaggaggctgcggcttacatgtactacgtatgggggtctggctctgttggtagcgtatatagcggacttatgcagggggtcggcgcagccgagaaggttttcgagtttatcgaccgacaaccaaccatggtacacgacggatccttggcgcctgatcatctagaaggaagggtggacttcgagaatgtgacttttacttatcggacacgaccccatacacaagtgttgcaaaatgtatcattcagcctgagtcctggcaaggtgacagccttggtgggaccaagtggcagcggcaagagttcttgcgtaaatatcctcgagaacttttaccctctagaaggaggtcgtgttctcttggatggtaagcctatttccgcatacgaccacaagtacctccatagggtgatctcactggtcagtcaggagcctgtgcttttcgctaggtcaatcaccgataacatttcatatgggctcccgaccgtgccgtttgagatggtggtcgaggcggcacaaaaagctaacgctcatggttttatcatggagctccaggacggttattccactgaaacaggcgaaaaaggggctcagctgtccgggggacagaagcaacgagtggctatggcacgtgcattggtgagaaatccacccgttttgatcttggatgaagccacttctgcgctagatgcagaaagtgagtacttgatacagcaagcaattcacggcaatttacagaagcatacagtattgattatcgcgcataggctgtctactgttgagcacgcccatctgatcgttgttctggataagggccgagtggtacagcaaggtacccatcagcagttactggcccaaggtggtctgtatgccaagcttgttcaacgtcagatgctgggcttgcagcccgctgccgacttcactgcaggtcacaacgaacccgtcgctaacgggagccacaaggcctag

SEQ ID NO: 202010 - DNA, 3399 bp, Artificial Sequence
  derived and/or modified sequence
gtcactgaggccccgccccgtccatcagcctgtctcaacgcacgccagtctcagctccgaccttgcagcggcgcagcgcgggtgggaggcggggaggagcagcgggaagagcggagcgaggaccgcgtccggcgcagtcttcaatgagcagcgcggaaactgcaccccagacccgagcctgctgcgcgccccctcccagagctcacctggtgccaggtaacaggcctggcctcgccctgtggatgatgatggccttgcccccgtgagctacaacctggccttcagcacccgcccacctccaaccagcaggatgcggctgtggaaggcggtggtggtgactttggccttcatgagtgtggacatctgcgtgaccacggccatctatgtcttcagccacctggaccgcagcctcctggaggacatccgccacttcaacatctttgactcggtgctggatctctgggcagcctgcctgtaccgcagctgcctgctgctgggagccaccattggtgtggccaagaacagtgcgctggggccccggcggctgcgggcctcgtggctggtcatcaccctcgtgtgcctcttcgtgggcatctatgccatggtgaagctgctgctcttctcagaggtgcgcaggcccatccgggacccctggttttgggccctgttcgtgtggacgtacatttcactcggcgcatccttcctgctctggtggctgctgtccaccgtgcggccaggcacccaggccctggagccaggggcggccaccgaggctgagggcttccctgggagcggccggccaccgcccgagcaggcgtctggggccacgctgcagaagctgctctcctacaccaagcccgacgtggccttcctcgtggccgcctccttcttcctcatcgtggcagctctgggagagaccttcctgccctactacacgggccgcgccattgatggcatcgtcatccagaaaagcatggatcagttcagcacggctgtcgtcatcgtgtgcctgctggccattggcagctcatttgccgcaggtattcggggcggcatttttaccctcatatttgccagactgaacattcgccttcgaaactgtctcttccgctcactggtgtcccaggagacaagcttctttgatgagaaccgcacaggggacctcatctcccgcctgacctcggacaccaccatggtcagcgacctggtctcccagaacatcaatgtcttcctgcggaacacagtcaaggtcacgggcgtggtggtcttcatgttcagcctctcatggcagctctccttggtcaccttcatgggcttccccatcatcatgatggtgtccaacatctacggcaagtactacaagaggctctccaaagaggtccagaatgccctggccagagcgagcaacacggcggaggagaccatcagtgccatgaagactgtccggagcttcgccaatgaggaggaggaggcagaggtgtacctgcggaagctgcagcaggtgtacaagctgaacaggaaggaggcagctgcctacatgtactacgtctggggcagcgggtccgtgggctccgtctacagtggcctgatgcagggagtgggggctgctgagaaggtgttcgagttcatcgaccggcagccgaccatggtgcacgatggcagcttggcccccgaccacctggagggccgggtggactttgagaatgtgaccttcacctaccgcactcggccccacacccaggtcctgcagaatgtctccttcagcctgtcccccggcaaggtgacggccctggtggggccctcgggcagtgggaagagctcctgtgtcaacatcctggagaacttctaccccctggaggggggccgggtgctgctggacggcaagcccatcagcgcctacgaccacaagtacttgcaccgtgtgatctccctggtgagccaggagcccgtgctgttcgcccgctccatcacggataacatctcctacggcctgcccactgtgcctttcgagatggtggtggaggccgcacagaaggccaatgcccacggcttcatcatggaactccaggacggctacagcacagagacaggggagaagggcgcccagctgtcaggtggccagaagcagcgggtggccatggcccgggctctggtgcggaaccccccagtcctcatcctggatgaagccaccagcgctttggatgccgagagcgagtatctgatccagcaggccatccatggcaacctgcagaagcacacggtactcatcatcgcgcaccggctgagcaccgtggagcacgcgcacctcattgtggtgctggacaagggccgcgtagtgcagcagggcacccaccagcagctgctggcccagggcggcctctacgccaagctggtgcagcggcagatgctggggcttcagcccgccgcagacttcacagctggccacaacgagcctgtagccaacggcagtcacaaggcctgatggggggcccctgcttctcccggtggggcagaggacccggtgcctgcctggcagatgtgcccacggaggcccccagctgccctccgagcccaggcctgcagcactgaaagacgacctgccatgtcccatggatcaccgcttcctgcatcttgcccctggtccctgccccattcccagggcactccttacccctgctgccctgagccaacgccttcacggacctccctagcctcctaagcaaaggtagagctgcctttttaaacctaggtcttaccagggtttttactgtttggtttgaggcaccccagtcaactcctagatttcaaaaacctttttctaattgggagtaatggcgggcactttcaccaagatgttctagaaacttctgagccaggagtgaatggcccttccttagtagcctgggggatgtccagagactaggcctctcccctttacccctccagagaaggggcttccctgtcccggagggagacacggggaacgggattttccgtctctccctcttgccagctctgtgagtctggccagggcgggtagggagcgtggagggcatctgtctgccatcgcccgctgccaatctaagccagtctcactgtgaaccacacgaaacctcaactgggggagtgaggggctggccaggtctggaggggcctcaggggtgcccccagcccggcacccagcgctttcgcccctcgtccacccacccctggctggcagcctccctccccacacccgcccctgtgctctgctgtctggaggccacgtggatgttcatgagatgcattctcttctgtctttggtggatgggatggtggcaaagcccaggatctggctttgccagaggttgcaacatgttgagagaacccggtcaataaagtgtactacctcttacccct

SEQ ID NO: 202011 - DNA, 2172 bp, Artificial Sequence
  derived and/or modified sequence
atgagactgtggaaggccgtggtggtgaccctggccttcatgagcgtggacatctgcgtgaccaccgccatctacgtgttcagccacctggacagaagcctgctggaggacatcagacacttcaacatcttcgacagcgtgctggacctgtgggccgcctgcctgtacagaagctgcctgctgctgggcgccaccatcggcgtggccaagaacagcgccctgggccccagaagactgagagccagctggctggtgatcaccctggtgtgcctgttcgtgggcatctacgccatggtgaagctgctgctgttcagcgaggtgagaagacccatcagagacccctggttctgggccctgttcgtgtggacctacatcagcctgggcgccagcttcctgctgtggtggctgctgagcaccgtgagacccggcacccaggccctggagcccggcgccgccaccgaggccgagggcttccccggcagcggcagacccccccccgagcaggccagcggcgccaccctgcagaagctgctgagctacaccaagcccgacgtggccttcctggtggccgccagcttcttcctgatcgtggccgccctgggcgagaccttcctgccctactacaccggcagagccatcgacggcatcgtgatccagaagagcatggaccagttcagcaccgccgtggtgatcgtgtgcctgctggccatcggcagcagcttcgccgccggcatcagaggcggcatcttcaccctgatcttcgccagactgaacatcagactgagaaactgcctgttcagaagcctggtgagccaggagaccagcttcttcgacgagaacagaaccggcgacctgatcagcagactgaccagcgacaccaccatggtgagcgacctggtgagccagaacatcaacgtgttcctgagaaacaccgtgaaggtgaccggcgtggtggtgttcatgttcagcctgagctggcagctgagcctggtgaccttcatgggcttccccatcatcatgatggtgagcaacatctacggcaagtactacaagagactgagcaaggaggtgcagaacgccctggccagagccagcaacaccgccgaggagaccatcagcgccatgaagaccgtgagaagcttcgccaacgaggaggaggaggccgaggtgtacctgagaaagctgcagcaggtgtacaagctgaacagaaaggaggccgccgcctacatgtactacgtgtggggcagcggcagcgtgggcagcgtgtacagcggcctgatgcagggcgtgggcgccgccgagaaggtgttcgagttcatcgacagacagcccaccatggtgcacgacggcagcctggcccccgaccacctggagggcagagtggacttcgagaacgtgaccttcacctacagaaccagaccccacacccaggtgctgcagaacgtgagcttcagcctgagccccggcaaggtgaccgccctggtgggccccagcggcagcggcaagagcagctgcgtgaacatcctggagaacttctaccccctggagggcggcagagtgctgctggacggcaagcccatcagcgcctacgaccacaagtacctgcacagagtgatcagcctggtgagccaggagcccgtgctgttcgccagaagcatcaccgacaacatcagctacggcctgcccaccgtgcccttcgagatggtggtggaggccgcccagaaggccaacgcccacggcttcatcatggagctgcaggacggctacagcaccgagaccggcgagaagggcgcccagctgagcggcggccagaagcagagagtggccatggccagagccctggtgagaaacccccccgtgctgatcctggacgaggccaccagcgccctggacgccgagagcgagtacctgatccagcaggccatccacggcaacctgcagaagcacaccgtgctgatcatcgcccacagactgagcaccgtggagcacgcccacctgatcgtggtgctggacaagggcagagtggtgcagcagggcacccaccagcagctgctggcccagggcggcctgtacgccaagctggtgcagagacagatgctgggcctgcagcccgccgccgacttcaccgccggccacaacgagcccgtggccaacggcagccacaaggcctag

SEQ ID NO: 202012 - protein, 681 aa, Artificial Sequence
  derived and/or modified sequence
MRLWKAVVVTLAFMSVDICVTTAIYVFSHLDRSLLEDIRHFNIFDSVLDLWAACLYRSCLLLGATIGVAKNSALGPRRLRASWLVITLVCLFVGIYAMVKLLLFSEVRRPIRDPWFWALFVWTYISLGASFLLWWLLSTVRPGTQALEPGAATEAEGFPGSGRPPPEQASGATLQKLLSYTKPDVAFLVAASFFLIVAALGETFLPYYTGRAIDGIVIQKSMDQFSTAVVIVCLLAIGSSFAAGIRGGIFTLIFARLNIRLRNCLFRSLVSQETSFFDENRTGDLISRLTSDTTMVSDLVSQNINVFLRNTVKVTGVVVFMFSLSWQLSLVTFMGFPIIMMVSNIYGKYYKRLSKEVQNALARASNTAEETISAMKTVRSFANEEEEAEVYLRKLQQVYKLNRKEAAAYMYYVWGSGLTLLVVQVSILYYGGHLVISGQMTSGNLIAFIIYEFVLGDCMESVGSVYSGLMQGVGAAEKVFEFIDRQPTMVHDGSLAPDHLEGRVDFENVTFTYRTRPHTQVLQNVSFSLSPGKVTALVGPSGSGKSSCVNILENFYPLEGGRVLLDGKPISAYDHKYLHRVISLVSQEPVLFARSITDNISYGLPTVPFEMVVEAAQKANAHGFIMELQDGYSTETGEKGAQLSGGQKQRVAMARALVRNPPVLILDEATSALDAESEYLI

SEQ ID NO: 202013 - protein, 766 aa, Artificial Sequence
  derived and/or modified sequence
MRLWKAVVVTLAFMSVDICVTTAIYVFSHLDRSLLEDIRHFNIFDSVLDLWAACLYRSCLLLGATIGVAKNSALGPRRLRASWLVITLVCLFVGIYAMVKLLLFSEVRRPIRDPWFWALFVWTYISLGASFLLWWLLSTVRPGTQALEPGAATEAEGFPGSGRPPPEQASGATLQKLLSYTKPDVAFLVAASFFLIVAALGETFLPYYTGRAIDGIVIQKSMDQFSTAVVIVCLLAIGSSFAAGIRGGIFTLIFARLNIRLRNCLFRSLVSQETSFFDENRTGDLISRLTSDTTMVSDLVSQNINVFLRNTVKVTGVVVFMFSLSWQLSLVTFMGFPIIMMVSNIYGKYYKRLSKEVQNALARASNTAEETISAMKTVRSFANEEEEAEVYLRKLQQVYKLNRKEAAAYMYYVWGSGLTLLVVQVSILYYGGHLVISGQMTSGNLIAFIIYEFVLGDCMESVGSVYSGLMQGVGAAEKVFEFIDRQPTMVHDGSLAPDHLEGRVDFENVTFTYRTRPHTQVLQNVSFSLSPGKVTALVGPSGSGKSSCVNILENFYPLEGGRVLLDGKPISAYDHKYLHRVISLVSQEPVLFARSITDNISYGLPTVPFEMVVEAAQKANAHGFIMELQDGYSTETGEKGAQLSGGQKQRVAMARALVRNPPVLILDEATSALDAESEYLIQQAIHGNLQKHTVLIIAHRLSTVEHAHLIVVLDKGRVVQQGTHQQLLAQGGLYAKLVQRQMLGLQPAADFTAGHNEPVANGSHKA

SEQ ID NO: 202014 - protein, 769 aa, Artificial Sequence
  derived and/or modified sequence
MRLWKAVVVTLAFMSVDICVTTAIYVFSHLDRSLLEDIRHFNIFDSVLDLWAACLYRSCLLLGATIGVAKNSALGPRRLRASWLVITLVCLFVGIYAMVKLLLFSEVRRPIRDPWFWALFVWTYISLGASFLLWWLLSTVRPGTQALEPGAATEAEGFPGSGRPPPEQASGATLQKLLSYTKPDVAFLVAASFFLIVAALGETFLPYYTGRAIDGIVIQKSMDQFSTAVVIVCLLAIGSSFAAGIRGGIFTLIFARLNIRLRNCLFRSLVSQETSFFDENRTGDLISRLTSDTTMVSDLVSQNINVFLRNTVKVTGVVVFMFSLSWQLSLVTFMGFPIIMMVSNIYGKYYKRLSKEVQNALARASNTAEETISAMKTVRSFANEEEEAEVYLRKLQQVYKLNRKEAAAYMYYVWGSGLTLLVVQVSILYYGGHLVISGQMTSGNLIAFIIYEFVLGDCMESVGSVYSGLMQGVGAAEKVFEFIDRQPTMVHDGSLAPDHLEGRVDFENVTFTYRTRPHTQVLQNVSFSLSPGKVTALVGPSGSGKSSCVNILENFYPLEGGRVLLDGKPISAYDHKYLHRVISLVSQEPVLFARSITDNISYGLPTVPFEMVVEAAQKANAHGFIMELQDGYSTETGEKGAQLSGGQKQRVAMARALVRNPPVLILDEATSALDAESEYLSPQIQQAIHGNLQKHTVLIIAHRLSTVEHAHLIVVLDKGRVVQQGTHQQLLAQGGLYAKLVQRQMLGLQPAADFTAGHNEPVANGSHKA

SEQ ID NO: 202015 - DNA, 2301 bp, Artificial Sequence
  derived and/or modified sequence
atgcggctgtggaaggctgtcgttgtcacgcttgcttttatgtcggtggacatctgtgtgacaacggccatttatgtcttctcgcacctggatcggtccctccttgaagatatcaggcattttaatattttcgactccgtgctcgatctgtgggcggcttgcctgtaccgttcttgcctgctcttaggggccactatcggggtcgccaagaactcggcccttggcccacgtcggttgcgggcctcatggctagttatcacactggtgtgtttgtttgttggtatctacgccatggtaaaactgctgctgttttcagaggtacgcaggccgattagagacccttggttctgggctctcttcgtgtggacctatatcagtctcggggcctcttttctcctatggtggctgctctccactgtgcggcctgggacgcaggctttggagcccggagccgcaactgaagccgaaggttttccaggatccggaaggccaccgccagagcaggcgtctggtgcaacactccagaaactgctgtcctacacgaagcctgatgtcgcgtttttggttgctgcatcatttttcctgatcgttgctgcgctgggcgaaacatttctgccgtactacacaggaagggccatcgatggaatcgtcatccagaagtccatggaccaattttccaccgcggtggtcattgtctgtctactagctatcgggtcctctttcgcggctgggatccgcggcggaatatttactcttatctttgcccgactcaacattaggctaaggaactgccttttccgcagtctggtgtctcaggaaacatcattttttgacgaaaaccggaccggggatctgatcagccggctgacaagcgacacaacgatggtgtccgatttggtgagtcagaacatcaatgtgttccttcgtaacaccgtgaaggtgactggtgttgtggtcttcatgttcagcttatcatggcagctaagtctggtgacatttatgggcttcccgattatcatgatggtgtccaatatttatggtaagtattacaagcgtctgagtaaggaggtgcagaacgccctggctagagcctctaataccgctgaggagaccatatccgcgatgaagacagtgagatcctttgccaatgaggaagaggaagccgaagtatatctgcgtaagctccagcaagtctataaactaaaccgtaaagaagcagcggcctacatgtactatgtctgggggagtggattgacactgctcgttgtgcaagttagtatcctgtattatggcgggcacttggtcattagcgggcagatgacatcaggcaatctcattgcctttattatttacgaatttgtgcttggggactgcatggaaagcgtcgggtccgtttacagtgggctgatgcagggcgtgggggcagctgaaaaagtgtttgaatttatagatagacaacccaccatggtgcacgacggctcgcttgccccggaccatttggaggggcgagtggatttcgagaacgtgacattcacgtaccgaaccaggccgcacacacaggtcttgcagaacgtcagttttagtctgtctccagggaaggtgaccgcactcgtggggccctccggttctgggaaatcgtcttgtgtgaatatcctggagaatttttaccctttagaggggggccgggtactgttggatggaaagcccatttcagcatacgatcacaagtacctgcatagagtcatttctcttgttagtcaagagccagttttattcgctaggtctattactgacaatattagttacggactgccaacagtccctttcgagatggtcgtggaggccgcccaaaaggcaaatgcccatggctttattatggagctgcaggacggttacagcactgagactggggaaaaaggggctcaactgagcggcggccagaagcagcgggttgcaatggctagagctctggtgaggaatcccccggttctcattttagacgaggctacctccgcactggacgccgaaagcgaatatctgattcaacaggcaattcacggcaacttgcagaagcacacagtactcatcatagcacacaggctctccactgttgaacacgcacatctcatcgtggtgctggataaagggagggtcgtgcagcaaggaacccatcagcagctgctggcccagggtggactgtatgcgaagctggtgcagcgacaaatgctcggactgcagcccgccgcagatttcactgccggacacaacgaacctgttgcgaatggcagccataaagcctag

SEQ ID NO: 202016 - DNA, 2301 bp, Artificial Sequence
  derived and/or modified sequence
atgagactatggaaggcagtcgtagtgacactcgcctttatgtctgtggatatctgcgttacaacggcgatctacgttttcagtcacctggacaggtcgttactggaagacattcgccactttaatatttttgattccgtacttgacttgtgggctgcgtgtctctatcggagttgccttctgttgggggctactattggcgtggctaagaattcggctcttggacctcgtcggttgagagccagctggctggtgattactctcgtatgtctgttcgtgggtatctacgcgatggtcaaactactgctgttctctgaagtgagaaggcctatccgcgacccttggttctgggcactattcgtctggacgtacataagtttaggtgcttcgtttcttctgtggtggctgctttctacggttagacccggtacgcaggcgctggagccaggagccgctaccgaggcggagggcttccccggaagtggaagaccccctccagagcaggcctctggtgcaacgcttcaaaagcttctgtcatatacaaaaccggatgtggcctttctcgtggccgcttctttttttttaattgttgcagcactgggggaaactttcctgccatattatacggggcgcgctatcgacggaatcgtgattcaaaagagtatggaccagttttcaacagctgtggtaatcgtgtgtctcctggcgattgggtcctcatttgccgcgggcatccggggcggaatctttacgctgatttttgcaagacttaacatccgcctgcgcaattgcctttttcggagtcttgtctcacaggaaacatcatttttcgatgagaaccggacaggggatcttatctcaagattgacaagcgatactacaatggttagcgacctcgtctcacagaacatcaatgtattcttgcgaaatacagtgaaagtgacaggagtagtggtcttcatgttcagtctgtcctggcagctcagtctagttacgttcatggggttccccattatcatgatggtttctaacatatatgggaagtactacaaacgactgtctaaagaggtgcagaacgctctcgctcgcgcgtccaacacggctgaggaaactatttccgccatgaagaccgttcgcagttttgcaaatgaggaggaagaggcagaggtctacctgaggaagttgcagcaagtgtacaaattaaaccgcaaagaagccgcggcctatatgtattatgtctggggctccggcctgactctgttagtggtccaggtctctattttgtactatggcggccatttagtgatatccggccagatgacaagcggtaacctcattgccttcattatatatgagttcgtactgggcgattgtatggagagcgtcggctctgtgtactccggattaatgcaaggtgtcggcgcggccgagaaggtgtttgaatttattgatcgccagcctaccatggttcacgacgggagcctcgcccctgatcatctggaaggacgggtagactttgaaaatgtgacgttcacatatagaacaaggccacacacccaggtgctccagaacgtgtctttctctctgagccccggcaaggtgactgccctggtgggcccctccggaagtgggaagagcagttgcgtgaacattctggagaatttttatcccctggaaggcgggcgggtacttctggatggaaaacctataagtgcctatgaccacaagtatcttcacagggttatcagcctcgtgtcacaggagcccgtgctgttcgcccgcagcattactgataatatcagttacggcttacccactgtacccttcgagatggtcgtggaagcagcgcagaaagctaacgctcacggctttatcatggaactgcaggacggttattctaccgagacaggagaaaagggtgcacagctgagcgggggacagaaacaacgggttgctatggcgcgggcactggtccggaatcctccggtgcttatcctggacgaggcgactagcgcactggacgcagaatcagagtacctcattcagcaagctatccatggcaaccttcagaaacatacagtcctgataattgcccacagactgtccacagtagagcatgcccacctgatcgtagttctggacaagggacgagttgtgcagcaaggaactcaccaacagctgctggcgcagggggggctgtacgcaaagctggtgcaacgccagatgttgggcctccagcctgcagctgatttcaccgctggtcacaatgagcctgtggctaacggtagtcataaggcctag

SEQ ID NO: 202017 - DNA, 2310 bp, Artificial Sequence
  derived and/or modified sequence
atgcggctgtggaaggcagtggtggtcaccctggccttcatgtctgtggatatctgcgtgacgacagctatctatgtgtttagccatctggacagatctcttctcgaggatattagacacttcaatatcttcgatagtgttctggatctgtgggcagcctgtctgtatcgtagctgcttgctactgggtgcgaccattggcgttgctaagaatagtgccctcggcccacgacggctgcgggcctcctggctcgtgatcaccctcgtctgtctgtttgttggcatttacgctatggtaaaactgctgctgttttccgaggtccggagaccgatacgagacccttggttttgggccctgttcgtttggacatacatttctctgggtgcatcctttctgctttggtggttactgtccactgtgagaccaggtacacaagccctggagcccggcgccgctaccgaggccgagggctttccaggatccggaagacccccacctgagcaggcctccggtgcaacactccaaaagctcctgagctataccaagccggacgtagcttttctggtggcggctagcttctttttgatcgtcgccgcactcggagagacatttcttccttattacaccggcagagcgatcgatgggattgtgatccaaaaatctatggaccagttcagtaccgccgtagtgatcgtgtgcctgcttgctattggatccagcttcgcggcaggcatccgtggaggtattttcacgctgatttttgccaggctcaatattcgcttaagaaactgtttgttccgatctttagtttctcaggagacttccttttttgatgagaatcgaactggtgacttgatcagtagactcacctccgacacgacaatggtgtctgacttggtcagccaaaatataaacgttttcttgcgcaataccgtgaaggtgaccggagttgtggttttcatgttttctctgagctggcagctctctttggtcacatttatgggcttccccataataatgatggtgtccaatatttacggtaaatactataagagactgagcaaggaggtccagaacgcactggctcgggcttccaatacagctgaagaaaccatctcagcaatgaaaacagtgaggtcctttgccaatgaggaagaggaagccgaggtctatctgcgcaagctccagcaggtttacaagcttaatcgcaaagaggctgccgcatacatgtattacgtctgggggtccggccttacattgctggttgtccaggtttctattctgtattatggcggccatttggtgatctcaggacaaatgacctccggaaacctcatcgctttcataatttacgagttcgtgctcggtgattgtatggagtccgtcgggagtgtttattctgggctgatgcagggggttggcgccgctgagaaggtgttcgaatttattgatcggcaaccaacaatggtgcacgatggaagtctcgcccctgaccatttggaggggagagtggattttgaaaatgttacatttacgtaccgaacccgaccacacacccaggtgctccagaatgtgtctttctcgctatcacctggcaaggtgaccgccctcgtaggaccaagcggttcagggaagtcttcctgtgtcaatatcctggagaatttttatcctctggagggtggtcgggtgctcctggatggaaaacccatttctgcctacgatcacaaatatctgcatcgcgtaattagcttagtctctcaggagcccgtgctgttcgcacgaagcataaccgacaatatcagctacgggttgcctacagtgccattcgagatggttgtggaagcagcgcagaaagccaatgctcatgggttcatcatggagctgcaggacggatattcaactgagactggcgaaaagggagctcagctgtcagggggccagaaacagcgcgtcgcaatggctcgcgccctcgtgcgcaacccacccgtcttaatcctcgatgaggccactagcgctctagatgcagaaagcgaatatctgagtccccagatccagcaagcgatccatggaaacttacagaagcacaccgtcctcatcatcgcccaccggctctcgacggtcgagcatgctcacctcatcgttgttctcgataaaggcagagtagtgcagcagggcacgcatcaacagctgctggcacagggaggactttacgcgaaactcgtccagcgccaaatgttaggactgcagcccgcggccgatttcaccgcgggccacaatgaacctgtagctaatggctctcacaaggcctag

SEQ ID NO: 202018 - DNA, 2301 bp, Artificial Sequence
  derived and/or modified sequence
atgcgattgtggaaagctgtcgttgtaacactcgcgtttatgtcggttgacatatgtgtgacaacggccatctatgtgttctcacatctggacaggtcattgctagaggacattcggcatttcaatatattcgacagtgtcctcgacctttgggccgcatgcttgtaccgcagttgtctcctgctgggggcgaccatcggagttgccaagaactcggcacttggccccaggcggctgagagcctcctggctagtgattacacttgtgtgcctgttcgtcggaatctacgccatggtcaaattattgctgttttcagaggtgaggcgccccataagggacccttggttttgggccttatttgtgtggacttatatcagtttaggagcttcgtttctgctgtggtggttgctgtcaacagtgagacccgggactcaggctttagaacctggcgcggcaactgaagccgaaggattccctggttctgggcgccctcctcctgagcaggcaagtggcgctacgttgcaaaagctgctctcttacaccaagcctgacgtcgccttcctggtggctgcgtccttcttccttatcgttgccgctctgggcgagacatttcttccctactatacaggccgcgccattgatgggatcgtaatccaaaagagtatggaccagttctcgaccgctgtggtaatcgtgtgtcttctggctattggcagcagttttgctgcgggaattcgtgggggtatattcacacttatcttcgcccgcctgaacatcaggcttcgaaactgcctattcagatcattggtatcccaggagacttcattttttgacgagaatcgcacaggcgacctcatatcccggctcacttctgataccaccatggtgagcgatttagtgagtcagaacattaacgtcttcctgagaaatacagtgaaagtgacgggggtggtcgtgttcatgttctctctgtcttggcaactatctttggtgacttttatgggctttcccatcatcatgatggtttcaaacatttacgggaaatattacaagaggttatctaaggaagttcagaacgcactcgcccgagcctctaataccgccgaagagacaatttcagccatgaaaacagtgcggtcgttcgcgaacgaagaggaagaggctgaagtctacctgcgcaaactgcagcaggtgtacaagctcaaccgcaaggaggcagctgcatacatgtattacgtgtggggatctggcctgacactcttggtggtgcaggtgtctatcctgtactatggagggcacctggtcatctccggccagatgacgagcggaaatttaattgccttcattatttatgaattcgtcctgggcgactgtatggagtctgtcggaagtgtatattctggcctaatgcagggtgtgggagctgctgaaaaagtttttgaatttatcgataggcaacccacgatggtgcatgatggatccctcgccccggaccacctcgaaggtcgggtggactttgagaatgtcaccttcacctacaggacaagaccacatacacaagtcctgcagaatgtatccttctccctctctccaggtaaagtcacggctctggtaggcccctcaggaagcggaaagagcagctgcgtgaatatcctcgagaacttctatcccctcgagggcggacgcgttctcctagatggaaagcctatctcagcctatgaccacaagtacctgcaccgagtgatctctctcgtctctcaggaacctgtcctctttgcaaggagcatcaccgacaacatcagttacggcctgccgaccgtcccatttgaaatggtagtggaagcggcacagaaggcaaacgcgcacggcttcatcatggaactccaggatgggtacagcactgaaactggggagaagggagcacagctgtctggcgggcaaaaacagagggtcgccatggctcgcgccctggtgcgcaatccccctgttttgattcttgatgaggccacgagtgcgctcgacgccgaaagtgagtaccttatccaacaggcaattcacgggaacttgcagaagcataccgtgctcattattgcacaccgcctctccacggtcgaacacgcacatctgatcgtggtattggacaaaggaagagtggtccagcagggcacccatcagcaattattggcgcaaggcggcctgtacgctaaactcgtccagagacagatgcttgggctacagcccgcagccgatttcaccgcgggtcacaatgaacccgtcgctaacgggtcccataaagcttag

SEQ ID NO: 202019 - DNA, 2301 bp, Artificial Sequence
  derived and/or modified sequence
atgaggctgtggaaggctgtggtggtgaccctggccttcatgtctgtggacatctgtgtgaccacagccatctacgtgttcagccacctggacaggagcctgctggaggacatccgccacttcaacatctttgacagcgtgctggacctgtgggccgcctgcctgtaccgcagctgcctgctgctgggcgccaccatcggcgtggccaagaacagcgccctgggcccccggcggctgcgggcctcctggctggtgatcaccctggtgtgcctgtttgtgggcatctatgccatggtgaagctgctgctcttcagcgaggtgcggcggcccatccgggacccctggttctgggccctgtttgtgtggacctacatcagcctgggcgccagcttcctgctgtggtggctgctgagcacagtgcggcccggcacccaggccctggagcctggagctgccacagaagctgagggcttccctggcagcggccggcccccacctgagcaggccagcggggccaccctgcagaagctgctgagctacaccaagccagatgtggccttcctggtggccgccagcttcttcctgattgtggccgccctgggggagaccttcctgccctactacacaggccgggccattgatggcatcgtcatccagaagtccatggaccagttcagcacagctgtggtgattgtgtgcctgctggccatcggcagcagctttgctgctggcatccggggcggcatcttcaccctcatctttgcccggctgaacatccggctgaggaactgcctcttccgcagcctggtgtcccaggagaccagcttctttgatgaaaatagaactggagacctgatcagccggctgaccagtgacaccaccatggtgtctgacctggtgtcccagaacatcaacgtgttcctgaggaacacagtgaaggtgactggagtggtggtgttcatgttcagcctgtcctggcagctgagcctggtgaccttcatgggcttccccatcatcatgatggtgagcaacatctacggcaagtactacaagaggctgagcaaggaggtgcagaatgccctggcccgggccagcaacacagctgaggagaccatcagcgccatgaagacagtgcgcagctttgccaatgaggaggaggaggccgaggtgtacctgaggaagctgcagcaggtgtacaagctgaacaggaaggaggccgccgcctacatgtactacgtgtggggcagcggcctgaccctgctggtggtgcaggtgtccatcctgtactacggcggccacctggtgatcagcggccagatgaccagcggcaacctgattgccttcatcatctatgaatttgtgctgggggactgcatggagagcgtgggctctgtgtacagcggcctgatgcagggcgtgggcgctgctgagaaggtgtttgagttcatcgaccggcagcccaccatggtgcatgatggcagcctggccccagaccacctggagggccgggtggactttgaaaatgtgaccttcacctaccgcacccggccccacacccaggtgctgcagaatgtgtccttcagcctgagccctgggaaggtgacagccctggtgggccccagcggcagcggcaagagcagctgtgtgaacatcctggagaacttctaccccctggagggcggccgggtgctgctggatggcaagcccatcagcgcctatgaccacaagtacctgcacagggtcatcagcctggtgtcccaggagcctgtgctgtttgcccggagcatcacagacaacatctcctatggcctgcccaccgtgccctttgagatggtggtggaggccgcccagaaggccaatgcccacggcttcatcatggagctgcaggacggctacagcacagagaccggggagaagggggcccagctgagcggcggccagaagcagagggtggccatggcccgggccctggtgagaaatcctcctgtgctgatcctggatgaggccaccagcgccctggatgctgagagcgagtacctgatccagcaggccatccacggcaacctgcagaagcacacagtgctgatcatcgcccaccggctgagcacagtggagcacgcccacctgattgtggtgctggacaagggccgggtggtgcagcagggcacccaccagcagctgctggcccagggcggcctgtatgccaagctggtgcagaggcagatgctgggcctgcagcctgctgctgacttcaccgctggccacaatgaacctgtggccaacggcagccacaaggcctag

SEQ ID NO: 202020 - DNA, 2310 bp, Artificial Sequence
  derived and/or modified sequence
atgaggctgtggaaggctgtggtggtgaccctggccttcatgtctgtggacatctgtgtgaccacagccatctacgtgttcagccacctggacaggagcctgctggaggacatccgccacttcaacatctttgacagcgtgctggacctgtgggccgcctgcctgtaccgcagctgcctgctgctgggcgccaccatcggcgtggccaagaacagcgccctgggcccccggcggctgcgggcctcctggctggtgatcaccctggtgtgcctgtttgtgggcatctatgccatggtgaagctgctgctcttcagcgaggtgcggcggcccatccgggacccctggttctgggccctgtttgtgtggacctacatcagcctgggcgccagcttcctgctgtggtggctgctgagcacagtgcggcccggcacccaggccctggagcctggagctgccacagaagctgagggcttccctggcagcggccggcccccacctgagcaggccagcggggccaccctgcagaagctgctgagctacaccaagccagatgtggccttcctggtggccgccagcttcttcctgattgtggccgccctgggggagaccttcctgccctactacacaggccgggccattgatggcatcgtcatccagaagtccatggaccagttcagcacagctgtggtgattgtgtgcctgctggccatcggcagcagctttgctgctggcatccggggcggcatcttcaccctcatctttgcccggctgaacatccggctgaggaactgcctcttccgcagcctggtgtcccaggagaccagcttctttgatgaaaatagaactggagacctgatcagccggctgaccagtgacaccaccatggtgtctgacctggtgtcccagaacatcaacgtgttcctgaggaacacagtgaaggtgactggagtggtggtgttcatgttcagcctgtcctggcagctgagcctggtgaccttcatgggcttccccatcatcatgatggtgagcaacatctacggcaagtactacaagaggctgagcaaggaggtgcagaatgccctggcccgggccagcaacacagctgaggagaccatcagcgccatgaagacagtgcgcagctttgccaatgaggaggaggaggccgaggtgtacctgaggaagctgcagcaggtgtacaagctgaacaggaaggaggccgccgcctacatgtactacgtgtggggcagcggcctgaccctgctggtggtgcaggtgtccatcctgtactacggcggccacctggtgatcagcggccagatgaccagcggcaacctgattgccttcatcatctatgaatttgtgctgggggactgcatggagagcgtgggctctgtgtacagcggcctgatgcagggcgtgggcgctgctgagaaggtgtttgagttcatcgaccggcagcccaccatggtgcatgatggcagcctggccccagaccacctggagggccgggtggactttgaaaatgtgaccttcacctaccgcacccggccccacacccaggtgctgcagaatgtgtccttcagcctgagccctgggaaggtgacagccctggtgggccccagcggcagcggcaagagcagctgtgtgaacatcctggagaacttctaccccctggagggcggccgggtgctgctggatggcaagcccatcagcgcctatgaccacaagtacctgcacagggtcatcagcctggtgtcccaggagcctgtgctgtttgcccggagcatcacagacaacatctcctatggcctgcccaccgtgccctttgagatggtggtggaggccgcccagaaggccaatgcccacggcttcatcatggagctgcaggacggctacagcacagagaccggggagaagggggcccagctgagcggcggccagaagcagagggtggccatggcccgggccctggtgagaaatcctcctgtgctgatcctggatgaggccaccagcgccctggatgctgagagcgagtacctgagcccccagatccagcaggccatccacggcaacctgcagaagcacacagtgctgatcatcgcccaccggctgagcacagtggagcacgcccacctgattgtggtgctggacaagggccgggtggtgcagcagggcacccaccagcagctgctggcccagggcggcctgtatgccaagctggtgcagaggcagatgctgggcctgcagcctgctgctgacttcaccgctggccacaatgaacctgtggccaacggcagccacaaggcctag

SEQ ID NO: 202021 - DNA, 2301 bp, Artificial Sequence
  derived and/or modified sequence
atgcggctgtggaaggccgtggtggtgaccctggccttcatgagcgtcgatatctgcgttaccacggccatctacgtcttctctcacctggaccgctccctgttggaggacattagacatttcaacatttttgattcggtactcgatttgtgggccgcatgcttgtaccggagctgcctactgctgggggctactataggggtggccaaaaattctgctctgggccctcgaagactccgcgcttcttggttagttatcaccctcgtctgcctgttcgtgggaatctacgcaatggtgaagctgttgcttttttcagaagttaggagacccataagagacccatggttttgggccctctttgtgtggacctacatcagcctcggcgcctcatttttactctggtggctgctgtcaacagtgcgccctggcacacaagcactggaacctggggctgctacagaggccgaaggtttccccgggagcggcaggccacctcctgagcaggccagcggagcaactctacagaagctcttgagctacaccaagcccgacgtggccttccttgtggccgcttctttttttctcattgtggctgcactgggggagacctttttgccctactacacggggagggcaattgatggcatcgtgattcagaagtccatggatcaattctcaacagccgtggtaattgtctgtcttctggcaatcggctcctcctttgccgccgggatccgaggtgggatcttcacattgatttttgccagactcaacatccgcttgcggaattgcctgtttagatcactggtctcccaggaaacctcattctttgatgagaatcggacgggcgacctcatcagtagactcacctcagataccaccatggtatcagatctggtctcccaaaacattaatgtgtttcttcggaatactgtcaaagtcactggggtggtggtttttatgtttagcttgtcctggcaactgtcattggttactttcatggggtttcctattatcatgatggtcagcaatatctatggtaaatattacaaacgcctcagcaaggaagtgcagaatgcactagcccgagcgtccaataccgccgaagagacaatatcagccatgaaaaccgtccgctcattcgccaatgaagaggaggaggccgaggtatacctgaggaaactacagcaggtatacaagctgaatcgaaaggaagccgccgcctatatgtactatgtatgggggtcaggtttaaccctccttgtagttcaggtttctattctgtattatggcggccacctggtcattagcggtcagatgacttctggaaatttaatagcgtttattatctatgagtttgttctcggagactgtatggaaagcgtgggaagcgtttactcagggcttatgcagggggttggtgccgccgagaaggtattcgagtttatcgacaggcagcccactatggtgcacgacggatcccttgcacctgaccacctcgaaggccgcgtagactttgagaacgtcacttttacatataggaccaggccacatacccaagtgttgcagaacgtgtcgttttccctgagtcccggaaaagtgaccgcgctcgtcgggccctccgggtccgggaagtccagctgtgtgaacatcttagagaacttctaccccctggaaggaggccgcgtgctgctcgacggaaagccaatctcagcttacgaccataagtacctccatcgggtgatcagtcttgtctcacaggagcccgtccttttcgccaggagcatcacagacaatatcagctatgggctgcccacagtgcctttcgaaatggttgtcgaggccgcacaaaaagctaacgctcatggcttcataatggaactgcaggacggatacagcacggagacgggagagaagggggcgcagctgtctggcggccagaagcaacgggtagcaatggcacgggcgctcgtgcgtaacccgccggttttgatccttgacgaggccactagcgccttagatgcagagtcagaatacttgatacagcaggctatccacggtaacctgcagaagcacactgtcttgattatcgcacaccggctttctaccgtcgaacatgctcatctaattgttgttctggacaagggtcgcgtcgtgcaacaggggacccaccagcagctgctagctcaggggggtttgtatgcaaaactggtgcagcgtcaaatgctcggcctccagcctgcagccgactttaccgccgggcataatgaacccgtagccaacggctctcacaaagcatag

SEQ ID NO: 202022 - DNA, 2301 bp, Artificial Sequence
  derived and/or modified sequence
atgcggctgtggaaggccgtggtggtgaccctggccttcatgagcgtggatatatgcgtgacaaccgctatctatgtgttttctcacctggacagatctctactggaggatattcgtcatttcaacattttcgactctgttctggacttatgggctgcctgtctgtaccggagctgcctgctgcttggtgctaccattggtgtcgcaaagaactccgccctgggcccacggcggctgcgtgctagttggcttgtgataaccctcgtgtgtctcttcgtgggcatctatgcgatggtcaagctgctgctcttttccgaagtaagacgacccatcagggatccctggttctgggcgctctttgtttggacctatatttcactgggagccagtttccttctctggtggctgttgagcacagtgcggccagggacgcaggccttggaacccggagctgcaaccgaggctgaagggttccctgggagtggcagaccaccccccgagcaggcctcaggagccaccctccaaaagttgctctcctacactaagcctgacgtggcctttctcgtcgccgcgagtttctttctgattgttgccgctttaggcgagacattcctcccatactacacaggcagggcaatcgatggaatcgttatccaaaagagtatggatcagttctcaacagccgtggtcattgtctgcttgctggccataggatcttcttttgcagccgggattagaggcggcatcttcaccctgatctttgcccgcctcaatatccgattgagaaattgtctgtttcgatcgctcgtgagccaggagacgtccttcttcgacgagaacagaacaggggacctgataagcagactgactagtgacacaaccatggtgagcgacctggtgagtcagaatattaatgtttttctcaggaataccgtcaaagtgactggggtggtggttttcatgttcagtctttcatggcagctttccctggtgacatttatggggtttcccataatcatgatggtctctaacatctacgggaagtattacaaaaggttgtctaaagaggtccaaaacgctctggcacgcgcatccaataccgcagaggaaacaatctctgccatgaagaccgttaggtcctttgccaacgaggaagaagaggccgaagtctacctgaggaagttgcaacaggtttataagctgaaccgcaaggaggctgcagcatacatgtactatgtatggggttcgggactgactctgctggtggtccaagtctctattctgtactacggcggacacctcgtgatcagcggccaaatgacaagcggcaatttgatcgccttcattatctacgagtttgtgcttggcgactgtatggaatccgtcggatcagtctatagtggtcttatgcagggagtaggagcagccgagaaagtgttcgagtttatagataggcagcccactatggtgcacgatggctcgcttgcgcccgatcatctcgagggaagggtggatttcgagaacgtaactttcacgtatagaacacgcccacacacacaggtcctccagaacgtgagtttttccctcagccctggtaaggtcacagcactggtgggtcctagcggctctggaaaaagctcatgtgttaacattctggagaacttttatcctctggagggagggcgagtcttgctggatggcaagcccattagcgcctatgaccacaaatatctccacagagtaatctctttggtcagtcaggaacctgttttatttgcaagaagcataaccgataatatcagctatggtctacccaccgtaccttttgagatggtcgtagaagcagcgcagaaagctaatgcccacggattcatcatggagcttcaagatggttactccacagaaaccggagaaaagggcgcgcaactgagcggcggtcagaaacagcgcgtggccatggccagggcactggtgagaaatccaccagttctgatcctggatgaggctacctcagcgctcgatgccgagagtgagtatctgatccagcaggccatccacggtaacttgcagaagcacactgtattgatcattgctcatcggctttccacagttgagcatgcccacttgattgtggtgctggacaaaggccgtgtcgtgcagcagggcacacaccaacagcttctggcacaaggcggcctgtatgctaaattagtccagcgccaaatgctcggacttcaacccgccgcagactttactgccgggcataatgaaccggtggcaaacggaagtcataaggcgtag

SEQ ID NO: 202023 - DNA, 2310 bp, Artificial Sequence
  derived and/or modified sequence
atgcggctgtggaaggccgtggtggtgaccctggccttcatgagcgtggacatctgtgtgactacagctatatacgtctttagtcatctggatcggtccttgttggaggacatcaggcactttaacatctttgattctgtgcttgatctgtgggccgcatgcctgtaccggtcatgcctgctgctgggagccaccattggcgtggcaaagaactccgctttagggccaagacgcctgcgcgcctcctggctggtcatcaccctagtgtgcctgttcgtgggtatctacgccatggtaaaactgttactattctccgaggtgagacgccccattagagatccttggttctgggccctgttcgtgtggacatatattagtctgggagctagctttctgctgtggtggctcctctcgacagtccgaccaggcacccaggccctggagcccggggctgccacagaagcggaggggttcccaggcagtggacggccaccgccggaacaggccagtggagccactcttcagaagctcctgtcctacactaaaccagacgtggccttcctggtggctgccagcttttttctgattgtagccgccctcggggaaaccttcctaccttattatactgggagggctattgatgggattgtgattcagaaatccatggaccagttctcgacagcggtggtgattgtctgtcttctggccattggtagctcttttgccgcagggattcgtggcggcatctttactttgatctttgcgaggctcaacatccggcttaggaattgcttgttccggtccctggtctctcaggagaccagcttttttgatgagaacaggaccggggacctcatttctaggctcacaagcgatactactatggtgtccgacctcgtaagccaaaacattaacgtgtttctgagaaacacagtgaaggtcactggcgttgtggtattcatgtttagtcttagctggcagttgtctctggtgacattcatgggcttcccaattatcatgatggtaagcaatatctacggtaagtactacaagaggttatccaaggaagtgcaaaatgcattagctcgtgcctctaatacagccgaggagaccatctcagcgatgaagactgtccgcagctttgctaatgaggaggaagaagccgaggtttaccttagaaagttgcaacaggtgtacaagctgaaccgaaaggaagcagccgcttacatgtattacgtctggggctccggtctaaccttgttggtagtgcaggtgtctattctttactacgggggtcacctagtgatctcagggcaaatgacgagtggcaatctgatcgcattcattatttatgaattcgtgctgggtgattgtatggagagtgtgggatcagtatacagcgggttgatgcagggagtgggcgccgcagaaaaggtctttgagttcatagacaggcaacctaccatggtccatgacggttcactggcccccgatcacctggaagggcgagtggactttgaaaatgtgacctttacctatcggacacgcccccatacccaggtcctgcagaacgtatctttcagcttgagcccgggaaaggtcacggcgctcgtgggtcccagtggttctggaaagtcctcgtgcgttaatattctggagaacttttacccgctggagggtggtcgcgtgctcctggacggaaagcccatttccgcttacgatcataaatacctccacagggtgattagtctcgttagtcaggagccagtgttgttcgctcgctctataaccgacaacatatcctacggactccctactgttccattcgaaatggtggtcgaagccgcccagaaggcaaacgcacatggattcattatggagctccaggacggctactctacagagacaggggagaaaggggctcagcttagcgggggccagaagcagcgcgtggccatggctcgtgctctggttcgcaatccccccgtgttaattctggacgaagctacctctgctctcgacgctgagtctgagtatttaagcccacaaattcagcaggccattcatggaaaccttcagaaacatacagtactgatcatagcacaccggctgtctactgtggagcatgcccatttaattgtggtattggataagggcagagtggttcagcaggggactcaccaacaactgctggcccagggcggcttgtacgccaaactcgtgcagagacaaatgctggggttgcaacctgctgccgacttcactgccggacataatgagcctgtagccaatgggtcacacaaagcctag

SEQ ID NO: 202024 - DNA, 2301 bp, Artificial Sequence
  derived and/or modified sequence
atgcggctgtggaaggccgtggtggtgaccctggccttcatgagcgtggacatctgcgttacaactgcaatctatgtcttttcccacctcgatcgctcactgctcgaggatattcgccacttcaacatttttgacagcgtcctcgatttgtgggccgcttgtctctaccggtcgtgcctccttcttggtgcgacaataggagtagccaagaactcagctctcggtccccgcagactccgagcatcatggctcgtgatcacgctggtctgtttgtttgtgggtatatacgcgatggtcaagctgctgctcttcagtgaggtgaggaggcctattcgggatccttggttctgggctttgttcgtgtggacgtacatctctctgggtgcatcattcctgctgtggtggctcttgtcaacagtgcgccctggtacccaagctctcgaacctggcgctgccaccgaagctgaggggttccctggcagtggccggcccccccctgagcaggcatctggggccacattacaaaaacttttgtcatataccaagcccgacgtcgccttcctggtagccgcatcatttttcttgatcgttgctgcactgggcgaaacttttctgccatattacacggggagggcaattgacggcatagttatccagaaaagcatggatcagttttctactgccgtagtgattgtatgtctactggcgatcgggagcagtttcgcagccggcatccgcggaggcatctttacgttgatctttgcaagacttaacatcaggctaaggaattgtctgtttaggagtctcgtgagccaagagacatcctttttcgatgagaaccgaaccggggacttgatttcccgtctgacatctgataccactatggtgagtgatctggtgagtcagaatatcaacgttttcctccggaataccgttaaggtgaccggcgtggtggtatttatgttttccctgtcatggcaactgtcgctggttactttcatgggcttcccgatcatcatgatggtctccaacatttacggtaaatactataaacggttatcaaaggaagtgcagaacgcattggctagagcaagcaatacagccgaagagaccatcagcgctatgaagactgtgcggtcattcgcaaacgaggaggaagaagctgaggtgtacttaagaaagttgcagcaggtctataagctgaatagaaaagaggcagccgcctacatgtattatgtgtgggggtctggactcaccctgctggtcgtgcaagttagcattctgtactatggcggccatctggtgattagcgggcagatgacgtccggtaacttgatagcctttatcatctatgagttcgtgttgggtgattgtatggagtccgtgggctcagtttatagtgggttgatgcaaggtgtgggcgccgcagagaaagtatttgagtttattgatagacagcctaccatggttcacgatggctcccttgcacccgatcaccttgaaggacgggttgactttgaaaatgtgacctttacctacagaacccgacctcatactcaggtgttacagaatgtctcgttctctctctcgcccggcaaggtgacagcattggtcgggccttcggggtcagggaagtcgtcatgcgtcaacatccttgaaaatttctacccactggagggtggccgtgtactcctggacggtaagcctatctcagcatacgaccacaaatatttgcacagggtgataagcttggtgtctcaggaaccggttctgtttgcacgttccattaccgataatatctcttatggacttccgaccgtgcccttcgaaatggttgttgaagcagctcagaaagcgaatgctcatggattcataatggaactgcaagacgggtattcgaccgagaccggagaaaagggagcccagctgtccggaggccaaaagcagagggtggctatggcacgggcactggtgcgcaatccacccgtgctaatcctcgacgaggccacatcagcgttggacgcagagtcggaatatctgatccagcaggccatccacggcaatttgcagaagcacacagtgctcattatcgctcaccgcctaagcacagttgagcacgcccacttaattgtggtgcttgataaggggcgtgtcgtccaacaagggacccaccagcagctgctcgcacagggcgggttgtacgctaagctggtacaacggcagatgcttggccttcagccagctgcagacttcaccgcgggacataacgaacctgtcgcaaacgggtctcacaaggcatag

SEQ ID NO: 202025 - DNA, 2301 bp, Artificial Sequence
  derived and/or modified sequence
atgcgcctctggaaagcagttgtggtaactctcgcctttatgagcgtggacatctgcgtaacaacagccatctacgttttctcacatcttgaccggagtctgctcgaggacatccgccatttcaatatcttcgatagcgttctcgacctctgggcagcttgtctgtatcgtagctgcctattattgggtgcgactattggggttgctaaaaacagtgctttaggccctcgccgtctgagagccagctggctggtgataaccctggtctgcctgtttgtgggaatctatgccatggtgaagttgctgctatttagtgaagttagacgacctatccgggatccgtggttttgggcactgtttgtgtggacttacatttccttaggggctagctttctcctatggtggctgctgagcacagtccgaccaggtacccaggctctggaacctggggctgcaacagaggccgaagggttccccggatcaggcagacctcccccagaacaagccagtggcgcaacactgcagaaactattatcttacactaagccagatgtggccttccttgtagcagcctccttttttctgattgttgccgctctgggcgaaaccttcttgccttactacaccggcagggcgatcgacgggatcgtcatccagaaatctatggatcagttttccactgccgtcgtgattgtgtgtctgctcgccatcggttcttcatttgccgcaggtattagagggggtatttttactttgatcttcgccagattaaacattagactacggaactgcttgttcaggtcgctggtgtcccaagaaacttcattttttgacgagaacaggacaggcgatctgatcagccggctgacttccgatacaacaatggtcagcgacctggtgtcacagaatatcaatgtcttcttacgcaacactgtgaaagtgactggtgtcgtggtgtttatgttctctctgagctggcagctgagcctggtaacatttatgggctttcctatcatcatgatggtctctaacatttatgggaaatactataaacgattatctaaggaagtgcagaatgccctcgcgagagctagcaatacggccgaggagacaatttccgcgatgaaaaccgtacgcagcttcgccaacgaggaagaagaggcggaggtctatttacgaaagctccagcaggtatataaattgaacaggaaggaggccgcagcctatatgtactacgtttgggggtctggcctcacgttacttgtggtgcaggtgtctatcttgtactatgggggacatctggtaatttctgggcagatgacttcaggcaatctgatagcctttatcatctacgagtttgtcctgggcgattgcatggagagcgttggctctgtctactccgggctcatgcagggggtcggtgccgctgagaaagtattcgagttcatcgatcggcagccaactatggtgcacgatggcagcttggcccctgaccaccttgaggggagagttgattttgaaaatgtcaccttcacttaccgcacacggcctcacacgcaggttttgcagaatgtatcattcagcctttccccaggaaaagtgacggcactggtgggacccagtggctcaggcaaatctagttgcgtgaatatcctggaaaatttttaccccctcgagggcggtagagttctgctggacgggaagccaatatctgcatatgatcataagtacctccacagagtgatctctttggtcagtcaggagcctgttttattcgctcgaagcatcacagacaacatcagttacggactgcccacagtgccctttgagatggttgtagaagcagcccagaaggctaatgcacatggtttcattatggaactacaggacgggtatagtactgagacaggagaaaaaggcgcacagttgtctggaggccagaaacaacgcgttgccatggcacgcgcattggtgcggaatcccccagttctgatactcgatgaggccacatccgcattggacgccgaatctgagtatctgattcaacaggccatacacggcaatctacagaaacatactgtacttatcattgcacatcgcttatcaacggtggagcatgcacatctgatcgtcgttcttgacaagggaagagttgtccagcaaggcacccatcagcagttacttgctcaaggcggtctctacgctaagctggtgcagaggcagatgcttggactgcagccagccgctgatttcactgcagggcacaatgaaccagtcgcaaatggctcccataaggcatag

SEQ ID NO: 202026 - DNA, 2301 bp, Artificial Sequence
  derived and/or modified sequence
atgagactctggaaagctgtcgtcgtcacactggcttttatgagcgttgatatctgtgttactaccgctatctacgtgttctctcacctggaccggtcactgctggaggatattagacatttcaacatctttgacagcgtgctggacctctgggccgcttgtctgtatcgttcctgcctcctccttggagcgaccatcggagtagcgaagaatagtgctctcgggccaaggcggctgcgtgcctcctggctagtgatcactttggtgtgtctgttcgtggggatctacgcgatggtcaagcttctgctattcagtgaggtcaggaggcccatcagagacccatggttctgggcacttttcgtatggacctatatcagcctgggcgctagcttcctcctgtggtggctgctgtctaccgtgcggcctggcacccaggccttagagcccggagcagcaaccgaagctgagggctttcctggcagcgggagacctcccccagagcaggcctcgggagcaaccttacagaaactgctgtcgtacacaaagcctgatgtcgctttcctcgtggctgcgagcttctttctaatcgtggcggcactgggcgaaacctttctgccctactacaccggccgagccatcgatgggatcgtcatacagaaatccatggatcaattttctaccgctgtggtgattgtgtgtctgctggcaatcgggagctcatttgcagccggtatacggggagggatctttaccctgattttcgctagactcaatatccggcttaggaattgcctgttccgcagtctcgtgtcccaggagacatcgttttttgacgagaaccgaaccggcgacctgatttcccgactaactagtgacaccacaatggttagcgatctagtcagtcagaacattaatgtgttcttgagaaacactgtgaaggttacaggtgtggttgtatttatgttttccttgtcatggcaattaagccttgtgaccttcatgggattccctattatcatgatggtttccaacatctatggcaagtactacaagcggctctcaaaggaagtgcaaaacgccctggcgagagcctctaataccgcggaagagactataagcgcaatgaagactgttcggtcatttgccaatgaggaagaggaggccgaggtgtacctgaggaagctgcagcaggtttacaagttgaaccgcaaagaagctgcagcttatatgtactacgtctggggctccggactgacactcctcgttgtccaggtctcgatcctgtattacggagggcatctagtgatttccgggcagatgacttccggaaatcttattgccttcattatttacgagtttgtcctgggggattgcatggagtctgtcggcagcgtgtattctgggcttatgcagggcgtaggtgccgcagaaaaagtgttcgagtttattgacagacagcccacaatggtccatgacgggtccctagcccctgaccacctagaaggcagggtcgatttcgagaatgtgacattcacttatcggactcggccacacacccaggtcctgcagaacgtgtccttcagtctatcccccggtaaggtcaccgccctggtcggcccaagcggttctggcaaatcatcatgtgtgaatattctggagaatttttatcctctggaaggtggcagagtccttttggatggcaagcccatatctgcctacgatcataagtacctccacagggttattagtcttgtgtctcaggaacccgtactgtttgcacggtcgatcaccgataacatttcttacggacttccaactgtgcctttcgaaatggtggtagaggccgcacagaaagcaaacgctcacggtttcattatggagctacaggatgggtactccacggaaaccggcgagaaaggcgctcaattgtctggtggccagaaacagagggtggcgatggcgagagctctggtgagaaatcctcccgtcctgattctcgacgaggcgacaagtgctctggatgccgagagtgaatatctcatccagcaagctattcatggtaacctgcaaaaacatacagttcttattatagcccataggctgtccacagtggaacatgcgcacctcatcgtagtacttgataaaggacgcgtcgtgcagcaggggacgcatcagcaattgctcgcacaaggtggcctttacgctaaattagtgcagcgccaaatgctcgggctgcagcctgctgcagatttcacagcaggccacaacgagccagtggccaatgggagccacaaggcatag

SEQ ID NO: 202027 - DNA, 2310 bp, Artificial Sequence
  derived and/or modified sequence
atgcggctgtggaaggcggtggttgtcacgttagcattcatgagtgtcgatatctgtgtgaccacagccatatacgtgttctcacacctagatcgtagcttgctagaggatatccgacattttaatatatttgattcggtccttgatctgtgggcagcctgtctgtacaggtcttgtcttctgctgggggctaccatcggcgtcgccaagaactcagccctgggcccaagacgcctgcgcgctagctggctcgtcataactctcgtctgcttgtttgtgggcatctacgccatggttaagctcttactcttctctgaggtgcggagacccattagagacccctggttttgggctctgtttgtgtggacgtatatttctctcggcgctagctttctcctctggtggcttttgtcaaccgttcgaccgggaacgcaggctctggagccgggtgccgctacagaggcagagggttttcccggaagcggcaggcctcccccagagcaagcatccggggcaacgctgcagaagctactgagttatacgaagcccgatgttgcgtttttagtagccgcttcattttttctcatcgtggcagcccttggagaaactttcctaccatattataccggtcgagccatcgacggcattgtaatccagaaaagcatggatcagtttagcaccgcagtcgtgatcgtgtgcctcctggccattggctccagttttgccgctggtatcagagggggaatctttacacttatttttgcacgccttaatatccgcctgagaaactgcctttttcgaagcctggtctctcaggaaactagtttctttgacgagaacagaacgggggatctcattagccggctgacctcagacaccaccatggtgtcagatcttgtgtcccaaaacatcaatgtgtttcttcgcaacactgtgaaagtcaccggggtggtcgtcttcatgttctcgttgtcatggcagctgtctttagtcacattcatgggctttcccatcataatgatggtgtcaaatatatatggtaagtattacaaaaggctgagcaaagaggtgcagaacgcactcgctcgtgccagcaacaccgccgaagaaacgatttcagcaatgaaaacggttcgtagcttcgctaatgaagaggaggaagcggaagtttacctgcggaaactgcagcaggtgtataaactgaatagaaaagaagcagcagcatacatgtactacgtctggggtagcgggctgacgttgctagtcgtgcaggtctctatcctgtactatggagggcatctggtcatcagcgggcagatgaccagtgggaatctaattgcttttatcatctacgagtttgtgctcggcgactgcatggagtcggtgggctcggtatacagcggactgatgcaaggcgtcggagctgctgagaaagtgtttgaatttatcgatcggcagcccacaatggtgcacgacgggtccttagcccctgaccacctcgaaggacgcgtagattttgaaaatgtgacttttacctatagaacaagaccgcatacccaagtgctccagaatgtgagttttagcctcagccctgggaaagtcacagcactagtgggtccatcagggtcagggaagagctcatgcgttaatatcttggaaaatttttacccactagagggcggtcgtgtgctcctggacgggaagcctatctccgcctatgaccacaaatacctgcatcgggttatctccctggtaagccaagagccagtcctctttgcccgtagcatcactgataatatctcctatggcctgcctaccgttccattcgagatggtggtcgaggctgcccagaaagctaatgcccatggcttcattatggagctgcaggacggttattctaccgagaccggtgagaagggagcccagctgagcggaggccagaagcagcgggtcgcaatggcgagggccctggtgcgtaaccccccagttctcatactcgacgaagccacatcggccttggacgctgagtcagaatacctgagtccacagatccagcaggcaattcacgggaatttgcagaaacacaccgtgttgattattgctcataggctctctaccgtggaacatgcacacctgatcgtggtcctagataaaggtcgggtcgtgcagcaaggaacacatcagcaactattagcccagggcggtctctacgctaagctcgtacagagacagatgctgggcttgcagcccgcagctgactttacagccggacataatgagccagtggcaaacggaagtcataaggcatag

SEQ ID NO: 202028 - DNA, 2301 bp, Artificial Sequence
  derived and/or modified sequence
atgcggctgtggaaagccgtcgttgtcaccctggcctttatgtccgtggacatctgtgttacgaccgcaatttacgtgttctcacaccttgatcgctctctgctggaggacattcggcacttcaatatatttgatagcgtgctcgatctgtgggccgcttgtttatacagaagctgtttgttgttaggagccaccatcggggtcgcaaagaatagcgcgcttggcccaagacgtctgcgagctagctggcttgtgattacattggtatgccttttcgtcggaatttacgccatggtgaaactcctcctattctccgaggtgagaagacccatccgcgacccttggttttgggccctgttcgtgtggacctatatcagcctgggagccagttttctgctttggtggttactgtccactgtgcgcccaggaacccaggcattggaaccaggcgcagcaaccgaagctgaaggctttcctggcagtggcagaccgccacctgagcaggcctctggcgcaacacttcagaagctgttgagttacactaaacccgacgtggcctttttggtggccgcatcttttttccttattgtggccgcattaggcgaaaccttcttaccttattacaccggaagagctatcgatggaatagtgatccagaaatcaatggaccagttttcgacagctgtcgtgattgtctgtctgctcgcaataggctcgtccttcgccgctggtattagaggcggtatattcacgctgattttcgcaagactcaatatcaggctgcgcaactgcctgtttagatcgctggtgtcacaggaaacgtctttcttcgatgagaatagaaccggtgatctaattagtagactgactagtgatacgacgatggtaagtgatcttgtttcacagaacattaatgtcttcctgcgtaataccgtaaaggtcaccggggtggtggtgtttatgttttccctttcctggcaactctcactggttacctttatgggattcccgataataatgatggtcagcaacatctacggcaagtattataagcgcctctctaaagaagtacagaatgcgctggcaagggcctccaacacggcagaggagaccataagtgcgatgaagacagtaagatctttcgccaacgaagaagaagaagcagaggtttatcttcgaaaactacaacaggtttacaaacttaatagaaaggaggcggcagcttatatgtactatgtttggggcagcggattaacattgctagtggtccaggtgagtatactgtattatggcggacatctggtgatcagcggacagatgacgagcgggaacctgattgccttcattatttatgagtttgtgttgggtgactgcatggagagtgttggtagtgtttattccgggctgatgcaaggtgtaggcgctgcggagaaggtgtttgagttcatcgatcggcagccaactatggtgcacgatggttctttggcccctgatcacttggagggacgagtcgacttcgagaacgtgacctttacctaccggactcgccctcatactcaggtgctgcaaaatgtgtccttctcgctgagtcctggaaaggtgaccgccctggtgggtcccagcggttccggtaaaagcagctgcgtcaacattctggaaaacttctacccgctggaggggggaagagtactgctagacggcaagcccatatctgcatacgatcacaagtatctgcacagagtcatctccctggtcagccaggagcctgtccttttcgcgaggtctataacagacaatatttcatacggactgccgacagtgccttttgagatggtggtggaggctgcccagaaggccaacgcacacggattcattatggaactgcaagatggatactcaactgaaaccggcgagaagggagcccagctgtctggcggacagaagcagcgtgttgccatggcaagggccctggttaggaatccgcctgtactcattctggacgaagccacttcagccctggacgccgagtcagaatatctcatacagcaggccatccacggcaacctgcagaagcatacagtgctgatcatagcgcaccgactgtcgaccgtggagcacgcccatcttatcgttgttctggataaggggagggtcgtgcagcaaggaactcaccagcaactcctcgctcagggaggcctttacgccaagttagtccagcgacagatgctgggcctacagcctgctgcggatttcactgctggtcacaatgagccagtcgccaatggcagccataaggcttag

SEQ ID NO: 202029 - DNA, 3515 bp, Artificial Sequence
  derived and/or modified sequence
cgccccgtccatcagcctgtctcaacgcacgccagtctcagctccgaccttgcagcggcgcagcgcgggtgggaggcggggaggagcagcgggaagagcggagcgaggaccgcgtccggcgcagtcttcaatgagcagcgcggaaactgcaccccagacccgagcctgctgcgcgccccctcccagagctcacctggtgccaggtaacaggcctggcctcgccctgtggatgatgatggccttgcccccgtgagctacaacctggccttcagcacccgcccacctccaaccagcaggatgcggctgtggaaggcggtggtggtgactttggccttcatgagtgtggacatctgcgtgaccacggccatctatgtcttcagccacctggaccgcagcctcctggaggacatccgccacttcaacatctttgactcggtgctggatctctgggcagcctgcctgtaccgcagctgcctgctgctgggagccaccattggtgtggccaagaacagtgcgctggggccccggcggctgcgggcctcgtggctggtcatcaccctcgtgtgcctcttcgtgggcatctatgccatggtgaagctgctgctcttctcagaggtgcgcaggcccatccgggacccctggttttgggccctgttcgtgtggacgtacatttcactcggcgcatccttcctgctctggtggctgctgtccaccgtgcggccaggcacccaggccctggagccaggggcggccaccgaggctgagggcttccctgggagcggccggccaccgcccgagcaggcgtctggggccacgctgcagaagctgctctcctacaccaagcccgacgtggccttcctcgtggccgcctccttcttcctcatcgtggcagctctgggagagaccttcctgccctactacacgggccgcgccattgatggcatcgtcatccagaaaagcatggatcagttcagcacggctgtcgtcatcgtgtgcctgctggccattggcagctcatttgccgcaggtattcggggcggcatttttaccctcatatttgccagactgaacattcgccttcgaaactgtctcttccgctcactggtgtcccaggagacaagcttctttgatgagaaccgcacaggggacctcatctcccgcctgacctcggacaccaccatggtcagcgacctggtctcccagaacatcaatgtcttcctgcggaacacagtcaaggtcacgggcgtggtggtcttcatgttcagcctctcatggcagctctccttggtcaccttcatgggcttccccatcatcatgatggtgtccaacatctacggcaagtactacaagaggctctccaaagaggtccagaatgccctggccagagcgagcaacacggcggaggagaccatcagtgccatgaagactgtccggagcttcgccaatgaggaggaggaggcagaggtgtacctgcggaagctgcagcaggtgtacaagctgaacaggaaggaggcagctgcctacatgtactacgtctggggcagcgggctcacactgctggtggtccaggtcagcatcctctactacgggggccaccttgtcatctcaggccagatgaccagcggcaacctcatcgccttcatcatctacgagtttgtcctgggagattgtatggagtccgtgggctccgtctacagtggcctgatgcagggagtgggggctgctgagaaggtgttcgagttcatcgaccggcagccgaccatggtgcacgatggcagcttggcccccgaccacctggagggccgggtggactttgagaatgtgaccttcacctaccgcactcggccccacacccaggtcctgcagaatgtctccttcagcctgtcccccggcaaggtgacggccctggtggggccctcgggcagtgggaagagctcctgtgtcaacatcctggagaacttctaccccctggaggggggccgggtgctgctggacggcaagcccatcagcgcctacgaccacaagtacttgcaccgtgtgatctccctggtgagccaggagcccgtgctgttcgcccgctccatcacggataacatctcctacggcctgcccactgtgcctttcgagatggtggtggaggccgcacagaaggccaatgcccacggcttcatcatggaactccaggacggctacagcacagagacaggggagaagggcgcccagctgtcaggtggccagaagcagcgggtggccatggcccgggctctggtgcggaaccccccagtcctcatcctggatgaagccaccagcgctttggatgccgagagcgagtatctgatccagcaggccatccatggcaacctgcagaagcacacggtactcatcatcgcgcaccggctgagcaccgtggagcacgcgcacctcattgtggtgctggacaagggccgcgtagtgcagcagggcacccaccagcagctgctggcccagggcggcctctacgccaagctggtgcagcggcagatgctggggcttcagcccgccgcagacttcacagctggccacaacgagcctgtagccaacggcagtcacaaggcctgatggggggcccctgcttctcccggtggggcagaggacccggtgcctgcctggcagatgtgcccacggaggcccccagctgccctccgagcccaggcctgcagcactgaaagacgacctgccatgtcccatggatcaccgcttcctgcatcttgcccctggtccctgccccattcccagggcactccttacccctgctgccctgagccaacgccttcacggacctccctagcctcctaagcaaaggtagagctgcctttttaaacctaggtcttaccagggtttttactgtttggtttgaggcaccccagtcaactcctagatttcaaaaacctttttctaattgggagtaatggcgggcactttcaccaagatgttctagaaacttctgagccaggagtgaatggcccttccttagtagcctgggggatgtccagagactaggcctctcccctttacccctccagagaaggggcttccctgtcccggagggagacacggggaacgggattttccgtctctccctcttgccagctctgtgagtctggccagggcgggtagggagcgtggagggcatctgtctgccatcgcccgctgccaatctaagccagtctcactgtgaaccacacgaaacctcaactgggggagtgaggggctggccaggtctggaggggcctcaggggtgcccccagcccggcacccagcgctttcgcccctcgtccacccacccctggctggcagcctccctccccacacccgcccctgtgctctgctgtctggaggccacgtggatgttcatgagatgcattctcttctgtctttggtggatgggatggtggcaaagcccaggatctggctttgccagaggttgcaacatgttgagagaacccggtcaataaagtgtactacctcttacccct

SEQ ID NO: 202030 - DNA, 3791 bp, Artificial Sequence
  derived and/or modified sequence
cacgcccccaaccgcgggaggcgcggaaccagcggccaaggggccgctctaagttcccaagggcggaaaaggacgaagacgcacctcgccaggaaacggtctgcggagaaagatgctcctgggccgggttgggaccggcggcctcctcgttccgcctcccagttttcccactacgaggcagggactaatggctccactttacagacagctgaactgggtcgtgccttcacaggacggggagaggaagggactcggagccccaaggcctttgacttaaacgccgacccaccccccgccgtctgcccggagctcgtggagaaccagccgagctgaggacagtttaaagagctcggaggtccgactagttcccgctggtgcttcaatcatccagccctgtacgtttcagtttggatttagcatctaccccgggtccctgcctggcgcttccggtccctccgccacagtctgttggattacctcagattgccccagcctggcctcgccctgtggatgatgatggccttgcccccgtgagctacaacctggccttcagcacccgcccacctccaaccagcaggatgcggctgtggaaggcggtggtggtgactttggccttcatgagtgtggacatctgcgtgaccacggccatctatgtcttcagccacctggaccgcagcctcctggaggacatccgccacttcaacatctttgactcggtgctggatctctgggcagcctgcctgtaccgcagctgcctgctgctgggagccaccattggtgtggccaagaacagtgcgctggggccccggcggctgcgggcctcgtggctggtcatcaccctcgtgtgcctcttcgtgggcatctatgccatggtgaagctgctgctcttctcagaggtgcgcaggcccatccgggacccctggttttgggccctgttcgtgtggacgtacatttcactcggcgcatccttcctgctctggtggctgctgtccaccgtgcggccaggcacccaggccctggagccaggggcggccaccgaggctgagggcttccctgggagcggccggccaccgcccgagcaggcgtctggggccacgctgcagaagctgctctcctacaccaagcccgacgtggccttcctcgtggccgcctccttcttcctcatcgtggcagctctgggagagaccttcctgccctactacacgggccgcgccattgatggcatcgtcatccagaaaagcatggatcagttcagcacggctgtcgtcatcgtgtgcctgctggccattggcagctcatttgccgcaggtattcggggcggcatttttaccctcatatttgccagactgaacattcgccttcgaaactgtctcttccgctcactggtgtcccaggagacaagcttctttgatgagaaccgcacaggggacctcatctcccgcctgacctcggacaccaccatggtcagcgacctggtctcccagaacatcaatgtcttcctgcggaacacagtcaaggtcacgggcgtggtggtcttcatgttcagcctctcatggcagctctccttggtcaccttcatgggcttccccatcatcatgatggtgtccaacatctacggcaagtactacaagaggctctccaaagaggtccagaatgccctggccagagcgagcaacacggcggaggagaccatcagtgccatgaagactgtccggagcttcgccaatgaggaggaggaggcagaggtgtacctgcggaagctgcagcaggtgtacaagctgaacaggaaggaggcagctgcctacatgtactacgtctggggcagcgggctcacactgctggtggtccaggtcagcatcctctactacgggggccaccttgtcatctcaggccagatgaccagcggcaacctcatcgccttcatcatctacgagtttgtcctgggagattgtatggagtccgtgggctccgtctacagtggcctgatgcagggagtgggggctgctgagaaggtgttcgagttcatcgaccggcagccgaccatggtgcacgatggcagcttggcccccgaccacctggagggccgggtggactttgagaatgtgaccttcacctaccgcactcggccccacacccaggtcctgcagaatgtctccttcagcctgtcccccggcaaggtgacggccctggtggggccctcgggcagtgggaagagctcctgtgtcaacatcctggagaacttctaccccctggaggggggccgggtgctgctggacggcaagcccatcagcgcctacgaccacaagtacttgcaccgtgtgatctccctggtgagccaggagcccgtgctgttcgcccgctccatcacggataacatctcctacggcctgcccactgtgcctttcgagatggtggtggaggccgcacagaaggccaatgcccacggcttcatcatggaactccaggacggctacagcacagagacaggggagaagggcgcccagctgtcaggtggccagaagcagcgggtggccatggcccgggctctggtgcggaaccccccagtcctcatcctggatgaagccaccagcgctttggatgccgagagcgagtatctgatccagcaggccatccatggcaacctgcagaagcacacggtactcatcatcgcgcaccggctgagcaccgtggagcacgcgcacctcattgtggtgctggacaagggccgcgtagtgcagcagggcacccaccagcagctgctggcccagggcggcctctacgccaagctggtgcagcggcagatgctggggcttcagcccgccgcagacttcacagctggccacaacgagcctgtagccaacggcagtcacaaggcctgatggggggcccctgcttctcccggtggggcagaggacccggtgcctgcctggcagatgtgcccacggaggcccccagctgccctccgagcccaggcctgcagcactgaaagacgacctgccatgtcccatggatcaccgcttcctgcatcttgcccctggtccctgccccattcccagggcactccttacccctgctgccctgagccaacgccttcacggacctccctagcctcctaagcaaaggtagagctgcctttttaaacctaggtcttaccagggtttttactgtttggtttgaggcaccccagtcaactcctagatttcaaaaacctttttctaattgggagtaatggcgggcactttcaccaagatgttctagaaacttctgagccaggagtgaatggcccttccttagtagcctgggggatgtccagagactaggcctctcccctttacccctccagagaaggggcttccctgtcccggagggagacacggggaacgggattttccgtctctccctcttgccagctctgtgagtctggccagggcgggtagggagcgtggagggcatctgtctgccatcgcccgctgccaatctaagccagtctcactgtgaaccacacgaaacctcaactgggggagtgaggggctggccaggtctggaggggcctcaggggtgcccccagcccggcacccagcgctttcgcccctcgtccacccacccctggctggcagcctccctccccacacccgcccctgtgctctgctgtctggaggccacgtggatgttcatgagatgcattctcttctgtctttggtggatgggatggtggcaaagcccaggatctggctttgccagaggttgcaacatgttgagagaacccggtcaataaagtgtactacctctta

SEQ ID NO: 202031 - DNA, 3799 bp, Artificial Sequence
  derived and/or modified sequence
cacgcccccaaccgcgggaggcgcggaaccagcggccaaggggccgctctaagttcccaagggcggaaaaggacgaagacgcacctcgccaggaaacggtctgcggagaaagatgctcctgggccgggttgggaccggcggcctcctcgttccgcctcccagttttcccactacgaggcagggactaatggctccactttacagacagctgaactgggtcgtgccttcacaggacggggagaggaagggactcggagccccaaggcctttgacttaaacgccgacccaccccccgccgtctgcccggagctcgtggagaaccagccgagctgaggacagtttaaagagctcggaggtccgactagttcccgctggtgcttcaatcatccagccctgtacgtttcagtttggatttagcatctaccccgggtccctgcctggcgcttccggtccctccgccacagtctgttggattacctcagattgccccagcctggcctcgccctgtggatgatgatggccttgcccccgtgagctacaacctggccttcagcacccgcccacctccaaccagcaggatgcggctgtggaaggcggtggtggtgactttggccttcatgagtgtggacatctgcgtgaccacggccatctatgtcttcagccacctggaccgcagcctcctggaggacatccgccacttcaacatctttgactcggtgctggatctctgggcagcctgcctgtaccgcagctgcctgctgctgggagccaccattggtgtggccaagaacagtgcgctggggccccggcggctgcgggcctcgtggctggtcatcaccctcgtgtgcctcttcgtgggcatctatgccatggtgaagctgctgctcttctcagaggtgcgcaggcccatccgggacccctggttttgggccctgttcgtgtggacgtacatttcactcggcgcatccttcctgctctggtggctgctgtccaccgtgcggccaggcacccaggccctggagccaggggcggccaccgaggctgagggcttccctgggagcggccggccaccgcccgagcaggcgtctggggccacgctgcagaagctgctctcctacaccaagcccgacgtggccttcctcgtggccgcctccttcttcctcatcgtggcagctctgggagagaccttcctgccctactacacgggccgcgccattgatggcatcgtcatccagaaaagcatggatcagttcagcacggctgtcgtcatcgtgtgcctgctggccattggcagctcatttgccgcaggtattcggggcggcatttttaccctcatatttgccagactgaacattcgccttcgaaactgtctcttccgctcactggtgtcccaggagacaagcttctttgatgagaaccgcacaggggacctcatctcccgcctgacctcggacaccaccatggtcagcgacctggtctcccagaacatcaatgtcttcctgcggaacacagtcaaggtcacgggcgtggtggtcttcatgttcagcctctcatggcagctctccttggtcaccttcatgggcttccccatcatcatgatggtgtccaacatctacggcaagtactacaagaggctctccaaagaggtccagaatgccctggccagagcgagcaacacggcggaggagaccatcagtgccatgaagactgtccggagcttcgccaatgaggaggaggaggcagaggtgtacctgcggaagctgcagcaggtgtacaagctgaacaggaaggaggcagctgcctacatgtactacgtctggggcagcgggctcacactgctggtggtccaggtcagcatcctctactacgggggccaccttgtcatctcaggccagatgaccagcggcaacctcatcgccttcatcatctacgagtttgtcctgggagattgtatggagtccgtgggctccgtctacagtggcctgatgcagggagtgggggctgctgagaaggtgttcgagttcatcgaccggcagccgaccatggtgcacgatggcagcttggcccccgaccacctggagggccgggtggactttgagaatgtgaccttcacctaccgcactcggccccacacccaggtcctgcagaatgtctccttcagcctgtcccccggcaaggtgacggccctggtggggccctcgggcagtgggaagagctcctgtgtcaacatcctggagaacttctaccccctggaggggggccgggtgctgctggacggcaagcccatcagcgcctacgaccacaagtacttgcaccgtgtgatctccctggtgagccaggagcccgtgctgttcgcccgctccatcacggataacatctcctacggcctgcccactgtgcctttcgagatggtggtggaggccgcacagaaggccaatgcccacggcttcatcatggaactccaggacggctacagcacagagacaggggagaagggcgcccagctgtcaggtggccagaagcagcgggtggccatggcccgggctctggtgcggaaccccccagtcctcatcctggatgaagccaccagcgctttggatgccgagagcgagtatctgtccccgcagatccagcaggccatccatggcaacctgcagaagcacacggtactcatcatcgcgcaccggctgagcaccgtggagcacgcgcacctcattgtggtgctggacaagggccgcgtagtgcagcagggcacccaccagcagctgctggcccagggcggcctctacgccaagctggtgcagcggcagatgctggggcttcagcccgccgcagacttcacagctggccacaacgagcctgtagccaacggcagtcacaaggcctgatggggggcccctgcttctcccggtggggcagaggacccggtgcctgcctggcagatgtgcccacggaggcccccagctgccctccgagcccaggcctgcagcactgaaagacgacctgccatgtcccatggatcaccgcttcctgcatcttgcccctggtccctgccccattcccagggcactccttacccctgctgccctgagccaacgccttcacggacctccctagcctcctaagcaaaggtagagctgcctttttaaacctaggtcttaccagggtttttactgtttggtttgaggcaccccagtcaactcctagatttcaaaaacctttttctaattgggagtaatggcgggcactttcaccaagatgttctagaaacttctgagccaggagtgaatggcccttccttagtagcctgggggatgtccagagactaggcctctcccctttacccctccagagaaggggcttccctgtcccggagggagacacggggaacgggattttccgtctctccctcttgccagctctgtgagtctggccagggcgggtagggagcgtggagggcatctgtctgccatcgcccgctgccaatctaagccagtctcactgtgaaccacacgaaacctcaactgggggagtgaggggctggccaggtctggaggggcctcaggggtgcccccagcccggcacccagcgctttcgcccctcgtccacccacccctggctggcagcctccctccccacacccgcccctgtgctctgctgtctggaggccacgtggatgttcatgagatgcattctcttctgtctttggtggatgggatggtggcaaagcccaggatctggctttgccagaggttgcaacatgttgagagaacccggtcaataaagtgtactacctctt

SEQ ID NO: 202032 - DNA, 6051 bp, Artificial Sequence
  derived and/or modified sequence
gaagaggaggaggagctggatcttgttctcctccgggccttctgcttgcttctctctgtgatgcagggagaaggtgaggctggaaggccaggaggggaagaggtaaaccttcgtcccctgctctggcctggggcaggcacagaccggctacagggtgagcgcttcctgaggggctttccagaacagagatggagcttcccagaggagccccttcctggctcctgcggcgcctggccctcacatctcaggcccggctgcacagaggcatgactgagcgtccccgaccactgctcgcccgacttccccgggtagtaactgcgcctcctctccccgatgcctgtggtcctcaccctccgccccaggggccgtgctggccttgcgaccttgggatgtggaggccgagcagttcctcgaggtgtctttcctgctcttcttctttctcttttccgacccccgtccccgggaccggctgcgactcctcgagcgcttgcgggagccgacgtgagccatggcgccgcgggctggcgacgaagaagacgcgcttgagccgaagcccccaaggccggccgcgggcgggctccaagggtggctctagcggggccggggcctggcgacgcccagtacccgtcaccgtcccgggaaaatgagcgaccctcacccacccccagcgctggggaccccggttttctccgccgactccagtccccgcagcggtgcctgttaagggcccgccccgtgcccggaggccccacgcctgcgcacccggctccaaacccctgggaactggccgccgtccgccgcgagtggcgtctggggcgctttcccgcgctctcctaccctccagccccgcgcccttcgcggcctcgccgcctcaagggggcccccggggctgctccgttcccacctcgaccgccctgcgggccggacagcccgccccgcgccttctcgagaggaagcggcggcgaggaggcttccggccggggcgctgcgcgggaggctggccggctgggaagcgcggcgccgctgcctttcgttctgacgccccaggttccgtcccgggcgcgcccacctcccgcagaggcaagcaggggcgccggccctcgagctccgcagcccctcacgcctgtgtctgccgaagctgcgcccacttccaaggctgccctctcggcgcacgcccgcagcacccacgcccccggtgccctgggaagaaggcgaccctcgcgcgcgccgccctcctccccggctggtcctgccctctccatacgactgcgagctccagactgaggcgccctggtctttccgacgcgcccacccagtgactcagaggtcgcaaactcgtgtccgtaggggccagaaagatcttggcagtgagcgcgggcatggaccccaggcccatccggaaggaagccaggattctgctccagctgatacgtgcaacgtggcatggggctggtgccccaccttcccagggagaccaaactcaagactgcaatatggaagccccctgagtttcaaatgtgtaacccaaagcgtggctgtgcgcttcatccaatctcgggcccccaagttgcaactcttccacaatgacagccgcaaacacaaagggatcttgcaaagcactttatatacgtcagcgcatttgactcccaaaacagctctaggaggtaggtgctaaatgaggaaacgaaggcaccaaaaggtgaaggctcacctaaagccacacagctggaagtggcagaagcagaatgggaacccgggcagcctggttcctggccctgccattcacccctctgccatctagaagatgctactggtggcccacccgagtccactggggggtgatgcctgctgctgagggttcacatctgtgctctctggaggcttcccttggctactggaaggcaccctgccctggagataagtgtctgggaagttattcactcctctctggccccctcatccaggagccagtaaccggtggtgtgggcacactgtggtactgtgggctctgcctggagctctccgtggggccagctgaggctggacgtcctctgaagccacttccttgcccagctgctccctcccctcccctgcttccctgactccctcgctgaagccccattccagaccctgcttctgacaaacctgaactaaggcagcatctttgcccatagaatgacccagaagctggcacaccgttgagccaagaagtgcagtaggctgcggggattttatttctgcccccagaccaaggcaacggagccctcacctgcctgccacccccacactgggcccaagcaagctcaggtgagcgcacatacatccaccgtggcgggctcctctcgggtgaagccatcaccgaagccctcatcgtccaccaggtcgggctcacggcagcacatgggacagaggctgttgcgcacagcagaggctcggagccagacgacaaggttccaacgctcaccagtgcccaagggccgggctccatgcagctggccgccacggtggaggacaccctggcccaccacgtgctccacctccaggggctccgtcagggctgtgggtgcctgcagatggcacgactcaggcctgggcactcacagctgccccaggccctgccgcatgggtcacacactcacctggaagaggcccccaaaatacagggcgccccctgtgaagaccttgcccaaggccacattgagggtgagctcggcattatcatagtggcagcccagctccaggtcctggcccggcctggcctcgccctgtggatgatgatggccttgcccccgtgagctacaacctggccttcagcacccgcccacctccaaccagcaggatgcggctgtggaaggcggtggtggtgactttggccttcatgagtgtggacatctgcgtgaccacggccatctatgtcttcagccacctggaccgcagcctcctggaggacatccgccacttcaacatctttgactcggtgctggatctctgggcagcctgcctgtaccgcagctgcctgctgctgggagccaccattggtgtggccaagaacagtgcgctggggccccggcggctgcgggcctcgtggctggtcatcaccctcgtgtgcctcttcgtgggcatctatgccatggtgaagctgctgctcttctcagaggtgcgcaggcccatccgggacccctggttttgggccctgttcgtgtggacgtacatttcactcggcgcatccttcctgctctggtggctgctgtccaccgtgcggccaggcacccaggccctggagccaggggcggccaccgaggctgagggcttccctgggagcggccggccaccgcccgagcaggcgtctggggccacgctgcagaagctgctctcctacaccaagcccgacgtggccttcctcgtggccgcctccttcttcctcatcgtggcagctctgggagagaccttcctgccctactacacgggccgcgccattgatggcatcgtcatccagaaaagcatggatcagttcagcacggctgtcgtcatcgtgtgcctgctggccattggcagctcatttgccgcaggtattcggggcggcatttttaccctcatatttgccagactgaacattcgccttcgaaactgtctcttccgctcactggtgtcccaggagacaagcttctttgatgagaaccgcacaggggacctcatctcccgcctgacctcggacaccaccatggtcagcgacctggtctcccagaacatcaatgtcttcctgcggaacacagtcaaggtcacgggcgtggtggtcttcatgttcagcctctcatggcagctctccttggtcaccttcatgggcttccccatcatcatgatggtgtccaacatctacggcaagtactacaagaggctctccaaagaggtccagaatgccctggccagagcgagcaacacggcggaggagaccatcagtgccatgaagactgtccggagcttcgccaatgaggaggaggaggcagaggtgtacctgcggaagctgcagcaggtgtacaagctgaacaggaaggaggcagctgcctacatgtactacgtctggggcagcgggctcacactgctggtggtccaggtcagcatcctctactacgggggccaccttgtcatctcaggccagatgaccagcggcaacctcatcgccttcatcatctacgagtttgtcctgggagattgtatggagtccgtgggctccgtctacagtggcctgatgcagggagtgggggctgctgagaaggtgttcgagttcatcgaccggcagccgaccatggtgcacgatggcagcttggcccccgaccacctggagggccgggtggactttgagaatgtgaccttcacctaccgcactcggccccacacccaggtcctgcagaatgtctccttcagcctgtcccccggcaaggtgacggccctggtggggccctcgggcagtgggaagagctcctgtgtcaacatcctggagaacttctaccccctggaggggggccgggtgctgctggacggcaagcccatcagcgcctacgaccacaagtacttgcaccgtgtgatctccctggtgagccaggagcccgtgctgttcgcccgctccatcacggataacatctcctacggcctgcccactgtgcctttcgagatggtggtggaggccgcacagaaggccaatgcccacggcttcatcatggaactccaggacggctacagcacagagacaggggagaagggcgcccagctgtcaggtggccagaagcagcgggtggccatggcccgggctctggtgcggaaccccccagtcctcatcctggatgaagccaccagcgctttggatgccgagagcgagtatctgatccagcaggccatccatggcaacctgcagaagcacacggtactcatcatcgcgcaccggctgagcaccgtggagcacgcgcacctcattgtggtgctggacaagggccgcgtagtgcagcagggcacccaccagcagctgctggcccagggcggcctctacgccaagctggtgcagcggcagatgctggggcttcagcccgccgcagacttcacagctggccacaacgagcctgtagccaacggcagtcacaaggcctgatggggggcccctgcttctcccggtggggcagaggacccggtgcctgcctggcagatgtgcccacggaggcccccagctgccctccgagcccaggcctgcagcactgaaagacgacctgccatgtcccatggatcaccgcttcctgcatcttgcccctggtccctgccccattcccagggcactccttacccctgctgccctgagccaacgccttcacggacctccctagcctcctaagcaaaggtagagctgcctttttaaacctaggtcttaccagggtttttactgtttggtttgaggcaccccagtcaactcctagatttcaaaaacctttttctaattgggagtaatggcgggcactttcaccaagatgttctagaaacttctgagccaggagtgaatggcccttccttagtagcctgggggatgtccagagactaggcctctcccctttacccctccagagaaggggcttccctgtcccggagggagacacggggaacgggattttccgtctctccctcttgccagctctgtgagtctggccagggcgggtagggagcgtggagggcatctgtctgccatcgcccgctgccaatctaagccagtctcactgtgaaccacacgaaacctcaactgggggagtgaggggctggccaggtctggaggggcctcaggggtgcccccagcccggcacccagcgctttcgcccctcgtccacccacccctggctggcagcctccctccccacacccgcccctgtgctctgctgtctggaggccacgtggatgttcatgagatgcattctcttctgtctttggtggatgggatggtggcaaagcccaggatctggctttgccagaggttgcaacatgttgagagaacccggtcaataaagtgtactacctctt

SEQ ID NO: 202033 - DNA, 2301 bp, Artificial Sequence
  derived and/or modified sequence
atgagactgtggaaggccgtggtggtgaccctggccttcatgagcgtggacatctgcgtgaccaccgccatctacgtgttcagccacctggacagaagcctgctggaggacatcagacacttcaacatcttcgacagcgtgctggacctgtgggccgcctgcctgtacagaagctgcctgctgctgggcgccaccatcggcgtggccaagaacagcgccctgggccccagaagactgagagccagctggctggtgatcaccctggtgtgcctgttcgtgggcatctacgccatggtgaagctgctgctgttcagcgaggtgagaagacccatcagagacccctggttctgggccctgttcgtgtggacctacatcagcctgggcgccagcttcctgctgtggtggctgctgagcaccgtgagacccggcacccaggccctggagcccggcgccgccaccgaggccgagggcttccccggcagcggcagacccccccccgagcaggccagcggcgccaccctgcagaagctgctgagctacaccaagcccgacgtggccttcctggtggccgccagcttcttcctgatcgtggccgccctgggcgagaccttcctgccctactacaccggcagagccatcgacggcatcgtgatccagaagagcatggaccagttcagcaccgccgtggtgatcgtgtgcctgctggccatcggcagcagcttcgccgccggcatcagaggcggcatcttcaccctgatcttcgccagactgaacatcagactgagaaactgcctgttcagaagcctggtgagccaggagaccagcttcttcgacgagaacagaaccggcgacctgatcagcagactgaccagcgacaccaccatggtgagcgacctggtgagccagaacatcaacgtgttcctgagaaacaccgtgaaggtgaccggcgtggtggtgttcatgttcagcctgagctggcagctgagcctggtgaccttcatgggcttccccatcatcatgatggtgagcaacatctacggcaagtactacaagagactgagcaaggaggtgcagaacgccctggccagagccagcaacaccgccgaggagaccatcagcgccatgaagaccgtgagaagcttcgccaacgaggaggaggaggccgaggtgtacctgagaaagctgcagcaggtgtacaagctgaacagaaaggaggccgccgcctacatgtactacgtgtggggcagcggcctgaccctgctggtggtgcaggtgagcatcctgtactacggcggccacctggtgatcagcggccagatgaccagcggcaacctgatcgccttcatcatctacgagttcgtgctgggcgactgcatggagagcgtgggcagcgtgtacagcggcctgatgcagggcgtgggcgccgccgagaaggtgttcgagttcatcgacagacagcccaccatggtgcacgacggcagcctggcccccgaccacctggagggcagagtggacttcgagaacgtgaccttcacctacagaaccagaccccacacccaggtgctgcagaacgtgagcttcagcctgagccccggcaaggtgaccgccctggtgggccccagcggcagcggcaagagcagctgcgtgaacatcctggagaacttctaccccctggagggcggcagagtgctgctggacggcaagcccatcagcgcctacgaccacaagtacctgcacagagtgatcagcctggtgagccaggagcccgtgctgttcgccagaagcatcaccgacaacatcagctacggcctgcccaccgtgcccttcgagatggtggtggaggccgcccagaaggccaacgcccacggcttcatcatggagctgcaggacggctacagcaccgagaccggcgagaagggcgcccagctgagcggcggccagaagcagagagtggccatggccagagccctggtgagaaacccccccgtgctgatcctggacgaggccaccagcgccctggacgccgagagcgagtacctgatccagcaggccatccacggcaacctgcagaagcacaccgtgctgatcatcgcccacagactgagcaccgtggagcacgcccacctgatcgtggtgctggacaagggcagagtggtgcagcagggcacccaccagcagctgctggcccagggcggcctgtacgccaagctggtgcagagacagatgctgggcctgcagcccgccgccgacttcaccgccggccacaacgagcccgtggccaacggcagccacaaggcctag

SEQ ID NO: 202034 - DNA, 2310 bp, Artificial Sequence
  derived and/or modified sequence
atgagactgtggaaggccgtggtggtgaccctggccttcatgagcgtggacatctgcgtgaccaccgccatctacgtgttcagccacctggacagaagcctgctggaggacatcagacacttcaacatcttcgacagcgtgctggacctgtgggccgcctgcctgtacagaagctgcctgctgctgggcgccaccatcggcgtggccaagaacagcgccctgggccccagaagactgagagccagctggctggtgatcaccctggtgtgcctgttcgtgggcatctacgccatggtgaagctgctgctgttcagcgaggtgagaagacccatcagagacccctggttctgggccctgttcgtgtggacctacatcagcctgggcgccagcttcctgctgtggtggctgctgagcaccgtgagacccggcacccaggccctggagcccggcgccgccaccgaggccgagggcttccccggcagcggcagacccccccccgagcaggccagcggcgccaccctgcagaagctgctgagctacaccaagcccgacgtggccttcctggtggccgccagcttcttcctgatcgtggccgccctgggcgagaccttcctgccctactacaccggcagagccatcgacggcatcgtgatccagaagagcatggaccagttcagcaccgccgtggtgatcgtgtgcctgctggccatcggcagcagcttcgccgccggcatcagaggcggcatcttcaccctgatcttcgccagactgaacatcagactgagaaactgcctgttcagaagcctggtgagccaggagaccagcttcttcgacgagaacagaaccggcgacctgatcagcagactgaccagcgacaccaccatggtgagcgacctggtgagccagaacatcaacgtgttcctgagaaacaccgtgaaggtgaccggcgtggtggtgttcatgttcagcctgagctggcagctgagcctggtgaccttcatgggcttccccatcatcatgatggtgagcaacatctacggcaagtactacaagagactgagcaaggaggtgcagaacgccctggccagagccagcaacaccgccgaggagaccatcagcgccatgaagaccgtgagaagcttcgccaacgaggaggaggaggccgaggtgtacctgagaaagctgcagcaggtgtacaagctgaacagaaaggaggccgccgcctacatgtactacgtgtggggcagcggcctgaccctgctggtggtgcaggtgagcatcctgtactacggcggccacctggtgatcagcggccagatgaccagcggcaacctgatcgccttcatcatctacgagttcgtgctgggcgactgcatggagagcgtgggcagcgtgtacagcggcctgatgcagggcgtgggcgccgccgagaaggtgttcgagttcatcgacagacagcccaccatggtgcacgacggcagcctggcccccgaccacctggagggcagagtggacttcgagaacgtgaccttcacctacagaaccagaccccacacccaggtgctgcagaacgtgagcttcagcctgagccccggcaaggtgaccgccctggtgggccccagcggcagcggcaagagcagctgcgtgaacatcctggagaacttctaccccctggagggcggcagagtgctgctggacggcaagcccatcagcgcctacgaccacaagtacctgcacagagtgatcagcctggtgagccaggagcccgtgctgttcgccagaagcatcaccgacaacatcagctacggcctgcccaccgtgcccttcgagatggtggtggaggccgcccagaaggccaacgcccacggcttcatcatggagctgcaggacggctacagcaccgagaccggcgagaagggcgcccagctgagcggcggccagaagcagagagtggccatggccagagccctggtgagaaacccccccgtgctgatcctggacgaggccaccagcgccctggacgccgagagcgagtacctgagcccccagatccagcaggccatccacggcaacctgcagaagcacaccgtgctgatcatcgcccacagactgagcaccgtggagcacgcccacctgatcgtggtgctggacaagggcagagtggtgcagcagggcacccaccagcagctgctggcccagggcggcctgtacgccaagctggtgcagagacagatgctgggcctgcagcccgccgccgacttcaccgccggccacaacgagcccgtggccaacggcagccacaaggcctag

SEQ ID NO: 202035 - protein, 254 aa, Artificial Sequence
  derived and/or modified sequence
MNKLFSFWKRKNETRSQGYNLREKDLKKLHRAASVGDLKKLKEYLQIKKYDVNMQDKKYRTPLHLACANGHTDVVLFLIEQQCKINVRDSENKSPLIKAVQCQNEDCATILLNFGADPDLRDIRYNTVLHYAVCGQSLSLVEKLLEYEADLEAKNKDGYTPLLVAVINNNPKMVKFLLEKGADVNASDNYQRTALILAVSGEPPCLVKLLLQQGVELCYEGIVDSQLRNMFISMVLLHRYPQFTASHGKKKHAK

SEQ ID NO: 202036 - protein, 274 aa, Artificial Sequence
  derived and/or modified sequence
MNKLFSFWKRKNETRSQGYNLREKDLKKLHRAASVGDLKKLKEYLQIKKYDVNMQDKKYSVVQSSRWLLSYTTPLNDFIRTPLHLACANGHTDVVLFLIEQQCKINVRDSENKSPLIKAVQCQNEDCATILLNFGADPDLRDIRYNTVLHYAVCGQSLSLVEKLLEYEADLEAKNKDGYTPLLVAVINNNPKMVKFLLEKGADVNASDNYQRTALILAVSGEPPCLVKLLLQQGVELCYEGIVDSQLRNMFISMVLLHRYPQFTASHGKKKHAK

SEQ ID NO: 202037 - protein, 201 aa, Artificial Sequence
  derived and/or modified sequence
MQDKKYRTPLHLACANGHTDVVLFLIEQQCKINVRDSENKSPLIKAVQCQNEDCATILLNFGADPDLRDIRYNTVLHYAVCGQSLSLVEKLLEYEADLEAKNKDGYTPLLVAVINNNPKMVKFLLEKGADVNASDNYQRTALILAVSGEPPCLVKLLLQQGVELCYEGIVDSQLRNMFISMVLLHRYPQFTASHGKKKHAK

SEQ ID NO: 202038 - DNA, 765 bp, Artificial Sequence
  derived and/or modified sequence
atgaataaacttttttcattttggaagcgcaagaatgagactagatcccagggatacaatctgagagagaaggacctgaaaaagctgcatagagctgcctctgtgggcgatttgaaaaagcttaaagagtatcttcagataaagaagtacgacgtgaacatgcaggataaaaaataccgtacccccctgcatctggcctgtgctaacggccacaccgacgtcgtcttgtttctcatcgagcaacaatgtaagattaacgtacgcgattccgagaacaaaagtccgctgattaaggccgttcaatgccaaaatgaggattgcgcgaccattctcctcaacttcggggctgatcccgacttgcgggatatacggtataatacagtgttgcactatgctgtctgtggccagagtctaagtctagttgaaaagttactcgaatacgaggctgacttggaagccaaaaacaaagacgggtacaccccactcttggtagctgttatcaacaacaatccaaagatggtgaaatttctactggagaaaggcgcggacgtcaacgcctccgacaactaccagaggaccgcgctgattctggccgtgagcggagagcccccatgtctggtgaaattactgcttcagcagggtgtggagttgtgttacgagggaatcgtagacagtcagcttagaaatatgtttattagcatggtactgctgcatcgctatccccagtttaccgctagtcacggcaaaaagaagcacgccaagtag

SEQ ID NO: 202039 - DNA, 825 bp, Artificial Sequence
  derived and/or modified sequence
atgaacaagctgttcagtttctggaaaaggaagaacgaaacacgctctcagggctataatctccgggagaaggacctcaagaaactccaccgggcagcttcggttggcgaccttaaaaaattgaaggaatatctccaaataaagaagtacgatgtgaatatgcaggataagaagtattcagtcgtgcagtcttctaggtggcttttaagttacacaacccctctcaatgactttataaggactccactgcatctggcatgcgccaatgggcatacagacgtagtgctgttcctgattgagcagcagtgcaagatcaatgtccgcgatagcgaaaacaaatcccctctcatcaaagccgtgcagtgccaaaacgaagattgcgccacgattctcttgaactttggagcagaccctgatcttcgcgacatcaggtacaacacagttctccattatgcagtttgcggacaatccttatccttggttgagaaactcttagagtacgaagctgacctggaggctaagaacaaggacggctacacccctctgcttgtggccgtaataaataataaccccaagatggtcaaattcctgcttgaaaaaggtgcggatgtgaatgctagcgataactatcagagaaccgctctcattctcgccgttagtggcgagcccccttgtttagttaagcttttgctacagcaaggggtggaattatgctacgaaggcattgtggactctcaactgagaaatatgtttattagcatggtgctgctgcatcgttatccacagttcacagcgtctcacggcaaaaaaaagcacgccaaatag

SEQ ID NO: 202040 - DNA, 606 bp, Artificial Sequence
  derived and/or modified sequence
atgcaggacaagaaatacagaacccctctgcacctggcatgtgctaatgggcacaccgacgtggtcctattcctcatcgaacagcaatgtaaaatcaatgtcagggactccgaaaataagtctcctctgatcaaggccgtgcagtgccagaatgaagactgcgcaaccattctcctgaacttcggagccgatcccgacttgcgcgacataagatacaacaccgtgctgcattacgccgtgtgtggccagtcactgtcacttgtggaaaaactgcttgagtatgaagcagatcttgaggccaagaacaaagatgggtacacgcctttgttagttgccgtgataaataacaacccaaagatggtgaagtttctccttgagaagggcgccgacgtgaatgcttctgacaactatcaacggaccgctctgattctggcggtgtcaggtgagccaccctgcctggtgaaattgcttctacaacagggagtcgagctgtgctatgaggggatcgtggattcccagcttaggaatatgttcatcagtatggttctgctccatcgctatccacagtttacggcgagccatggcaaaaaaaagcacgccaagtag

SEQ ID NO: 202041 - DNA, 765 bp, Artificial Sequence
  derived and/or modified sequence
atgaacaagctgttctccttctggaagaggaagaatgagaccaggagccagggctacaacctgcgggagaaggacctgaagaagctgcaccgggccgcctctgtgggggacctgaagaagctgaaggagtacctgcagatcaagaagtatgatgtgaacatgcaggacaagaagtaccgcacccccctgcacctggcctgtgccaacggccacacagatgtggtgctcttcctgattgagcagcagtgcaagatcaacgtgcgggacagcgagaacaagagccccctcatcaaggctgtgcagtgccagaatgaagactgtgccaccatcctgctgaactttggagctgaccctgacctgcgggacatccgctacaacacagtgctgcactatgctgtgtgtggccagagcctgagcctggtggagaagctgctggagtatgaagctgacctggaggccaagaacaaggatggctacacccccctgctggtggccgtcatcaacaacaaccccaagatggtgaagttcctgctggagaagggagcagatgtgaatgccagtgacaactaccagaggacagccctgatcctggccgtgtctggagagcccccctgcctggtgaagctgctgctgcagcagggcgtggagctgtgctatgagggcatcgtggacagccagctgaggaacatgttcatctccatggtgctgctgcaccgctacccccagttcaccgccagccacggcaagaagaagcacgccaagtag

SEQ ID NO: 202042 - DNA, 825 bp, Artificial Sequence
  derived and/or modified sequence
atgaacaagctgttctccttctggaagaggaagaatgagaccaggagccagggctacaacctgcgggagaaggacctgaagaagctgcaccgggccgcctctgtgggggacctgaagaagctgaaggagtacctgcagatcaagaagtatgatgtgaacatgcaggacaagaagtacagcgtggtgcagagcagccgctggctgctgagctacaccacccccctgaatgacttcatccgcacccccctgcacctggcctgtgccaacggccacacagatgtggtgctcttcctgattgagcagcagtgcaagatcaacgtgcgggacagcgagaacaagagccccctcatcaaggctgtgcagtgccagaatgaagactgtgccaccatcctgctgaactttggagctgaccctgacctgcgggacatccgctacaacacagtgctgcactatgctgtgtgtggccagagcctgagcctggtggagaagctgctggagtatgaagctgacctggaggccaagaacaaggatggctacacccccctgctggtggccgtcatcaacaacaaccccaagatggtgaagttcctgctggagaagggagcagatgtgaatgccagtgacaactaccagaggacagccctgatcctggccgtgtctggagagcccccctgcctggtgaagctgctgctgcagcagggcgtggagctgtgctatgagggcatcgtggacagccagctgaggaacatgttcatctccatggtgctgctgcaccgctacccccagttcaccgccagccacggcaagaagaagcacgccaagtag

SEQ ID NO: 202043 - DNA, 606 bp, Artificial Sequence
  derived and/or modified sequence
atgcaggacaagaagtaccgcacccccctgcacctggcctgtgccaacggccacacagatgtggtgctcttcctgattgagcagcagtgcaagatcaacgtgcgggacagcgagaacaagagccccctcatcaaggctgtgcagtgccagaatgaagactgtgccaccatcctgctgaactttggagctgaccctgacctgcgggacatccgctacaacacagtgctgcactatgctgtgtgtggccagagcctgagcctggtggagaagctgctggagtatgaggccgacctggaggccaagaacaaggatggctacacccccctgctggtggccgtcatcaacaacaaccccaagatggtgaagttcctgctggagaagggagcagatgtgaatgccagtgacaactaccagaggacagccctgatcctggccgtgtctggagagcccccctgcctggtgaagctgctgctgcagcagggcgtggagctgtgctatgagggcatcgtggacagccagctgaggaacatgttcatctccatggtgctgctgcaccgctacccccagttcaccgccagccacggcaagaagaagcacgccaagtag

SEQ ID NO: 202044 - DNA, 765 bp, Artificial Sequence
  derived and/or modified sequence
atgaacaagctgttcagcttctggaagcggaagaacgagacccggtcgcagggctataaccttcgagaaaaagacctgaaaaagttacacagagccgctagtgtgggtgatctgaaaaaacttaaggagtacttacagattaaaaaatacgacgtcaatatgcaggataagaagtaccgtactcccctgcacctagcctgtgctaacggccatacagacgtggtcctgttcctgatcgagcagcagtgtaagatcaacgtaagagactccgagaataagagtcccttgatcaaagccgttcaatgccagaatgaggactgcgctacaatcctcctgaattttggcgctgatcctgacctgcgggacattagatacaatacagtgctgcattatgccgtctgcggccaaagcctgagcctggtcgagaaactcctagagtatgaggccgacctggaggctaagaacaaggatggatatactccgctcctggtggctgtcataaacaataacccaaaaatggtgaaattcctattggagaaaggtgcggacgtgaacgcatcagacaactatcaaagaacagctctaatcctcgcagtgtcaggggaacctccgtgcctggtcaagctgcttctgcagcagggcgtagagctgtgctacgaaggcattgtcgatagccaattgcgaaatatgtttatatcaatggttcttctccaccggtacccccagttcactgcgtcccatggcaagaagaaacacgctaagtag

SEQ ID NO: 202045 - DNA, 825 bp, Artificial Sequence
  derived and/or modified sequence
atgaacaagctgttcagcttctggaagcggaagaacgagacccggagccagggttacaacctgcgggagaaagacctgaagaagctgcaccgggcagcttcagtaggcgatctgaaaaagcttaaagaatacctgcagattaagaaatatgacgttaacatgcaggataagaaatactctgtggtgcaatcatcaagatggctgctatcttatacgacacccctgaatgattttatacgcactcccctgcatctggcctgtgcaaacggtcacaccgatgtggtactctttcttattgaacaacagtgcaagattaatgtaagagactcagagaacaagtctcccctaattaaagctgttcagtgccagaatgaggattgtgcaacaatactcctgaacttcggagctgaccccgatctcagggacatccgatataataccgttctccattacgcagtttgcgggcagagtctttccctggttgagaagctgcttgagtatgaagccgatctggaggccaagaataaggatggttatacacctttgctggtcgccgtcataaacaacaatccaaaaatggtgaagtttctccttgaaaaaggggcagatgtgaacgcaagcgacaactatcagcgaaccgcattgatcctcgccgtctcaggagagcccccatgcctggtgaagttgctgcttcagcaaggagttgagctctgctacgagggcatcgtcgacagccagctgcgtaacatgttcattagtatggtactgcttcataggtaccctcaatttacagcatcccacggaaagaaaaagcatgctaagtag

SEQ ID NO: 202046 - DNA, 606 bp, Artificial Sequence
  derived and/or modified sequence
atgcaggacaagaagtaccggacccccctgcacctggcctgcgccaatggacacactgatgtcgtactctttcttatcgagcagcagtgtaagattaatgtgcgcgactccgaaaacaaatcccccctcattaaagcagtccagtgccaaaacgaagactgtgctactatcttgttgaactttggcgcagatccagatctgagagatattaggtacaacaccgtgcttcattatgccgtgtgtggtcagtccttatcgctcgtagagaagctacttgaatacgaggccgatctagaggccaaaaacaaagatgggtatacacctttactcgtcgcggtaatcaataacaaccccaaaatggttaagttcctcctcgaaaagggtgccgacgtgaacgctagcgataattaccagaggaccgccctgatcctagctgtgtctggagaacctccttgcctcgtgaaactcctgctacaacagggcgttgagctgtgctatgagggaattgtcgacagccagctgcggaacatgtttatctccatggtcctgctgcacagataccctcagttcacggctagtcatgggaagaaaaagcatgcgaagtag

SEQ ID NO: 202047 - DNA, 1298 bp, Artificial Sequence
  derived and/or modified sequence
ataacggccggctgcgcgaggcccttccagcatttccactttcgtcaggtactggagagggctgccggccggatgccagggcagaggggcagggcggacggctaggagttcaagaaacatcctggtctgagggaaaggctgcagcctgcaccgccatgaataagcttttcagcttctggaagaggaagaatgagacccgcagccagggctacaaccttcgagaaaaggatttaaagaaacttcacagagctgcttcagtcggggatttgaagaagctgaaggaataccttcagatcaagaaatatgatgtaaatatgcaggacaaaaaatacagaacacctttgcacctagcctgtgctaatggacatacagatgttgtacttttcctaattgagcaacaatgcaaaataaatgtccgggatagtgaaaacaaatccccattgattaaggcagtacagtgtcaaaatgaggattgtgctactattcttctaaactttggtgcagacccagatctgagggatattcgttataatactgttcttcactatgctgtttgtggtcaaagtttgtcattagttgaaaaactgcttgaatacgaagctgatcttgaagcgaaaaataaggatgggtatactccactattagttgccgttattaacaataatccaaaaatggtaaaatttcttctggagaaaggggctgatgtgaatgcttcagataattatcaaagaacagcccttattcttgctgtcagtggtgaaccaccatgtttagtaaagcttcttcttcagcaaggtgtggaattatgttacgaaggtattgtggattcacagctgaggaatatgtttatttccatggttttactgcatagatacccacaattcactgcgagccatggaaagaagaaacatgctaaatagacaccttattcttggcactacatgtgactaaaggaagatatggaacccatttctacaatttctttgccgcttccttgaattggaaaaatgtactttgaaagaaccgttaagtgaactattataatatttttgctgactacccagttgaagaaaagtttgttaattggatgggattttttttttttcacgttagaagacatgaagaaattttaaaagataaacatctatattgtgaaccatcagctgaaaagataaatttgtgttcaatatataggcagaaaaaaatttgtgtcaaaatgttgaatggaataataatgaggaaactgtgttaggcatgtattaaaacatttaaataaaataaaaatacatttcagctac

SEQ ID NO: 202048 - DNA, 1418 bp, Artificial Sequence
  derived and/or modified sequence
ataacggccgtaactgccataacggccggctgcgcgaggcccttccagcatttccactttcgtcaggtactggagagggctgccggccggatgccagggcagaggggcagggcggacggctaggagttcaagaaacatcctggtctgagggaaaggctgcagcctgcaccgccatgaataagcttttcagcttctggaagaggaagaatgagacccgcagccagggctacaaccttcgagaaaaggatttaaagaaacttcacagagctgcttcagtcggggatttgaagaagctgaaggaataccttcagatcaagaaatatgatgtaaatatgcaggacaaaaaatacagtgttgtccaatcttctagatggcttttatcctacaccactccgctgaatgactttataagaacacctttgcacctagcctgtgctaatggacatacagatgttgtacttttcctaattgagcaacaatgcaaaataaatgtccgggatagtgaaaacaaatccccattgattaaggcagtacagtgtcaaaatgaggattgtgctactattcttctaaactttggtgcagacccagatctgagggatattcgttataatactgttcttcactatgctgtttgtggtcaaagtttgtcattagttgaaaaactgcttgaatacgaagctgatcttgaagcgaaaaataaggatgggtatactccactattagttgccgttattaacaataatccaaaaatggtaaaatttcttctggagaaaggggctgatgtgaatgcttcagataattatcaaagaacagcccttattcttgctgtcagtggtgaaccaccatgtttagtaaagcttcttcttcagcaaggtgtggaattatgttacgaaggtattgtggattcacagctgaggaatatgtttatttccatggttttactgcatagatacccacaattcactgcgagccatggaaagaagaaacatgctaaatagacaccttattcttggcactacatgtgactaaaggaagatatggaacccatttctacaatttctttgccgcttccttgaattggaaaaatgtactttgaaagaaccgttaagtgaactattataatatttttgctgactacccagttgaagaaaagtttgttaattggatgggattttttttttttcacgttagaagacatgaagaaattttaaaagataaacatctatattgtgaaccatcagctgaaaagataaatttgtgttcaatatataggcagaaaaaaatttgtgtcaaaatgttgaatggaataataatgaggaaactgtgttaggcatgtattaaaacatttaaataaaataaaaatacatttcagctacaaagtgaaggaaaacattataaataatcctgtataaatcaaa

SEQ ID NO: 202049 - DNA, 1103 bp, Artificial Sequence
  derived and/or modified sequence
gaaaaggatttaaagaaacttcacagagctgcttcagtcggggatttgaagaagctgaaggaataccttcagatcaagaaatatgatgtaaatatgcaggacaaaaaatacagaacacctttgcacctagcctgtgctaatggacatacagatgttgtacttttcctaattgagcaacaatgcaaaataaatgtccgggatagtgaaaacaaatccccattgattaaggcagtacagtgtcaaaatgaggattgtgctactattcttctaaactttggtgcagacccagatctgagggatattcgttataatactgttcttcactatgctgtttgtggtcaaagtttgtcattagttgaaaaactgcttgaatacgaagctgatcttgaagcgaaaaataaggatgggtatactccactattagttgccgttattaacaataatccaaaaatggtaaaatttcttctggagaaaggggctgatgtgaatgcttcagataattatcaaagaacagcccttattcttgctgtcagtggtgaaccaccatgtttagtaaagcttcttcttcagcaaggtgtggaattatgttacgaaggtattgtggattcacagctgaggaatatgtttatttccatggttttactgcatagatacccacaattcactgcgagccatggaaagaagaaacatgctaaatagacaccttattcttggcactacatgtgactaaaggaagatatggaacccatttctacaatttctttgccgcttccttgaattggaaaaatgtactttgaaagaaccgttaagtgaactattataatatttttgctgactacccagttgaagaaaagtttgttaattggatgggattttttttttttcacgttagaagacatgaagaaattttaaaagataaacatctatattgtgaaccatcagctgaaaagataaatttgtgttcaatatataggcagaaaaaaatttgtgtcaaaatgttgaatggaataataatgaggaaactgtgttaggcatgtattaaaacatttaaataaaataaaaatacatttcagctacaaagtgaaggaaaacattataaataa

SEQ ID NO: 202050 - DNA, 765 bp, Artificial Sequence
  derived and/or modified sequence
atgaataagctcttttccttctggaaaaggaagaacgagactcggagccagggatataacctgagggagaaggacctgaaaaagcttcaccgggcagctagtgtgggtgaccttaagaaactaaaagaatatctccagattaagaagtacgatgtgaatatgcaggacaagaagtacagaaccccactgcatttggcttgcgctaatggccacacagacgtggtcctttttctgatcgagcaacagtgcaaaatcaatgtgcgcgatagcgaaaacaagagtcccctgatcaaggccgtgcagtgccaaaacgaggactgtgcaactattctcctgaattttggcgcagatcctgacctccgcgatattcgatataacaccgtgctccactacgcagtttgcggtcagtctttatcgctggtggagaaactgctcgaatatgaagctgacctagaggcgaagaacaaggacggttataccccgctcctggtggcagtgattaataacaatcctaagatggtgaagtttctgctggaaaaaggcgcagacgtcaatgctagcgataattatcaacgtaccgcgctgatcctagctgttagtggtgaacctccttgcctggtaaagttgttgctgcagcagggcgtggagctgtgttatgaaggtatcgtagactctcagctgagaaatatgttcatcagcatggtcctgctgcacaggtaccctcagttcacggcctcacacggtaagaaaaagcatgccaagtag

SEQ ID NO: 202051 - DNA, 825 bp, Artificial Sequence
  derived and/or modified sequence
atgaataaactcttctctttctggaaacgcaaaaacgagacacggtcccagggatataatctccgcgagaaggacctgaaaaaactccatagagccgcatctgtgggcgacttgaagaagcttaaagagtatctgcagattaaaaaatatgatgttaacatgcaagacaaaaaatactctgtggtacagtcttcccggtggttgctctcttacacaacacccttgaacgattttattcggactcctctacatcttgcgtgtgcaaacgggcatactgatgttgtgttgtttctgatagaacagcagtgcaagatcaacgtccgggactctgaaaacaaaagcccactcatcaaagccgttcaatgtcagaacgaggattgtgctactatcctgctcaacttcggcgctgatcctgacctgcgtgacattcgctataataccgttctgcattacgccgtctgtggccagagcctgtctctggttgaaaagcttctcgaatacgaagcagatctggaagccaagaacaaggatggatacacgccattgctggtggccgtgattaacaacaacccaaagatggttaaatttctgcttgagaaaggagcagacgtcaatgctagcgacaactaccagcgcactgccctaattttggccgtatctggcgagcccccttgcctagtgaagttactgcttcagcagggtgtggagctttgttacgaaggcatcgtggacagccagctgcgaaacatgttcatttcaatggtgttgctccaccgctacccgcaatttactgcatctcacggaaaaaaaaagcacgccaaatag

SEQ ID NO: 202052 - DNA, 606 bp, Artificial Sequence
  derived and/or modified sequence
atgcaagacaaaaagtaccggactcccctacacttagcttgcgctaatgggcacactgacgtcgtgctgtttcttatcgaacagcagtgtaagattaacgtacgggacagcgagaacaagtccccacttatcaaggccgtccaatgccagaacgaggattgcgccactattctgttgaatttcggcgcagatcccgatctgagggatattcgctataatacagtacttcattatgcagtgtgcggccagagtctgtccctggttgaaaagctcttggagtatgaggccgaccttgaggccaagaacaaggacgggtacaccccgttgcttgtggcagtcatcaacaataatcccaaaatggtgaaatttctgttggaaaaaggggctgacgtaaacgccagcgataattaccaacggacagctctgattctggcagtcagcggcgagcctccatgcctcgttaagctgcttcttcagcagggagtggagttatgttatgaaggtattgttgactcacagcttaggaacatgtttatctctatggttctgcttcatagataccctcagtttacggcaagccacgggaaaaagaaacatgccaaatag

SEQ ID NO: 202053 - DNA, 765 bp, Artificial Sequence
  derived and/or modified sequence
atgaacaagctgttcagcttctggaagagaaagaacgagaccagaagccagggctacaacctgagagagaaggacctgaagaagctgcacagagccgccagcgtgggcgacctgaagaagctgaaggagtacctgcagatcaagaagtacgacgtgaacatgcaggacaagaagtacagaacccccctgcacctggcctgcgccaacggccacaccgacgtggtgctgttcctgatcgagcagcagtgcaagatcaacgtgagagacagcgagaacaagagccccctgatcaaggccgtgcagtgccagaacgaggactgcgccaccatcctgctgaacttcggcgccgaccccgacctgagagacatcagatacaacaccgtgctgcactacgccgtgtgcggccagagcctgagcctggtggagaagctgctggagtacgaggccgacctggaggccaagaacaaggacggctacacccccctgctggtggccgtgatcaacaacaaccccaagatggtgaagttcctgctggagaagggcgccgacgtgaacgccagcgacaactaccagagaaccgccctgatcctggccgtgagcggcgagcccccctgcctggtgaagctgctgctgcagcagggcgtggagctgtgctacgagggcatcgtggacagccagctgagaaacatgttcatcagcatggtgctgctgcacagatacccccagttcaccgccagccacggcaagaagaagcacgccaagtag

SEQ ID NO: 202054 - DNA, 825 bp, Artificial Sequence
  derived and/or modified sequence
atgaacaagctgttcagcttctggaagagaaagaacgagaccagaagccagggctacaacctgagagagaaggacctgaagaagctgcacagagccgccagcgtgggcgacctgaagaagctgaaggagtacctgcagatcaagaagtacgacgtgaacatgcaggacaagaagtacagcgtggtgcagagcagcagatggctgctgagctacaccacccccctgaacgacttcatcagaacccccctgcacctggcctgcgccaacggccacaccgacgtggtgctgttcctgatcgagcagcagtgcaagatcaacgtgagagacagcgagaacaagagccccctgatcaaggccgtgcagtgccagaacgaggactgcgccaccatcctgctgaacttcggcgccgaccccgacctgagagacatcagatacaacaccgtgctgcactacgccgtgtgcggccagagcctgagcctggtggagaagctgctggagtacgaggccgacctggaggccaagaacaaggacggctacacccccctgctggtggccgtgatcaacaacaaccccaagatggtgaagttcctgctggagaagggcgccgacgtgaacgccagcgacaactaccagagaaccgccctgatcctggccgtgagcggcgagcccccctgcctggtgaagctgctgctgcagcagggcgtggagctgtgctacgagggcatcgtggacagccagctgagaaacatgttcatcagcatggtgctgctgcacagatacccccagttcaccgccagccacggcaagaagaagcacgccaagtag

SEQ ID NO: 202055 - DNA, 606 bp, Artificial Sequence
  derived and/or modified sequence
atgcaggacaagaagtacagaacccccctgcacctggcctgcgccaacggccacaccgacgtggtgctgttcctgatcgagcagcagtgcaagatcaacgtgagagacagcgagaacaagagccccctgatcaaggccgtgcagtgccagaacgaggactgcgccaccatcctgctgaacttcggcgccgaccccgacctgagagacatcagatacaacaccgtgctgcactacgccgtgtgcggccagagcctgagcctggtggagaagctgctggagtacgaggccgacctggaggccaagaacaaggacggctacacccccctgctggtggccgtgatcaacaacaaccccaagatggtgaagttcctgctggagaagggcgccgacgtgaacgccagcgacaactaccagagaaccgccctgatcctggccgtgagcggcgagcccccctgcctggtgaagctgctgctgcagcagggcgtggagctgtgctacgagggcatcgtggacagccagctgagaaacatgttcatcagcatggtgctgctgcacagatacccccagttcaccgccagccacggcaagaagaagcacgccaagtag

SEQ ID NO: 202056 - protein, 160 aa, Artificial Sequence
  derived and/or modified sequence
MSVCYRPPGNETLLSWKTSRATGTAFLLLAALLGLPGNGFVVWSLAGWRPARGRPLAATLVLHLALADGAVLLLTPLFVAFLTRQAWPLGQAGCKAVYYVCALSMYASVLLTGLLSLQRCLAVTRPFLAPRLRSPALARRLLLAVWLAALLLAVPAAVYR

SEQ ID NO: 202057 - protein, 389 aa, Artificial Sequence
  derived and/or modified sequence
MAPSHRASQVGFCPTPERPLWRLPPTCRPRRMSVCYRPPGNETLLSWKTSRATGTAFLLLAALLGLPGNGFVVWSLAGWRPARGRPLAATLVLHLALADGAVLLLTPLFVAFLTRQAWPLGQAGCKAVYYVCALSMYASVLLTGLLSLQRCLAVTRPFLAPRLRSPALARRLLLAVWLAALLLAVPAAVYRHLWRDRVCQLCHPSPVHAAAHLSLETLTAFVLPFGLMLGCYSVTLARLRGARWGSGRHGARVGRLVSAIVLAFGLLWAPYHAVNLLQAVAALAPPEGALAKLGGAGQAARAGTTALAFFSSSVNPVLYVFTAGDLLPRAGPRFLTRLFEGSGEARGGGRSREGTMELRTTPQLKVVGQGRGNGDPGGGMEKDGPEWDL

SEQ ID NO: 202058 - protein, 319 aa, Artificial Sequence
  derived and/or modified sequence
MSVCYRPPGNETLLSWKTSRATGTAFLLLAALLGLPGNGFVVWSLAGWRPARGRPLAATLVLHLALADGAVLLLTPLFVAFLTRQAWPLGQAGCKAVYYVCALSMYASVLLTGLLSLQRCLAVTRPFLAPRLRSPALARRLLLAVWLAALLLAVPAAVYRHLWRDRVCQLCHPSPVHAAAHLSLETLTAFVLPFGLMLGCYSVTLARLRGARWGSGRHGARVGRLVSAIVLAFGLLWAPYHAVNLLQAVAALAPPEGALAKLGGAGQAARAGTTALAFFSSSVNPVLYVFTAGDLLPRAGPRFLTRLFEGSGEARGGGR

SEQ ID NO: 202059 - protein, 358 aa, Artificial Sequence
  derived and/or modified sequence
MSVCYRPPGNETLLSWKTSRATGTAFLLLAALLGLPGNGFVVWSLAGWRPARGRPLAATLVLHLALADGAVLLLTPLFVAFLTRQAWPLGQAGCKAVYYVCALSMYASVLLTGLLSLQRCLAVTRPFLAPRLRSPALARRLLLAVWLAALLLAVPAAVYRHLWRDRVCQLCHPSPVHAAAHLSLETLTAFVLPFGLMLGCYSVTLARLRGARWGSGRHGARVGRLVSAIVLAFGLLWAPYHAVNLLQAVAALAPPEGALAKLGGAGQAARAGTTALAFFSSSVNPVLYVFTAGDLLPRAGPRFLTRLFEGSGEARGGGRSREGTMELRTTPQLKVVGQGRGNGDPGGGMEKDGPEWDL

SEQ ID NO: 202060 - DNA, 489 bp, Artificial Sequence
  derived and/or modified sequence
atgaacagcaacgccagcgagcacaccggcatgctgagaacctgctggagccacagccactgggaccccttcagcagcggcagcgtgaccgccatgtgggccacccacagccccaccagcaaggcctgggccggcatccagggcagaggcagatgggccctgggcttcccctggagaggccagggcgtgctgcacgtgatcgccagccagaaggccgccgtgaccgaggccgtggacctgagaaccggcgccgccagccaggccatgagcgaggccttcgtgagaagcggcatgttctacctgagacccgccttcgtgctgctgtgctacaagtggggcaagctgagacacagcgaggtgagcaacctgctgggcgtggcctggcccgtgagcgaggaggcctgcatgggcacctggggcagcctggccgtggccgtgaccctgcccgcccagggcctgggcacctggggcagagacgagggcgagtag

SEQ ID NO: 202061 - DNA, 483 bp, Artificial Sequence
  derived and/or modified sequence
atgtctgtgtgttaccgaccgcccggtaatgagacactcctgagctggaaaaccagcagggccactggaaccgcctttttgcttctggctgcccttctaggccttccaggaaacggctttgtcgtgtggtccctggccgggtggcggccagctcgtgggcgcccactagctgccactctagtcctgcatctggcactcgctgacggcgcagttctgttacttactcccctcttcgtggcctttctaactcggcaagcttggcctcttggacaggccggctgcaaggctgtgtactacgtgtgtgcgctttcaatgtacgcaagcgttctcctcaccgggctcttgtcacttcagaggtgtctggcggtgacccgtccatttctggccccgcggcttcggagtccggcccttgcaaggaggctgctgctggccgtttggttggccgcgttgctcttagccgtcccagcagccgtctacaggtag

SEQ ID NO: 202062 - DNA, 1170 bp, Artificial Sequence
  derived and/or modified sequence
atggccccatcacaccgggcgagccaggtcggcttttgccctacccctgaaaggccactctggaggttgccgcccacttgccgtccacgccgaatgagtgtctgttatagaccaccaggcaacgaaacgctgctgtcttggaagacctcccgtgccacaggtactgcattcctcttgctggccgcactgctgggcctccccggaaacgggtttgtggtgtggagcctggccggttggcgaccagcccgaggcaggccattagctgccactctcgtgttacatctcgccttggctgatggagccgtgctgctgttgacccccctctttgtggcgttccttacgagacaagcctggcccctcggccaggccggatgtaaggcagtgtattatgtttgtgctctgtcaatgtatgcgagcgtactgctcactggattgttatctttgcagcggtgcctggctgtcacacgaccgttcctcgcgccacgtttgaggagccccgccctcgcgcggagacttttactggcagtgtggttggcagcactcctgctggccgttcctgccgcagtataccgtcacttgtggcgcgaccgcgtgtgtcagctctgtcatccaagccccgtgcatgcagccgcccacctgtcactggagacactgaccgcttttgtactgccttttgggttaatgctaggatgctatagcgtcactctcgccagattgcggggtgcaagatggggatcaggtcgtcacggtgccagagtgggtcgcttggtgagcgccatcgtgctcgcatttggactcctgtgggctccttaccacgcagtgaacttgttgcaggccgttgccgctctcgccccccccgagggcgccctggccaagctgggaggggctggacaggctgcaagggctggaacaacagctctcgcctttttcagtagcagcgtgaaccctgtgctgtacgtatttacagccggtgatttgctgcccagagcgggcccccggtttttgactcggctgtttgaagggtccggcgaggctcgcggcggaggtagatcgagggaaggtactatggagcttcgcactactccacaactaaaggtggtaggccaggggcgcgggaacggggacccgggggggggcatggaaaaggacggaccagagtgggatctgtag

SEQ ID NO: 202063 - DNA, 960 bp, Artificial Sequence
  derived and/or modified sequence
atgtctgtgtgctatagaccgcctggcaacgagacccttctgagttggaaaaccagccgcgctacaggtactgcttttctactactcgctgccctactgggtctgcccggcaacggtttcgtggtgtggtctttggccggctggaggcctgccagggggcgccctttggcagccaccctggtgttacacctcgccctggccgatggggcagttctgctgctcaccccactctttgtggcattcctcacaagacaggcttggcctttaggccaggcgggctgcaaggcagtctactatgtgtgcgccctttcaatgtacgcctccgtgctccttactggactgcttagcctccagcgatgcctggcagtcaccaggccattcctggcgccacggttgcggtctccggccttagcccgcaggctgctgctcgccgtctggctagccgctttgcttctcgccgtcccggctgccgtgtatcgacatctgtggagagaccgtgtctgtcagctgtgtcatcctagtccagttcacgcagcagctcatctgagtctcgaaacacttaccgctttcgtgctgccgttcgggctgatgctcggatgctactctgtcacacttgccaggctacgaggagcccgttggggatctggacggcatggtgcgcgtgtaggtagattagttagcgcaattgtgttggctttcggactcttgtgggccccttaccacgctgttaatttgctgcaagccgtggctgctctggctcctcccgaaggggccctggccaagctgggaggggcaggccaggcagcaagagccgggaccaccgccttggcattttttagctcgtccgtgaaccctgtactgtacgtgttcactgcgggggatcttctgcctagggctgggcctaggttcctcacgagactcttcgagggatccggagaggcccgcggcggtggccgctag

SEQ ID NO: 202064 - DNA, 1077 bp, Artificial Sequence
  derived and/or modified sequence
atgtccgtgtgttatcgtcctcccggcaacgagactctgctttcttggaagacatcccgcgcgactgggacagcttttctcctgcttgctgcactgctaggcctgccaggaaacgggtttgtggtttggtctttggccggttggcggcccgcgagaggcaggccgttggccgcaactttggttctgcatctcgctttagccgatggagccgttctgttgttgactcccctgttcgtggcctttctcacccgccaggcctggcccttaggacaggcagggtgcaaagccgtgtattatgtatgtgcactgagcatgtacgcctctgtgctgctgaccggtttgcttagccttcagcggtgtctcgcagttaccaggccgtttctagctcctagattacggagccctgcactcgcccgccggttgttactggctgtctggctcgcagccctgctccttgccgtgccagcagcagtctataggcatctgtggagagaccgggtgtgtcagctttgtcacccatcccctgtgcacgctgccgcccacctgtcattggagacgcttaccgccttcgtcctgccgtttgggttgatgctcgggtgttacagtgtgacactggcccgcttacgcggggctagatggggctccggcaggcatggggcccgcgttgggcgactcgtctctgccattgtgttggcctttggactgctttgggccccataccatgccgtgaatctacttcaggcggtcgctgcactggctcctcccgagggagctctcgcgaagctgggcggtgccggccaagctgcgcgtgccgggaccacagcccttgccttcttcagttcttcggtgaatcccgtgctgtatgtgttcaccgccggggatctcttaccaagggcaggcccaagattcctgactcggctgttcgagggcagcggggaggctcggggtgggggaaggtctcgcgaaggcacaatggagctgaggactacaccacagctcaaggttgttgggcagggacgcggaaacggagatccaggtggtggtatggaaaaagatgggcctgaatgggacctgtag

SEQ ID NO: 202065 - DNA, 1077 bp, Artificial Sequence
  derived and/or modified sequence
atgagcgtctgctatcgtccaccaggaaacgagaccctcctttcctggaaaaccagtcgcgcaactggcaccgctttcttgcttctcgccgcactcctgggcctgccgggaaacggattcgtcgtttggtctctggcgggttggcgacctgctagagggcgcccactggccgctaccctagtcctacatcttgccctcgccgatggggcagtgctgcttttgaccccgttgttcgtagcatttttgaccagacaggcctggccactcggacaggctgggtgcaaagccgtttactatgtttgcgccctctcaatgtacgcttccgtcctgctgaccgggttgctcagcctgcagaggtgcctggccgttacccggccatttttggccccccggcttagatcccccgctctggccaggcgcctgcttttagctgtttggctggctgcactgctcttggccgtgccagccgccgtgtaccgccacctgtggcgggatcgagtatgtcagctttgccatccatcgccagtccatgccgccgcccacctgagcctggagacattgaccgccttcgtactgccattcggcctcatgttagggtgctactctgttacgttggcacgattgcgaggagctcgttggggctctggcaggcacggcgccagagtgggcaggctggtgagcgctattgtgcttgccttcggcctgctatgggccccctatcacgctgtgaacttgttacaagctgtggccgcactggcgcctcccgagggggcactggctaagctgggaggggccgggcaagccgcccgtgcagggactacggcactcgccttcttttcctcctccgtcaatcccgtgctgtatgtatttaccgcgggcgatttactccctcgtgcgggaccccggttcttgaccaggctgttcgagggatccggagaagctcgggggggaggacgttcaagggaaggcactatggagcttcgcactaccccccagttaaaggtagtgggccagggcagggggaacggagaccccggaggaggcatggagaaggacgggccggagtgggatttatag

SEQ ID NO: 202066 - DNA, 483 bp, Artificial Sequence
  derived and/or modified sequence
atgtctgtgtgctacagacctcctggaaatgagaccctgctgtcctggaagaccagccgggccaccggcacagccttcctgctgctggccgccctgctgggcctgcctggaaatggatttgtggtgtggagcctggccggctggaggcctgcccggggccggcccctggccgccaccctggtgctgcacctggccctggctgatggagctgtgctgctgctgacccccctgtttgtggccttcctgacccggcaggcctggcccctgggccaggccggctgcaaggctgtgtactacgtgtgtgccctgtccatgtatgcctctgtgctgctgaccggcctgctgagcctgcagcgctgcctggccgtgacccggcccttcctggccccccggctgcggagccctgccctggcccggcggctgctgctggccgtgtggctggccgccctgctgctggccgtgcctgctgctgtgtacagatag

SEQ ID NO: 202067 - DNA, 1170 bp, Artificial Sequence
  derived and/or modified sequence
atggcccccagccaccgggccagccaggtgggcttctgccccaccccagagcggcccctgtggaggctgccccccacctgccggcccaggaggatgtctgtgtgctaccggcccccaggaaatgagaccctgctgtcctggaagaccagccgggccactggaacagccttcctgctgctggccgccctgctgggcctgcctggaaatggatttgtggtgtggagcctggccggctggaggcctgcccggggccggcccctggccgccaccctggtgctgcacctggccctggctgatggagctgtgctgctgctgacccccctgtttgtggccttcctgacccggcaggcctggcccctgggccaggccggctgcaaggctgtgtactacgtgtgtgccctgtccatgtatgcctctgtgctgctgaccggcctgctgagcctgcagcgctgcctggccgtgacccggcccttcctggccccccggctgcggagccctgccctggcccggcggctgctgctggccgtgtggctggccgccctgctgctggccgtgcctgctgctgtgtaccgccacctgtggagggacagagtgtgccagctgtgccaccccagccctgtgcatgctgctgcccacctgagcctggagaccctgacagcctttgtgctgcccttcggcctgatgctgggctgctacagcgtgaccctggcccggctgcggggggcccgctggggcagcggcagacatggagcccgggtgggccgcctggtgtctgccatcgtgctggccttcggcctgctgtgggccccctaccacgctgtgaacctgctgcaggccgtggccgccctggcccctcctgagggcgccctggccaagctgggcggggccggccaggccgcccgggccggcaccacagccctggccttcttcagcagctctgtgaaccctgtgctgtatgtgttcaccgctggggacctgctgccccgggccggcccccgcttcctgacccggctgtttgagggcagcggggaggcccggggcggcggccgcagccgggagggcaccatggagctgcggaccaccccccagctgaaggtggtgggccagggcagaggaaatggagaccccggcggcggcatggagaaggatggccctgagtgggacctgtag

SEQ ID NO: 202068 - DNA, 960 bp, Artificial Sequence
  derived and/or modified sequence
atgtctgtgtgctacagacctcctggaaatgagaccctgctgtcctggaagaccagccgggccaccggcacagccttcctgctgctggccgccctgctgggcctgcctggaaatggatttgtggtgtggagcctggccggctggaggcctgcccggggccggcccctggccgccaccctggtgctgcacctggccctggctgatggagctgtgctgctgctgacccccctgtttgtggccttcctgacccggcaggcctggcccctgggccaggccggctgcaaggctgtgtactacgtgtgtgccctgtccatgtatgcctctgtgctgctgaccggcctgctgagcctgcagcgctgcctggccgtgacccggcccttcctggccccccggctgcggagccctgccctggcccggcggctgctgctggccgtgtggctggccgccctgctgctggccgtgcctgctgctgtgtaccgccacctgtggagggacagagtgtgccagctgtgccaccccagccctgtgcacgccgccgcccacctgagcctggagaccctgacagcctttgtgctgcccttcggcctgatgctgggctgctacagcgtgaccctggcccggctgcggggggcccgctggggcagcggccgccacggggcccgggtgggccgcctggtgtctgccatcgtgctggccttcggcctgctgtgggccccctaccacgctgtgaacctgctgcaggccgtggccgccctggcccctcctgagggcgccctggccaagctgggcggggccggccaggccgcccgggccggcaccacagccctggccttcttcagcagctctgtgaaccctgtgctgtatgtgttcaccgctggggacctgctgcccagggctggcccccgcttcctgacccggctgtttgagggcagcggggaggcccggggcggcggccgctag

SEQ ID NO: 202069 - DNA, 1077 bp, Artificial Sequence
  derived and/or modified sequence
atgtctgtgtgctacagacctcctggaaatgagaccctgctgtcctggaagaccagccgggccaccggcacagccttcctgctgctggccgccctgctgggcctgcctggaaatggatttgtggtgtggagcctggccggctggaggcctgcccggggccggcccctggccgccaccctggtgctgcacctggccctggctgatggagctgtgctgctgctgacccccctgtttgtggccttcctgacccggcaggcctggcccctgggccaggccggctgcaaggctgtgtactacgtgtgtgccctgtccatgtatgcctctgtgctgctgaccggcctgctgagcctgcagcgctgcctggccgtgacccggcccttcctggccccccggctgcggagccctgccctggcccggcggctgctgctggccgtgtggctggccgccctgctgctggccgtgcctgctgctgtgtaccgccacctgtggagggacagagtgtgccagctgtgccaccccagccctgtgcacgccgccgcccacctgagcctggagaccctgacagcctttgtgctgcccttcggcctgatgctgggctgctacagcgtgaccctggcccggctgcggggggcccgctggggcagcggccgccacggggcccgggtgggccgcctggtgtctgccatcgtgctggccttcggcctgctgtgggccccctaccacgctgtgaacctgctgcaggccgtggccgccctggcccctcctgagggcgccctggccaagctgggcggggccggccaggccgcccgggccggcaccacagccctggccttcttcagcagctctgtgaaccctgtgctgtatgtgttcaccgctggggacctgctgcccagggctggcccccgcttcctgacccggctgtttgagggcagcggggaggcccggggcggcggccgcagccgggagggcaccatggagctgcggaccaccccccagctgaaggtggtgggccagggcagaggaaatggagaccccggcggcggcatggagaaggatggccctgagtgggacctgtag

SEQ ID NO: 202070 - DNA, 710 bp, Artificial Sequence
  derived and/or modified sequence
gcagcagtgtggaggtccaacgaaggagctccctgaatggcagagacaagaggaaatcagatgatttggaaaacttgggaggaagccatcaagctgggagatgaggactttccacaagcaagagctaactaggggcacaggacaggagtaggcacctcgcctactgctgcttaacctttcagcttctccaggcccccaatcctgcttgctcccagcttggcccagaaggatgtcggtctgctaccgtcccccagggaacgagacactgctgagctggaagacttcgcgggccacaggcacagccttcctgctgctggcggcgctgctggggctgcctggcaacggcttcgtggtgtggagcttggcgggctggcggcctgcacgggggcgaccgctggcggccacgcttgtgctgcacctggcgctggccgacggcgcggtgctgctgctcacgccgctctttgtggccttcctgacccggcaggcctggccgctgggccaggcgggctgcaaggcggtgtactacgtgtgcgcgctcagcatgtacgccagcgtgctgctcaccggcctgctcagcctgcagcgctgcctcgcagtcacccgccccttcctggcgcctcggctgcgcagcccggccctggcccgccgcctgctgctggcggtctggctggccgccctgttgctcgccgtcccggccgccgtctaccgcc

SEQ ID NO: 202071 - DNA, 3092 bp, Artificial Sequence
  derived and/or modified sequence
aaactggccctggccctgaaccaaataccttgaaccctcgtaaactccataccctgacccccttgttttggatatacccaggtagaacaactctctctcactgtctgttgtgaggatacgctgtagcccactcattaagtacattctcctaataaatgctttggactgatcaccctgccagtcttttgtcttgggcaatctatacttttctcagaggttcccaaggcctactgaagggacttaacatactcttaatggctttcctctctcttgttttaccttatgccctcacttcctgagttaacctcccaaatacaggatcacctgtacccaagcccttagctcaagaatacaggatcacctgtacccaagcccttagctcaagctctgctttggaagaacccaaactaagacagtgctcctggtgccctccccaagcaacctcaagttctggctgttacttgagcagaggcctttcttttcccttcccccagctctatccatctgccaggcccccctcaaatctcttcatttccaagttttgcttgacttttccaagaggagagggctgcttcttagtatgtccctactcatcctttcctttcttgtcttgtatcctggtgcagcctggtaatggggcctcttcatggttgtgtgtcatgactccctaaccattatgcctccatgcatcccctgttcctcctggaacctagcaccatgccttacatggaaaagctgtcattgacagcccggtgagagccctgagggtggagtgactggggcagggcctgaggcaagaggtgggaggaggtaggaggccaggggctcagccggaccaggagactggaaacaggcaaggataaggcaggtgggggactgagttgtttgggtcacctctgcaggccagagagaccaggcaacatacacactgcagaaggtgggctgggaggattggggccagagctgggggagggatgagaacagaagcaggaccaggattcagcagagtcctcctatttccttccaccaccagggaatcttactgccccacttcagcttgtgctgtttcctggcaaggcaggctctcacatgcctggacgcctgggtgcgttggtgatgggaaggagcagggtgagggaggggccccaggagaggcccaggatgagcctcatcttgtccctccccattcttgtcttaccctctgcaaatgtgataggcacaggacaggagtaggcacctcgcctactgctgcttaacctttcagcttctccaggcccccaatcctgcttgctcccagcttggtaagtagatctgtgcacgtccctttacaccccaccatccagttttgcccagatgtgctagaatggggctggacaaagaaggaggggccagactagaggagtggtggtagagatagtgacagcctggggtgatgactttatgcctgtttaccactgagctctgggaaggaggccaggagtggggcaggtcaactgactgggagcaggggatctgggttccaagaaggagttgtgtttgaggtggggtctgggtcctcgtggaagtcaggactcccaggcagaaaagaggcaggctgcagggaagtaaggaggaggcatggcaccttctcatcgggcatcacaggtggggttttgccccacccctgaacgccctctgtggcgccttccacccacctgtaggcccagaaggatgtcggtctgctaccgtcccccagggaacgagacactgctgagctggaagacttcgcgggccacaggcacagccttcctgctgctggcggcgctgctggggctgcctggcaacggcttcgtggtgtggagcttggcgggctggcggcctgcacgggggcgaccgctggcggccacgcttgtgctgcacctggcgctggccgacggcgcggtgctgctgctcacgccgctctttgtggccttcctgacccggcaggcctggccgctgggccaggcgggctgcaaggcggtgtactacgtgtgcgcgctcagcatgtacgccagcgtgctgctcaccggcctgctcagcctgcagcgctgcctcgcagtcacccgccccttcctggcgcctcggctgcgcagcccggccctggcccgccgcctgctgctggcggtctggctggccgccctgttgctcgccgtcccggccgccgtctaccgccacctgtggagggaccgcgtatgccagctgtgccacccgtcgccggtccacgccgccgcccacctgagcctggagactctgaccgctttcgtgcttcctttcgggctgatgctcggctgctacagcgtgacgctggcacggctgcggggcgcccgctggggctccgggcggcacggggcgcgggtgggccggctggtgagcgccatcgtgcttgccttcggcttgctctgggccccctaccacgcagtcaaccttctgcaggcggtcgcagcgctggctccaccggaaggggccttggcgaagctgggcggagccggccaggcggcgcgagcgggaactacggccttggccttcttcagttctagcgtcaacccggtgctctacgtcttcaccgctggagatctgctgccccgggcaggtccccgtttcctcacgcggctcttcgaaggctctggggaggcccgagggggcggccgctctagggaagggaccatggagctccgaactacccctcagctgaaagtggtggggcagggccgcggcaatggagacccggggggtgggatggagaaggacggtccggaatgggacctttgacagcagaccctacaacctgctgcccttccctgtccctttccaccccccacccaccctccagaggtcagtgttctgggacatttggggacccttctttgactagagtttggatctggctgggtaggattactatacacttggggcaggcccaggctcctccaaactgagggattatgagggtggtgatggtccctgttaaggactattgtgtgcttgcaagttggcatgtacccatgtgccagcattgcttacttgttgccaatagctgttattgtgaaatacactgggaagccattagatgatga

SEQ ID NO: 202072 - DNA, 1108 bp, Artificial Sequence
  derived and/or modified sequence
gcacaggacaggagtaggcacctcgcctactgctgcttaacctttcagcttctccaggcccccaatcctgcttgctcccagcttggtggggttttgccccacccctgaacgccctctgtggcgccttccacccacctgtaggcccagaaggatgtcggtctgctaccgtcccccagggaacgagacactgctgagctggaagacttcgcgggccacaggcacagccttcctgctgctggcggcgctgctggggctgcctggcaacggcttcgtggtgtggagcttggcgggctggcggcctgcacgggggcgaccgctggcggccacgcttgtgctgcacctggcgctggccgacggcgcggtgctgctgctcacgccgctctttgtggccttcctgacccggcaggcctggccgctgggccaggcgggctgcaaggcggtgtactacgtgtgcgcgctcagcatgtacgccagcgtgctgctcaccggcctgctcagcctgcagcgctgcctcgcagtcacccgccccttcctggcgcctcggctgcgcagcccggccctggcccgccgcctgctgctggcggtctggctggccgccctgttgctcgccgtcccggccgccgtctaccgccacctgtggagggaccgcgtatgccagctgtgccacccgtcgccggtccacgccgccgcccacctgagcctggagactctgaccgctttcgtgcttcctttcgggctgatgctcggctgctacagcgtgacgctggcacggctgcggggcgcccgctggggctccgggcggcacggggcgcgggtgggccggctggtgagcgccatcgtgcttgccttcggcttgctctgggccccctaccacgcagtcaaccttctgcaggcggtcgcagcgctggctccaccggaaggggccttggcgaagctgggcggagccggccaggcggcgcgagcgggaactacggccttggccttcttcagttctagcgtcaacccggtgctctacgtcttcaccgctggagatctgctgccccgggcaggtccccgtttcctcacgcggctcttcgaaggctctggggaggcccgagggggcggccgc

SEQ ID NO: 202073 - DNA, 1515 bp, Artificial Sequence
  derived and/or modified sequence
attcttgtcttaccctctgcaaatgtgataggcacaggacaggagtaggcacctcgcctactgctgcttaacctttcagcttctccaggcccccaatcctgcttgctcccagcttggcccagaaggatgtcggtctgctaccgtcccccagggaacgagacactgctgagctggaagacttcgcgggccacaggcacagccttcctgctgctggcggcgctgctggggctgcctggcaacggcttcgtggtgtggagcttggcgggctggcggcctgcacgggggcgaccgctggcggccacgcttgtgctgcacctggcgctggccgacggcgcggtgctgctgctcacgccgctctttgtggccttcctgacccggcaggcctggccgctgggccaggcgggctgcaaggcggtgtactacgtgtgcgcgctcagcatgtacgccagcgtgctgctcaccggcctgctcagcctgcagcgctgcctcgcagtcacccgccccttcctggcgcctcggctgcgcagcccggccctggcccgccgcctgctgctggcggtctggctggccgccctgttgctcgccgtcccggccgccgtctaccgccacctgtggagggaccgcgtatgccagctgtgccacccgtcgccggtccacgccgccgcccacctgagcctggagactctgaccgctttcgtgcttcctttcgggctgatgctcggctgctacagcgtgacgctggcacggctgcggggcgcccgctggggctccgggcggcacggggcgcgggtgggccggctggtgagcgccatcgtgcttgccttcggcttgctctgggccccctaccacgcagtcaaccttctgcaggcggtcgcagcgctggctccaccggaaggggccttggcgaagctgggcggagccggccaggcggcgcgagcgggaactacggccttggccttcttcagttctagcgtcaacccggtgctctacgtcttcaccgctggagatctgctgccccgggcaggtccccgtttcctcacgcggctcttcgaaggctctggggaggcccgagggggcggccgctctagggaagggaccatggagctccgaactacccctcagctgaaagtggtggggcagggccgcggcaatggagacccggggggtgggatggagaaggacggtccggaatgggacctttgacagcagaccctacaacctgctgcccttccctgtccctttccaccccccacccaccctccagaggtcagtgttctgggacatttggggacccttctttgactagagtttggatctggctgggtaggattactatacacttggggcaggcccaggctcctccaaactgagggattatgagggtggtgatggtccctgttaaggactattgtgtgcttgcaagttggcatgtacccatgtgccagcattgcttacttgttgccaatagctgttattgtgaaatacactgggaagccattagatgatgacttaagt

SEQ ID NO: 202074 - DNA, 1560 bp, Artificial Sequence
  derived and/or modified sequence
accctctgcaaatgtgataggcacaggacaggagtaggcacctcgcctactgctgcttaacctttcagcttctccaggcccccaatcctgcttgctcccagcttggtggggttttgccccacccctgaacgccctctgtggcgccttccacccacctgtaggcccagaaggatgtcggtctgctaccgtcccccagggaacgagacactgctgagctggaagacttcgcgggccacaggcacagccttcctgctgctggcggcgctgctggggctgcctggcaacggcttcgtggtgtggagcttggcgggctggcggcctgcacgggggcgaccgctggcggccacgcttgtgctgcacctggcgctggccgacggcgcggtgctgctgctcacgccgctctttgtggccttcctgacccggcaggcctggccgctgggccaggcgggctgcaaggcggtgtactacgtgtgcgcgctcagcatgtacgccagcgtgctgctcaccggcctgctcagcctgcagcgctgcctcgcagtcacccgccccttcctggcgcctcggctgcgcagcccggccctggcccgccgcctgctgctggcggtctggctggccgccctgttgctcgccgtcccggccgccgtctaccgccacctgtggagggaccgcgtatgccagctgtgccacccgtcgccggtccacgccgccgcccacctgagcctggagactctgaccgctttcgtgcttcctttcgggctgatgctcggctgctacagcgtgacgctggcacggctgcggggcgcccgctggggctccgggcggcacggggcgcgggtgggccggctggtgagcgccatcgtgcttgccttcggcttgctctgggccccctaccacgcagtcaaccttctgcaggcggtcgcagcgctggctccaccggaaggggccttggcgaagctgggcggagccggccaggcggcgcgagcgggaactacggccttggccttcttcagttctagcgtcaacccggtgctctacgtcttcaccgctggagatctgctgccccgggcaggtccccgtttcctcacgcggctcttcgaaggctctggggaggcccgagggggcggccgctctagggaagggaccatggagctccgaactacccctcagctgaaagtggtggggcagggccgcggcaatggagacccggggggtgggatggagaaggacggtccggaatgggacctttgacagcagaccctacaacctgctgcccttccctgtccctttccaccccccacccaccctccagaggtcagtgttctgggacatttggggacccttctttgactagagtttggatctggctgggtaggattactatacacttggggcaggcccaggctcctccaaactgagggattatgagggtggtgatggtccctgttaaggactattgtgtgcttgcaagttggcatgtacccatgtgccagcattgcttacttgttgccaatagctgttattgtgaaatacactgggaagccattagatgatgacttaagt

SEQ ID NO: 202075 - DNA, 483 bp, Artificial Sequence
  derived and/or modified sequence
atgagcgtgtgctaccggccccccggcaacgagaccctgctgagctggaagacaagcagagccactggcaccgcctttttgttactggcagcccttctgggactccccggaaatggatttgtggtctggtctctggccgggtggcggcccgcccgaggtagacccttagcagccaccctggtgctccaccttgctctggcagacggtgccgtactgttgcttacccccttattcgtggctttcctgacaaggcaagcatggcctctgggacaggctggctgtaaggcagtgtactatgtgtgtgcactgtccatgtatgcgagcgtgctccttacagggttgctgagtctgcagcgctgtctggctgtgacgagacccttcctagcccctaggttacgatctcccgccctggcccgccggttactccttgctgtgtggttggcagccctgctcttagcggtgcctgccgccgtctacagatag

SEQ ID NO: 202076 - DNA, 1170 bp, Artificial Sequence
  derived and/or modified sequence
atggcccccagccaccgggccagccaggtgggcttctgccccacccccgaacgcccactgtggagactacctcctacgtgtaggccccggagaatgtctgtgtgctacaggccccccggtaacgaaacactgctgtcgtggaaaacgtcacgcgctaccgggactgcttttctgcttctggcggcgctattggggctacccggcaatggctttgtggtctggtcactggcaggttggagacccgcaagaggcaggcccctggccgctaccctcgtcctgcacctggctttggcagacggtgccgtcttgctgcttacccccttattcgtggcatttctcactcgacaagcctggcctctcgggcaggcgggatgcaaggccgtgtactacgtctgcgcactgtccatgtatgccagcgtgttgttgactggacttctgagtttacagcgctgcctggccgtgacgagacccttcctggctcctcgcctgcgcagccccgcgttggccagacgcctgctcctggcagtgtggctggcggctctgctgctggcagttcctgccgctgtgtaccgccacctctggcgagaccgtgtctgtcagttgtgccatccatcacccgttcatgcagccgcgcatctgtcccttgagactctgacagctttcgtgctcccttttggactgatgctcggatgttactctgtaaccctcgccaggctccgaggagcaaggtgggggagcggacgccatggcgcccgggttggcagattagtgtctgctatcgtcctggccttcggcctactgtgggctccgtaccacgctgtgaatctactccaggccgttgcagctctcgcaccacccgagggagcactggctaagctcggtggcgccgggcaagctgctcgcgccggcacaacggccttggcattcttctcctcctcagtcaacccggtgctgtacgtgtttactgcgggagatctacttccaagagcagggccccgctttctgacccggctgttcgagggatccggggaagctaggggtggcggcagatcacgcgaaggcacaatggagctgcgtaccaccccacagctaaaagtggttggtcaagggagaggcaatggagaccctgggggcggaatggagaaggacggtcccgagtgggacctgtag

SEQ ID NO: 202077 - DNA, 960 bp, Artificial Sequence
  derived and/or modified sequence
atgagcgtgtgctaccggccccccggcaacgagaccctgctgagctggaaaacatctagagctaccggcaccgctttcttactgctggccgctcttctggggctgccgggcaatggcttcgtggtctggagtcttgctggatggcgacccgctagggggagacctctggcggctactctcgttctgcatctggccttagctgatggtgctgtgcttctgttgaccccgctgtttgtagcattcttaacgaggcaggcctggccactgggccaagcggggtgtaaagcagtgtattatgtctgcgccctatccatgtatgcgtccgtgctgctgacaggccttctctctttgcagcgttgcttggcggtgactaggcctttcctcgcaccacggctgagaagccctgcacttgctcgacgcctgctccttgccgtgtggctggccgccctgttactggccgtgcctgctgcagtgtacaggcacctctggcgcgaccgcgtttgtcaactgtgccaccccagccctgtgcacgccgccgcacacctgtctctagagacactgaccgccttcgtcctgccattcggactgatgctcgggtgttattccgtcaccctggcacgactccgcggcgcaaggtggggttctggcagacatggtgcgcgagtgggccgcttagtatctgctattgtgctggctttcgggctgctgtgggctccatatcacgctgtgaatcttttacaggcagtggccgctctggcccctccagaaggggccctcgccaagcttggcggcgccggccaggcagctagggcaggtactacagctctggcattcttttcctccagtgtaaaccccgtgttgtacgttttcaccgcaggagacttacttcccagagccgggcctaggttcctcacccggctcttcgaggggagcggggaggcaagagggggaggccggtag

SEQ ID NO: 202078 - DNA, 1077 bp, Artificial Sequence
  derived and/or modified sequence
atgagcgtgtgctaccggccccccggcaacgagaccctgctgagctggaagacgtcgagggcaacaggtaccgcgtttctgttgctcgcggctctgctcggcctgccgggtaacggatttgtggtatggtctctcgcgggatggcgccccgctcggggccgacctctggcggcgacattggtgttacacctggcattggcggatggggccgtgctacttctgacccctcttttcgtggcattcctcaccagacaggcttggcctctgggacaggccggctgcaaagctgtgtactatgtgtgtgccctgtcaatgtacgctagcgtgctgcttacaggtcttctgagcctccagagatgtctggccgtcacgcgaccatttcttgccccacgcctcaggagtccagcactggcaaggcgcttgctgttggcagtttggctagcggcactcctcctggccgtacctgcagctgtgtacaggcatctctggcgcgaccgcgtgtgtcaactctgccaccctagccctgtgcatgctgcagcccatctgagcctcgagacacttacagcctttgttttgccgttcgggttgatgttgggatgctactccgtaaccttggcccggttgaggggcgcccgatgggggtccgggaggcatggcgctcgcgtcggccgtctggtgtccgcgattgtgttggcctttggcctcctgtgggccccctaccacgcagtcaatttactgcaggcagttgcagctctcgcccccccagaaggcgcccttgccaagctgggcggagctggacaggcggctcgggccggaaccactgccctagcatttttttcttcctccgtaaaccccgtgctatacgtttttaccgccggggatctcttacctagggctggaccacgctttctgactaggctgtttgagggttctggagaagcccgaggcggaggcagatcacgggagggaacaatggagttgagaactaccccacagctgaaagtagttgggcaagggagaggaaatggagatcccggagggggcatggaaaaggatggtcccgagtgggatctgtag

SEQ ID NO: 202079 - DNA, 1077 bp, Artificial Sequence
  derived and/or modified sequence
atgagcgtgtgctaccggccccccggcaacgagaccctgctgagctggaagacttctcgtgccacagggacagcgtttctattattggccgccctgctgggccttcccggcaacggcttcgttgtgtggtccttagctggatggagacctgctcgggggaggccactggccgccacattagtgctccacctggccttagcggacggcgccgtccttctgctgacaccgttgttcgtggcttttctgactaggcaggcttggcctctcggccaggccggatgcaaagccgtgtattatgtatgtgcactgtctatgtatgcctcagttcttctgaccggactgctttctttgcagaggtgtctggctgtgactaggccttttctcgccccccgcctccgtagcccagcgttggctcgccgcctccttctggccgtatggctggccgccctactgctcgcagtgcccgcggcggtctatcggcacctctggcgcgaccgggtatgccagctctgccaccccagccccgttcatgcagccgcacatctatcactggagactcttaccgccttcgtccttcctttcggcctcatgcttgggtgttattccgtcacgctggcgaggctcaggggagcgcggtggggttcaggcagacacggggcccgagtcggcagactggttagtgccattgtgctcgcattcgggcttctatgggctccttatcacgccgtgaatctcctccaggccgtggcagccttggcccctcccgagggggctttggcgaaactcgggggggccgggcaggcagctcgggcaggtacaaccgctcttgctttctttagcagttccgtgaatccggtgctgtacgtgttcaccgccggcgatctcctacccagggctggccccaggttcctaacacgcttattcgagggttcaggtgaggctcggggtggaggtcgcagcagagaaggaaccatggaactacgcacgactcctcagttgaaggtggtgggtcagggacgcggcaatggggatccaggaggcgggatggaaaaagatggcccagaatgggacctctag

SEQ ID NO: 202080 - DNA, 483 bp, Artificial Sequence
  derived and/or modified sequence
atgtcagtgtgctatagacccccaggtaatgagacattgctgagttggaagacctcccgcgcaaccggaacagctttcctcttgttagcagcgctgctcggcttacccggtaatggcttcgtagtctggagcctggccggatggaggccagctagaggcaggcccttggctgccaccctggtgctgcatttggcgttggccgacggagccgtgttattgctaacaccgttgttcgtagcctttttaacgcgccaggcttggcccttggggcaggcaggctgtaaagccgtttattacgtttgtgccctttccatgtatgcgtccgtgctcctgacaggactgctatcgctgcagcggtgcctggccgttactcgtccctttcttgctcctcgcctgcgtagtccagccctggctcgccgactcctgctggccgtttggctggcagcactgctgctcgccgtgccagccgctgtgtacaggtag

SEQ ID NO: 202081 - DNA, 1170 bp, Artificial Sequence
  derived and/or modified sequence
atggcaccctctcacagagcttcccaggtgggattctgtccaactcctgaaaggcccctgtggcgtttgcccccaacttgtcgcccacggcgaatgagcgtgtgctacaggccgccaggcaatgagacacttctgtcgtggaagacttcccgtgcaacaggaactgcttttctcctacttgccgctctgctcggactgccaggtaacggcttcgtggtatggagcctagcaggctggcggccagcccgaggccgtcccctcgctgccaccctcgtgctacacttagccctggctgatggcgctgttctgctgctgacacccctcttcgtggcgttcctcacccgccaagcatggccacttggccaggccggatgcaaagcggtctactacgtgtgtgccctgtccatgtacgcttctgtgctccttaccggcctcttgagcctacagcgttgtctagccgtcaccagaccgtttctcgctcctagactcagaagcccagccctcgctaggcggctcctcctggctgtctggctagcagcactgctcctggccgtgcctgctgccgtttaccgccatttatggagggaccgggtatgtcagttgtgtcatccctcacctgttcatgccgctgcccacttaagccttgagacattgaccgccttcgtacttccgttcggcctcatgctgggctgttacagcgtgactcttgccagactgcggggtgccaggtggggctcaggacgccatggtgcgagggtcgggagactcgttagcgctatagtgctggctttcgggctgctatgggcaccataccatgccgtgaatcttcttcaggcagtggctgctctggccccacccgaaggagctcttgccaaactgggtggggcaggacaagcggctagagccggaaccacggctcttgccttcttcagttcatctgtgaaccccgtgctgtacgtgttcacggctggggatctgctccccagggctggacctcgatttttaacccggctgttcgagggaagcggagaagctcggggtggtggcaggagccgagagggaactatggaactcaggaccaccccacaactgaaggtcgtcggacaagggagaggcaatggagacccaggcggaggaatggagaaagatggacccgagtgggacctgtag

SEQ ID NO: 202082 - DNA, 960 bp, Artificial Sequence
  derived and/or modified sequence
atgtcagtgtgttatagaccccctgggaacgaaacactgctttcttggaagaccagtagggcgaccgggacagcctttctcctgctcgcggcactcctgggcctgccagggaatgggttcgttgtctggagtctggctggctggcgacccgcaagaggcagaccccttgcagccacactagtgttgcacctcgccctggctgacggggcagtcttgctactcacgcctctgtttgtagcatttctcacacgccaggcatggccccttggccaggccggatgtaaagctgtgtactatgtctgtgcactgagcatgtacgcttccgtcctgctaactggcctccttagcctgcagcgatgtcttgctgtgactcgacccttcctcgccccacgtcttcggtctcccgctctcgccaggaggctcctgctggcagtctggcttgctgccctgctgctcgctgtcccagcagcagtgtacaggcacctttggcgggaccgggtatgtcagctctgccatccgtcccccgtgcacgcagctgcacacctgtccctcgagaccctcaccgccttcgtcctgccattcgggttaatgttgggttgctatagcgtgactctggccagactacgaggagctaggtggggctccgggaggcacggagctcgggtagggagactagtttccgctattgtgctcgctttcggattgctttgggctccgtatcacgccgtgaatcttctccaggctgttgccgcactggctccacccgaaggtgctcttgcaaagttgggcggtgcagggcaggccgctcgggcaggcaccaccgctcttgcgtttttttcatcgtccgttaacccagtcctctatgtgttcacggccggtgatttgctcccccgtgcgggtcctcgattcttgacccggctgtttgaggggagcggtgaagcgaggggcggaggacgatag

SEQ ID NO: 202083 - DNA, 1077 bp, Artificial Sequence
  derived and/or modified sequence
atgtccgtgtgttaccgcccaccgggaaatgaaacactcctctcttggaagacctccagagctacagggacagccttcttgctgttagctgcactccttggtctgcctgggaacggcttcgtcgtgtggagcttggccggatggagacctgctcgcggaagaccactggcggcaacgctggtactgcacctggctttggcggacggggcagtactgctgctaactcctctgttcgtagcattccttacgagacaagcttggccactcggccaggcgggttgtaaggccgtctactatgtttgcgctctctcaatgtacgcgtccgtccttttgaccggcctgctgtctctccagcggtgtctggccgtcacgcggccttttctcgcgccaagactccgaagccctgctctcgcgcgacgcctgctcctcgcggtttggctggccgcactactcctggccgtgccagctgcagtttacagacacctctggagggatagagtttgccagctgtgtcacccttctccagtccacgccgcagcccacctcagcctggagactctcaccgcttttgttctgcccttcggtctcatgctcgggtgctattcagtgacattagccaggttaagaggtgcccgttggggttccgggaggcatggggctagagtgggcagactcgtgtcagctatcgtgctggcgtttggtctgctgtgggccccatatcatgccgtgaatctgctgcaggccgtagcggcactagctccacccgaaggagccctcgccaagttgggcggagcaggtcaggccgcaagggccggaacgacggcactcgctttcttttcttcatccgtgaatcctgtgctctacgtctttaccgcaggcgacctgctgccaagggccggtccgaggttcttgactcgcctgtttgaaggatcaggcgaggcgagaggcggaggccgatccagagaaggaacaatggagctgaggaccaccccgcagttgaaggtggtgggtcaagggagggggaacggtgatccagggggtggcatggagaaagacggccctgagtgggacttgtag

SEQ ID NO: 202084 - DNA, 1077 bp, Artificial Sequence
  derived and/or modified sequence
atgtcggtgtgctatcgccctcctggcaatgagacactgctgtcatggaagaccagtcgtgcgacgggcaccgcctttctgttactcgccgcacttctcgggctcccgggaaatggcttcgtggtctggtcccttgccggttggagaccggctagagggaggcctctagccgcaacgttagtgttgcacctggccctagccgacggggcagttctgctacttaccccactattcgtcgcgtttctgactcggcaggcttggcctctgggtcaggccggatgcaaagcagtgtattacgtgtgcgctttgagtatgtacgcctcagttctattgaccggtctgttgtcgctgcagcgatgtctcgcagtgacaaggccattcctcgccccacgcttgaggagccccgcactggctagacggcttctcctggccgtctggttagccgctctgctgcttgctgtgcccgcagccgtgtacaggcacttatggagggacagagtgtgtcagctttgccaccctagccccgtacacgcagccgcacacttgagcctcgaaactttgacagcttttgtgttgccatttgggctgatgctgggctgttattctgttacactcgccagacttaggggcgctcggtgggggagcggtcgccatggcgcacgggtgggcaggcttgtgagtgctatcgtcctcgcttttggtctcttgtgggccccataccacgcagtgaacctgctccaagccgtggcagcccttgccccaccagaaggagctctggcaaagcttgggggagccggacaggcggcaagagccggaacaactgccctggcatttttcagcagttcagttaatccagtcctgtacgtattcactgcaggagacttgttaccacgtgccggacccaggtttctaactagattgttcgaaggttcgggagaggcacgcggaggcggtcgctccagggaaggaactatggaactgaggacgacacctcagttaaaagtggtgggccagggaaggggtaacggggaccctggcggagggatggagaaagacggtcccgaatgggacctttag

SEQ ID NO: 202085 - DNA, 483 bp, Artificial Sequence
  derived and/or modified sequence
atgagcgtgtgctacagaccccccggcaacgagaccctgctgagctggaagaccagcagagccaccggcaccgccttcctgctgctggccgccctgctgggcctgcccggcaacggcttcgtggtgtggagcctggccggctggagacccgccagaggcagacccctggccgccaccctggtgctgcacctggccctggccgacggcgccgtgctgctgctgacccccctgttcgtggccttcctgaccagacaggcctggcccctgggccaggccggctgcaaggccgtgtactacgtgtgcgccctgagcatgtacgccagcgtgctgctgaccggcctgctgagcctgcagagatgcctggccgtgaccagacccttcctggcccccagactgagaagccccgccctggccagaagactgctgctggccgtgtggctggccgccctgctgctggccgtgcccgccgccgtgtacagatag

SEQ ID NO: 202086 - DNA, 1170 bp, Artificial Sequence
  derived and/or modified sequence
atggcccccagccacagagccagccaggtgggcttctgccccacccccgagagacccctgtggagactgccccccacctgcagacccagaagaatgagcgtgtgctacagaccccccggcaacgagaccctgctgagctggaagaccagcagagccaccggcaccgccttcctgctgctggccgccctgctgggcctgcccggcaacggcttcgtggtgtggagcctggccggctggagacccgccagaggcagacccctggccgccaccctggtgctgcacctggccctggccgacggcgccgtgctgctgctgacccccctgttcgtggccttcctgaccagacaggcctggcccctgggccaggccggctgcaaggccgtgtactacgtgtgcgccctgagcatgtacgccagcgtgctgctgaccggcctgctgagcctgcagagatgcctggccgtgaccagacccttcctggcccccagactgagaagccccgccctggccagaagactgctgctggccgtgtggctggccgccctgctgctggccgtgcccgccgccgtgtacagacacctgtggagagacagagtgtgccagctgtgccaccccagccccgtgcacgccgccgcccacctgagcctggagaccctgaccgccttcgtgctgcccttcggcctgatgctgggctgctacagcgtgaccctggccagactgagaggcgccagatggggcagcggcagacacggcgccagagtgggcagactggtgagcgccatcgtgctggccttcggcctgctgtgggccccctaccacgccgtgaacctgctgcaggccgtggccgccctggccccccccgagggcgccctggccaagctgggcggcgccggccaggccgccagagccggcaccaccgccctggccttcttcagcagcagcgtgaaccccgtgctgtacgtgttcaccgccggcgacctgctgcccagagccggccccagattcctgaccagactgttcgagggcagcggcgaggccagaggcggcggcagaagcagagagggcaccatggagctgagaaccaccccccagctgaaggtggtgggccagggcagaggcaacggcgaccccggcggcggcatggagaaggacggccccgagtgggacctgtag

SEQ ID NO: 202087 - DNA, 960 bp, Artificial Sequence
  derived and/or modified sequence
atgagcgtgtgctacagaccccccggcaacgagaccctgctgagctggaagaccagcagagccaccggcaccgccttcctgctgctggccgccctgctgggcctgcccggcaacggcttcgtggtgtggagcctggccggctggagacccgccagaggcagacccctggccgccaccctggtgctgcacctggccctggccgacggcgccgtgctgctgctgacccccctgttcgtggccttcctgaccagacaggcctggcccctgggccaggccggctgcaaggccgtgtactacgtgtgcgccctgagcatgtacgccagcgtgctgctgaccggcctgctgagcctgcagagatgcctggccgtgaccagacccttcctggcccccagactgagaagccccgccctggccagaagactgctgctggccgtgtggctggccgccctgctgctggccgtgcccgccgccgtgtacagacacctgtggagagacagagtgtgccagctgtgccaccccagccccgtgcacgccgccgcccacctgagcctggagaccctgaccgccttcgtgctgcccttcggcctgatgctgggctgctacagcgtgaccctggccagactgagaggcgccagatggggcagcggcagacacggcgccagagtgggcagactggtgagcgccatcgtgctggccttcggcctgctgtgggccccctaccacgccgtgaacctgctgcaggccgtggccgccctggccccccccgagggcgccctggccaagctgggcggcgccggccaggccgccagagccggcaccaccgccctggccttcttcagcagcagcgtgaaccccgtgctgtacgtgttcaccgccggcgacctgctgcccagagccggccccagattcctgaccagactgttcgagggcagcggcgaggccagaggcggcggcagatag

SEQ ID NO: 202088 - DNA, 1077 bp, Artificial Sequence
  derived and/or modified sequence
atgagcgtgtgctacagaccccccggcaacgagaccctgctgagctggaagaccagcagagccaccggcaccgccttcctgctgctggccgccctgctgggcctgcccggcaacggcttcgtggtgtggagcctggccggctggagacccgccagaggcagacccctggccgccaccctggtgctgcacctggccctggccgacggcgccgtgctgctgctgacccccctgttcgtggccttcctgaccagacaggcctggcccctgggccaggccggctgcaaggccgtgtactacgtgtgcgccctgagcatgtacgccagcgtgctgctgaccggcctgctgagcctgcagagatgcctggccgtgaccagacccttcctggcccccagactgagaagccccgccctggccagaagactgctgctggccgtgtggctggccgccctgctgctggccgtgcccgccgccgtgtacagacacctgtggagagacagagtgtgccagctgtgccaccccagccccgtgcacgccgccgcccacctgagcctggagaccctgaccgccttcgtgctgcccttcggcctgatgctgggctgctacagcgtgaccctggccagactgagaggcgccagatggggcagcggcagacacggcgccagagtgggcagactggtgagcgccatcgtgctggccttcggcctgctgtgggccccctaccacgccgtgaacctgctgcaggccgtggccgccctggccccccccgagggcgccctggccaagctgggcggcgccggccaggccgccagagccggcaccaccgccctggccttcttcagcagcagcgtgaaccccgtgctgtacgtgttcaccgccggcgacctgctgcccagagccggccccagattcctgaccagactgttcgagggcagcggcgaggccagaggcggcggcagaagcagagagggcaccatggagctgagaaccaccccccagctgaaggtggtgggccagggcagaggcaacggcgaccccggcggcggcatggagaaggacggccccgagtgggacctgtag

SEQ ID NO: 202089 - protein, 729 aa, Artificial Sequence
  derived and/or modified sequence
MGGFLPKAEGPGSQLQKLLPSFLVREQDWDQHLDKLHMLQQKRILESPLLRASKENDLSVLRQLLLDCTCDVRQRGALGETALHIAALYDNLEAALVLMEAAPELVFEPTTCEAFAGQTALHIAVVNQNVNLVRALLTRRASVSARATGTAFRRSPRNLIYFGEHPLSFAACVNSEEIVRLLIEHGADIRAQDSLGNTVLHILILQPNKTFACQMYNLLLSYDGHGDHLQPLDLVPNHQGLTPFKLAGVEGNTVMFQHLMQKRRHIQWTYGPLTSILYDLTEIDSWGEELSFLELVVSSDKREARQILEQTPVKELVSFKWNKYGRPYFCILAALYLLYMICFTTCCVYRPLKFRGGNRTHSRDITILQQKLLQEAYETREDIIRLVGELVSIVGAVIILLLEIPDIFRVGASRYFGKTILGGPFHVIIITYASLVLVTMVMRLTNTNGEVVPMSFALVLGWCSVMYFTRGFQMLGPFTIMIQKMIFGDLMRFCWLMAVVILGFASAFYIIFQTEDPTSLGQFYDYPMALFTTFELFLTVIDAPANYDVDLPFMFSIVNFAFAIIATLLMLNLFIAMMGDTHWRVAQERDELWRAQVVATTVMLERKLPRCLWPRSGICGCEFGLGDRWFLRVENHNDQNPLRVLRYVEVFKNSDKEDDQEHPSEKQPSGAESGTLARASLALPTSSLSRTASQSSSHRGWEILRQNTLGHLNLGLNLSEGDGEEVYHF

SEQ ID NO: 202090 - protein, 381 aa, Artificial Sequence [sequence omitted]

SEQ ID NO: 202091 - DNA, 2190 bp, Artificial Sequence
  derived and/or modified sequence
atgggcggcttcctgcccaaggccgagggccccggcagccagctgcagaagctgctgcccagcttcctggtgagagagcaggactgggaccagcacctggacaagctgcacatgctgcagcagaagagaatcctggagagccccctgctgagagccagcaaggagaacgacctgagcgtgctgagacagctgctgctggactgcacctgcgacgtgagacagagaggcgccctgggcgagaccgccctgcacatcgccgccctgtacgacaacctggaggccgccctggtgctgatggaggccgcccccgagctggtgttcgagcccaccacctgcgaggccttcgccggccagaccgccctgcacatcgccgtggtgaaccagaacgtgaacctggtgagagccctgctgaccagaagagccagcgtgagcgccagagccaccggcaccgccttcagaagaagccccagaaacctgatctacttcggcgagcaccccctgagcttcgccgcctgcgtgaacagcgaggagatcgtgagactgctgatcgagcacggcgccgacatcagagcccaggacagcctgggcaacaccgtgctgcacatcctgatcctgcagcccaacaagaccttcgcctgccagatgtacaacctgctgctgagctacgacggccacggcgaccacctgcagcccctggacctggtgcccaaccaccagggcctgacccccttcaagctggccggcgtggagggcaacaccgtgatgttccagcacctgatgcagaagagaagacacatccagtggacctacggccccctgaccagcatcctgtacgacctgaccgagatcgacagctggggcgaggagctgagcttcctggagctggtggtgagcagcgacaagagagaggccagacagatcctggagcagacccccgtgaaggagctggtgagcttcaagtggaacaagtacggcagaccctacttctgcatcctggccgccctgtacctgctgtacatgatctgcttcaccacctgctgcgtgtacagacccctgaagttcagaggcggcaacagaacccacagcagagacatcaccatcctgcagcagaagctgctgcaggaggcctacgagaccagagaggacatcatcagactggtgggcgagctggtgagcatcgtgggcgccgtgatcatcctgctgctggagatccccgacatcttcagagtgggcgccagcagatacttcggcaagaccatcctgggcggccccttccacgtgatcatcatcacctacgccagcctggtgctggtgaccatggtgatgagactgaccaacaccaacggcgaggtggtgcccatgagcttcgccctggtgctgggctggtgcagcgtgatgtacttcaccagaggcttccagatgctgggccccttcaccatcatgatccagaagatgatcttcggcgacctgatgagattctgctggctgatggccgtggtgatcctgggcttcgccagcgccttctacatcatcttccagaccgaggaccccaccagcctgggccagttctacgactaccccatggccctgttcaccaccttcgagctgttcctgaccgtgatcgacgcccccgccaactacgacgtggacctgcccttcatgttcagcatcgtgaacttcgccttcgccatcatcgccaccctgctgatgctgaacctgttcatcgccatgatgggcgacacccactggagagtggcccaggagagagacgagctgtggagagcccaggtggtggccaccaccgtgatgctggagagaaagctgcccagatgcctgtggcccagaagcggcatctgcggctgcgagttcggcctgggcgacagatggttcctgagagtggagaaccacaacgaccagaaccccctgagagtgctgagatacgtggaggtgttcaagaacagcgacaaggaggacgaccaggagcaccccagcgagaagcagcccagcggcgccgagagcggcaccctggccagagccagcctggccctgcccaccagcagcctgagcagaaccgccagccagagcagcagccacagaggctgggagatcctgagacagaacaccctgggccacctgaacctgggcctgaacctgagcgagggcgacggcgaggaggtgtaccacttctag

SEQ ID NO: 202092 - DNA, 1146 bp, Artificial Sequence
  derived and/or modified sequence
atgggcggcttcctgcccaaggccgagggccccggcagccagctgcagaagctgctgcccagcttcctggtgagagagcaggactgggaccagcacctggacaagctgcacatgctgcagcagaagagaatcctggagagccccctgctgagagccagcaaggagaacgacctgagcgtgctgagacagctgctgctggactgcacctgcgacgtgagacagagaggcgccctgggcgagaccgccctgcacatcgccgccctgtacgacaacctggaggccgccctggtgctgatggaggccgcccccgagctggtgttcgagcccaccacctgcgaggccttcgccggccagaccgccctgcacatcgccgtggtgaaccagaacgtgaacctggtgagagccctgctgaccagaagagccagcgtgagcgccagagccaccggcaccgccttcagaagaagccccagaaacctgatctacttcggcgagcaccccctgagcttcgccgcctgcgtgaacagcgaggagatcgtgagactgctgatcgagcacggcgccgacatcagagcccaggacagcctgggcaacaccgtgctgcacatcctgatcctgcagcccaacaagaccttcgcctgccagatgtacaacctgctgctgagctacgacggccacggcgaccacctgcagcccctggacctggtgcccaaccaccagggcctgacccccttcaagctggccggcgtggagggcaacaccgtgatgttccagcacctgatgcagaagagaagacacatccagtggacctacggccccctgaccagcatcctgtacgacctgaccgagatcgacagctggggcgaggagctgagcttcctggagctggtggtgagcagcgacaagagagaggccagacagatcctggagcagacccccgtgaaggagctggtgagcttcaagtggaacaagtacggcagaccctacttctgcatcctggccgccctgtacctgctgtacatgatctgcttcaccacctgctgcgtgtacagacccctgaagttcagaggcggcaacagaacccacagcagagacatcaccatcctgcagcagaagctgctgcaggtgatcctgctgagaagaggctag

SEQ ID NO: 202093 - DNA, 2190 bp, Artificial Sequence
  derived and/or modified sequence
atggggggctttctacccaaggccgaaggtcctgggagccagttgcagaagctcctcccttcattcctggttagggagcaggattgggaccagcacctagacaaattgcatatgctgcagcagaaaagaatcctagaatctccgctgctgagggcatctaaggagaatgatttgagcgtgcttcgccaattgcttttagattgcacttgcgacgtgagacaaaggggtgccttgggcgagacagctctccacattgccgcactgtacgacaacctggaggccgcccttgtcttgatggaggcggctcccgaattagtgttcgagccaacaacctgcgaggcttttgccggtcagacagctctgcacatcgcagtcgtcaatcagaacgtgaatctagttcgagcattgttgacccgccgggctagcgtatctgcgcgcgcgactggaactgcctttcggaggtctccacgaaatcttatctattttggcgagcatccattatcgttcgcagcctgcgtgaacagcgaggaaattgtgcgactgttgattgagcacggagcggacatccgggcacaagattccttaggcaacactgtccttcacatcctgatcttgcagccaaacaagactttcgcctgccagatgtacaaccttcttctctcatatgacggacatggggatcatcttcagcctctggaccttgttccaaatcatcaggggctgactccttttaagctggctggtgtggaaggaaatactgttatgtttcagcatttaatgcagaagagaaggcacatccagtggacttacgggccccttaccagcattctctatgatctgaccgagatcgactcctggggcgaagaactgagcttcctggaacttgttgtgtccagtgataaaagggaagcaagacagattctggaacaaactcctgtgaaagagttagtttccttcaagtggaataagtacggtcggccttacttttgtatcctggcagctctataccttctctacatgatttgcttcacaacctgctgcgtttaccgccccctgaaattcaggggcggaaaccgcacacactctcgtgatatcaccattctccaacagaagctcttgcaggaggcctacgagacaagggaggacattattcggctggtaggtgagcttgtcagcattgttggagccgtgatcattcttctgctcgaaatcccggatatattccgagtgggtgccagccgctacttcggcaaaactattttggggggaccgttccatgtgatcattatcacctacgcttccctcgtgctcgtaacaatggtcatgaggctgacgaatacgaatggggaggtggttccaatgtctttcgctctcgtccttggctggtgttcagtgatgtacttcacgcgcggatttcagatgctgggaccttttaccatcatgattcagaagatgatatttggggatcttatgcggttctgttggcttatggccgtcgtgattctggggttcgcttctgcattctacattattttccagacggaagatccaacttctctcggccagttctacgactacccaatggcattgttcactacttttgagctgttcctgaccgtcatcgacgctccagccaattatgatgtcgacttgccttttatgttttccatagtcaatttcgcattcgctatcatcgccaccctgctgatgttgaatctatttattgccatgatgggtgatacgcactggcgtgtggctcaggaaagggatgaactgtggagggcacaggtcgtggccactacggtgatgctggagcggaaactccctaggtgtctgtggcctcgaagtggtatctgtgggtgtgaatttgggcttggtgatagatggttcctccgcgtggaaaatcacaatgatcagaatcccctccgtgttctcaggtacgtagaggtcttcaaaaatagcgacaaggaggacgaccaggagcacccttccgagaagcagccgtcgggggccgagtctggtaccctggctagggcgagtcttgccctgcccaccagcagcctgtctagaacagccagccagagctcttcccatcggggctgggaaattcttcggcagaacactctcggtcacctcaatctgggcctgaacctgtccgagggtgacggagaagaagtctatcacttttag

SEQ ID NO: 202094 - DNA, 1146 bp, Artificial Sequence
  derived and/or modified sequence
atgggcggttttctaccaaaggctgagggtccagggagccagctgcagaaactcctgccctcgtttttggtcagagagcaggattgggatcagcaccttgacaagctgcacatgcttcagcagaaacgcattcttgaaagccctttattgagggcctcaaaagaaaacgatctcagcgtgttgaggcagctccttctcgactgtacgtgcgacgtgcgacagcggggggctttgggcgagactgcactgcatattgccgcactctatgataatttggaggctgccctggttttgatggaagctgcccccgagctggtctttgagcccaccacatgcgaggcttttgcagggcagaccgcgcttcacattgcagtggttaatcagaacgtgaacttggttcgagcgcttctgacccgccgggcctcagtctccgccagagctacgggtacagcctttagaaggagcccacggaatcttatctacttcggggaacatcctctctccttcgctgcttgtgtcaattccgaggaaattgtccgcctgctaatcgagcatggcgccgacataagagcccaggacagcctggggaatacagtcctccacattctcattctacagcctaacaagaccttcgcctgccagatgtacaacctgctgctgtcatatgatggccacggtgaccacctgcagccgctggatctcgtaccgaatcaccaaggcctgactccctttaagttagccggcgtggaagggaatacagtgatgttccaacaccttatgcagaagcgacgacatatccagtggacctacggccccctcacctcgatcctctatgacctcactgagatcgattcgtggggagaggagctcagttttcttgagctggtcgtgtctagtgataagcgtgaagctcgccaaatactggaacagacaccagttaaagaactcgtgtccttcaagtggaataagtacggtaggccctacttctgcatcctggcggccctgtacttgctgtatatgatttgtttcacgacatgctgtgtgtaccgcccactcaaatttagaggggggaaccgcacacactccagagatatcacaatactccagcagaagttactgcaggttatcctcttacgcaggggatag

SEQ ID NO: 202095 - DNA, 2190 bp, Artificial Sequence
  derived and/or modified sequence
atgggcggcttcctgcccaaggccgagggccctggcagccagctgcagaagctgctgcccagcttcctggtgcgggagcaggactgggaccagcacctggacaagctgcacatgctgcagcagaagaggatcctggagagccccctgctgcgggccagcaaagaaaatgacctgtctgtgctgcggcagctgctgctggactgcacctgtgatgtgcggcagagaggagccctgggggagacagccctgcacatcgccgccctgtatgacaacctggaggccgccctggtgctgatggaggccgcccctgagctggtgtttgagcccaccacctgtgaggcctttgctggccagacagccctgcacatcgctgtggtgaaccagaatgtgaacctggtgcgggccctgctgacccggcgggcctctgtgtctgcccgggccaccggcacagccttcagaagaagccccaggaacctgatctactttggagagcaccccctgagctttgctgcctgtgtgaacagcgaggagatcgtgcggctgctgattgaacatggagctgacatccgggcccaggacagcctgggcaacacagtgctgcacatcctgatcctgcagcccaacaagacctttgcctgccagatgtacaacctgctgctgtcctatgatggccatggagaccacctgcagcccctggacctggtgcccaaccaccagggcctgacccccttcaagctggccggcgtggagggcaacacagtgatgttccagcacctgatgcagaagagaagacacatccagtggacctacggccccctgaccagcatcctgtatgacctgacagaaattgacagctggggcgaggagctgtccttcctggagctggtggtgtccagtgacaagcgggaggcccggcagatcctggagcagacccctgtgaaggagctggtgtccttcaagtggaacaagtatggccggccctacttctgcatcctggccgccctgtacctgctgtacatgatctgcttcaccacctgctgcgtgtaccggcccctgaagttccggggcggcaacagaacccacagccgggacatcaccatcctgcagcagaagctgctgcaggaggcctatgagacccgggaggacatcatccggctggtgggggagctggtgtccatcgtgggcgccgtcatcatcctgctgctggagatcccagacatcttccgggtgggcgccagccgctactttgggaagaccatcctgggcggccccttccacgtgatcatcatcacctacgccagcctggtgctggtgaccatggtgatgaggctgaccaacaccaacggggaggtggtgcccatgagctttgccctggtgctgggctggtgcagcgtgatgtacttcacccggggcttccagatgctgggccccttcaccatcatgatccagaagatgatctttggagacctgatgaggttctgctggctgatggctgtggtgatcctgggctttgccagcgccttctacatcatcttccagacagaggaccccaccagcctgggccagttctatgactaccccatggccctcttcaccacctttgagctgttcctgactgtgattgatgccccagccaactatgatgtggacctgcccttcatgttcagcatcgtgaactttgcctttgccatcatcgccaccctgctgatgctgaacctcttcatcgccatgatgggagacacccactggagggtggcccaggagagagatgagctgtggagggcccaggtggtggccaccaccgtgatgctggagaggaagctgccccgctgcctgtggcccaggagcggcatctgtggctgtgaatttggcctgggggaccgctggttcctgcgggtggagaaccacaatgaccagaaccccctgcgggtgctgcgctacgtggaggtgttcaagaacagcgacaaggaggatgaccaggagcaccccagcgagaagcagcccagcggggctgagagcggcaccctggcccgggccagcctggccctgcccaccagcagcctgagcaggacagccagccagagcagcagccaccggggctgggagatcctgcggcagaacaccctgggccacctgaacctgggcctgaacctgtctgaaggagatggagaggaggtgtaccacttctag

SEQ ID NO: 202096 - DNA, 1146 bp, Artificial Sequence
  derived and/or modified sequence
atgggcggcttcctgcccaaggccgagggccctggcagccagctgcagaagctgctgcccagcttcctggtgcgggagcaggactgggaccagcacctggacaagctgcacatgctgcagcagaagaggatcctggagagccccctgctgcgggccagcaaagaaaatgacctgtctgtgctgcggcagctgctgctggactgcacctgtgatgtgcggcagagaggagccctgggggagacagccctgcacatcgccgccctgtatgacaacctggaggccgccctggtgctgatggaggccgcccctgagctggtgtttgagcccaccacctgtgaggcctttgctggccagacagccctgcacatcgctgtggtgaaccagaatgtgaacctggtgcgggccctgctgacccggcgggcctctgtgtctgcccgggccaccggcacagccttcagaagaagccccaggaacctgatctactttggagagcaccccctgagctttgctgcctgtgtgaacagcgaggagatcgtgcggctgctgattgaacatggagctgacatccgggcccaggacagcctgggcaacacagtgctgcacatcctgatcctgcagcccaacaagacctttgcctgccagatgtacaacctgctgctgtcctatgatggccatggagaccacctgcagcccctggacctggtgcccaaccaccagggcctgacccccttcaagctggccggcgtggagggcaacacagtgatgttccagcacctgatgcagaagagaagacacatccagtggacctacggccccctgaccagcatcctgtatgacctgacagaaattgacagctggggcgaggagctgtccttcctggagctggtggtgtccagtgacaagcgggaggcccggcagatcctggagcagacccctgtgaaggagctggtgtccttcaagtggaacaagtatggccggccctacttctgcatcctggccgccctgtacctgctgtacatgatctgcttcaccacctgctgcgtgtaccggcccctgaagttccggggcggcaacagaacccacagccgggacatcaccatcctgcagcagaagctgctgcaggtgatcctgctgcggcggggctag

SEQ ID NO: 202097 - DNA, 2190 bp, Artificial Sequence
  derived and/or modified sequence
atgggcggcttcctgcccaaggccgagggccccggcagccagctgcagaagctgctgccctcgtttctggtgcgtgaacaggattgggatcaacatctggacaagctgcatatgcttcagcagaagagaattcttgaaagtcccctgctgcgggctagtaaggagaacgacctgagcgttctgcgtcaactgctgctcgattgcacctgtgacgttagacaacgcggcgccctcggcgagacagccctgcatattgccgccctgtatgacaacctggaagccgcccttgtgctgatggaagccgcccctgagcttgtgttcgaacccacaacttgtgaagctttcgcgggacagactgccctgcacattgccgtggtaaaccagaatgttaatctggtgagggccctcctgacccggagggcaagtgtgtcggcccgtgctaccggcacagcatttcggaggagcccaaggaatctaatctatttcggagagcatccattaagtttcgcagcatgcgtcaacagcgaggaaatcgtgaggctattgatcgagcacggggctgacatccgggctcaggactcactcgggaacacggttctgcatatacttattctgcagcctaataagacattcgcatgccagatgtacaatcttctcctgtcttatgacgggcatggggaccacctgcagcctctagatctggtgcctaatcaccaagggctcacgcccttcaaactggccggcgtcgaagggaatacagttatgttccagcatcttatgcaaaaacggcgccacattcagtggacatatggccccctgaccagtattctttatgatctcactgagatcgacagttggggagaagagctgtcctttctggaactggttgtgtcttctgacaagcgggaggctcgtcagatcctcgagcaaacaccagtcaaggaacttgtaagcttcaagtggaataagtatggtaggccatatttttgtatccttgcagccttatacctattgtacatgatatgttttaccacatgctgtgtctataggcccctaaagttccgcgggggcaacaggactcacagcagggacatcacgattctccagcagaaattgttgcaagaagcatacgaaacccgggaagacataatccggctagtgggagaactggtcagcattgtcggtgccgttattattttgctcttggaaatcccagatatttttcgcgtcggtgcatctcggtattttggaaaaaccatccttggcggacctttccacgttattatcataacctatgctagccttgtccttgtcactatggtgatgcgattgaccaacaccaacggcgaggtagttcctatgagctttgcattggtgctggggtggtgcagcgtgatgtatttcacgcgaggtttccagatgctggggcccttcaccatcatgattcagaagatgatttttggggacctgatgcgtttctgctggctgatggccgtggtaatactcggattcgctagcgccttttacattatctttcaaactgaggatccaacatcactaggacagttttatgattacccaatggctctctttacgacttttgaacttttcttgacggtaatcgacgcaccagccaattatgacgtggacctgccttttatgttctcaatcgtaaatttcgcatttgccataatcgctactttactgatgcttaacctgtttatagctatgatgggagacacccactggcgggtggcccaagagcgggatgagttgtggcgggcacaagtcgtggccaccaccgtgatgctagaacggaagctgccaagatgcttgtggccaagatctggtatatgcgggtgcgagtttgggctcggcgatagatggtttttgcgtgtggaaaatcataatgaccagaaccccctccgagtgcttcggtatgttgaagtttttaagaactctgataaagaggacgaccaggaacacccctctgaaaaacagcccagcggggccgagtcggggactcttgcccgtgctagcctcgccctgcctacgtcttccttgtcccgaacggcatcacagagctcctcccacagagggtgggaaatcctacgccagaacacactggggcatctgaatttagggctcaacctgtcagaaggagatggcgaagaagtgtaccatttttag

SEQ ID NO: 202098 - DNA, 1146 bp, Artificial Sequence
  derived and/or modified sequence
atgggcggcttcctgcccaaggccgagggccccggcagccagctgcagaaactcctgcctagttttctcgtaagagaacaggactgggaccagcacctcgacaagctgcatatgcttcagcaaaaaaggatcctcgaaagtccgttgttaagggcttcaaaggagaacgacctgtctgtgctgagacagctattactcgactgcacttgcgatgtgagacaacgcggggctctgggggagacagccctgcacatagctgcactttatgacaatctggaggcagccctggtgcttatggaggccgcccccgaacttgtctttgaaccaaccacctgtgaagcatttgctggtcagacagctctgcacatcgcagttgtcaaccaaaacgtcaatttggtgcgggctcttctaacgagacgagcatccgttagcgcccgggcaacagggacagctttcaggcgctcccctaggaatctcatatattttggggaacaccccctgtcgtttgcagcatgtgtgaattcagaagagattgtgagattgttgatcgaacacggagcagatatccgcgctcaagactcactggggaatactgtactgcacattctgatactgcagcccaataagacatttgcatgccagatgtacaacctcctgctgagctacgatggacatggggaccatcttcaacccctggatctggtgccaaatcaccaaggcctgacacctttcaagttggctggcgtcgagggcaacacagttatgttccaacacctcatgcagaaaagacggcatatacagtggacttatggcccactcactagcattctctacgatctgacggagattgattcttggggggaggaactaagctttttggagctcgtcgtctcgtctgataagagggaagcacggcagatcctcgaacagactcctgtgaaggagcttgtgtccttcaagtggaacaaatatggcaggccgtatttctgcatactggccgccctgtatctgctttacatgatttgtttcactacatgttgcgtgtacaggccactgaaattcaggggcgggaacagaacacacagccgggacatcaccattctgcagcaaaagctgctccaggttatcctcctccgccgggggtag

SEQ ID NO: 202099 - DNA, 2190 bp, Artificial Sequence
  derived and/or modified sequence
atgggaggattcctgcccaaggccgagggccctggaagccagctccagaaactgctgccttcatttcttgttcgggaacaggactgggaccagcacctcgacaagctccacatgctgcagcagaagcggattctggagtcacctctgcttagagctagcaaggaaaacgacttgtcggtcttacgccagctgctgctagattgcacgtgcgacgtgcgccaacgtggggctctcggagagactgcactccatatcgccgcactttacgacaacctagaggccgctcttgtactgatggaagcagcccctgaactggtgtttgaacctactacatgcgaagcatttgccggacaaacagctctacatatcgctgtcgtcaaccagaacgtgaatctggttcgcgcactgctgacaagaagggcctcggtgagtgcccgagcaacgggaacggccttccgcagatcccctagaaatctcatctattttggggagcacccactgtcctttgctgcctgcgtaaattcggaggagatagtcagattgttgatcgaacatggtgcggacattcgggctcaagactcactagggaataccgtcttacacatattgattcttcagccaaataaaacttttgcatgccagatgtacaacctgctgctctcttatgatgggcacggagaccacctccagccgcttgatttagtgccaaaccatcagggcttaacccctttcaaattggcaggggtcgagggtaataccgtcatgtttcaacacctaatgcagaaaagaagacatatacagtggacttatggcccactaacctcaatcttatatgacttaacagagatcgactcatggggagaggagctgtcctttctcgagttggtcgtctcaagcgacaagcgggaggcgagacaaatcttagagcagacccccgtaaaggaactggtgagtttcaagtggaataaatacggacggccttacttttgtatactggcggcactttacttgctgtacatgatttgcttcactacatgctgcgtttacaggcccctgaaatttcgtggcggtaaccgtacacattcacgcgatatcaccattttacagcagaagcttcttcaagaggcctacgagaccagggaggatattatccgtctggtgggagagctagtctctattgttggtgctgttataattctcctgctagagatccccgatatttttagagttggcgcatccaggtacttcggcaagactatactgggcggaccctttcatgtcatcattataacctatgcctccttggtcttggtaacgatggtgatgcggcttacgaataccaacggagaggttgtaccaatgtccttcgcacttgtgctgggatggtgctccgtgatgtactttacccgagggttccagatgttaggcccatttaccattatgattcagaaaatgatattcggagatctgatgcggttttgttggctgatggccgtggtaatcctagggtttgcctctgctttctatatcatttttcagactgaggaccccacttctctgggccagttctatgattatccaatggcactgtttaccacatttgagctttttctgactgtgatcgatgctcccgctaattacgatgtggatttaccttttatgttcagtatcgtaaatttcgcctttgccataatcgctaccctgctgatgttaaatttgttcattgcaatgatgggggacacacattggagggtcgcacaggagcgggatgaactatggagagctcaggtagttgccacaaccgtgatgcttgagaggaagctccctcgttgtctgtggccaaggagcggtatctgtggatgtgaattcgggctgggcgacaggtggtttctgcgcgtggagaaccacaatgatcaaaatccactgcgtgtcctgaggtacgtggaagtcttcaaaaacagcgacaaagaagatgaccaggagcacccttctgaaaaacagcctagtggagccgagagcgggacactggccagggcgagcctggccctaccgacaagttccttgagccgcaccgctagccagagcagctctcaccgtgggtgggagattttgcgtcagaatacgttgggccatctgaacctcggactgaatctcagtgagggagacggtgaagaggtttaccatttctag

SEQ ID NO: 202100 - DNA, 1146 bp, Artificial Sequence
  derived and/or modified sequence
atgggagggttcctcccaaaggccgaggggcctgggtctcaactgcagaagctgctaccatccttcctggtacgagagcaggattgggatcagcatctggacaagctccacatgcttcagcaaaaacgaatattggaatcacctctcctgagagcatccaaggagaatgacctatcggtgctgcgccagctgctgcttgactgcacatgtgatgtgcgccagcgcggtgctctgggtgagacagccctgcacattgctgccttgtatgataacctcgaagccgcactggtgttgatggaagctgcgcctgagttagtcttcgagccaacgacatgtgaggccttcgctggacaaacggcgctgcacattgcggttgtgaaccagaatgtgaacctcgtgcgggcattactgaccaggcgggcaagcgtgtccgccagggcaaccggaacagctttccgtcgctcaccaagaaatctaatatacttcggggagcaccccctgtcctttgcagcctgcgtgaactcagaggagattgtgagacttctcatcgaacatggcgcagacatcagagcccaggattcactgggtaataccgttttgcacatccttatcctgcagcctaataaaaccttcgcttgccagatgtataatctgctcttgagttatgacggccatggcgaccatttgcaacccctggacctcgtccccaaccaccaggggcttaccccgttcaagctggcaggcgtggaaggcaataccgtcatgtttcagcatctgatgcagaaaaggaggcatatccagtggacctacggtcccctgactagcattctgtatgacctcaccgaaatcgattcttggggggaagaattgtccttcctcgagctagtggtgagttctgataagagagaggctaggcaaatcttggagcagacaccggttaaagagctggtgagtttcaaatggaacaaatacggcaggccctacttctgcattcttgcggcattatacctcttgtacatgatctgctttaccacttgctgcgtttacaggccattaaaattccgcggaggaaatcgcactcactctcgtgacatcaccatcttacaacagaagttgctccaggttattctgcttcgcagagggtag

SEQ ID NO: 202101 - DNA, 2952 bp, Artificial Sequence
  derived and/or modified sequence
ctcagctctgcaaagagctcctccccctccaggaaaagcacttctccccaggcagggcggtcagtcccctcagcgcacctgcatgcacacacaccacctcacaaccacacactgcatgcacacacatacaccacagccacacactgtgcatacacgcacaccccacaacccacatactgcatgcacacacacacacctacaagctgcatgctgcatacacaagtcatacaggagataaactcagagtcccagccccaaatagaccccatctcttgctcagttgctgtcatcctagacctgtttctttcgccacatttctataatctgccagtgtctgcaaggagaagacatggggggttttctacctaaggcagaagggcccgggagccaactccagaaacttctgccctcctttctggtcagagaacaagactgggaccagcacctggacaagcttcatatgctgcagcagaagaggattctagagtctccactgcttcgagcatccaaggaaaatgacctgtctgttcttaggcaacttctactggactgcacctgtgacgttcgacaaagaggagccctgggggagacggcgctgcacatagcagccctctatgacaacttggaggcggccttggtgctgatggaggctgccccagagctggtctttgagcccaccacatgtgaggcttttgcaggtcagactgcactgcacatcgctgttgtgaaccagaatgtgaacctggtgcgtgccctgctcacccgcagggccagtgtctctgccagagccacaggcactgccttccgccgtagtccccgcaacctcatctactttggggagcaccctttgtcctttgctgcctgtgtgaacagcgaggagatcgtgcggctgctcattgagcatggagctgacatcagggcccaggactccctgggaaacacagtattacacatcctcatcctccagcccaacaaaacctttgcctgccagatgtacaacctgctgctgtcctacgatggacatggggaccacctgcagcccctggaccttgtgcccaatcaccagggtctcacccccttcaagctggctggagtggagggtaacactgtgatgttccagcacctgatgcagaagcggaggcacatccagtggacgtatggacccctgacctccattctctacgacctcacagagatcgactcctggggagaggagctgtccttcctggagcttgtggtctcctctgataaacgagaggctcgccaaattctggaacagaccccagtgaaggagctggtgagcttcaagtggaacaagtatggccggccgtacttctgcatcctggctgccttgtacctgctctacatgatctgctttaccacgtgctgcgtctaccgcccccttaagtttcgtggtggcaaccgcactcattctcgagacatcaccatcctccagcaaaaactactacaggaggcctatgagacacgtgaagatatcatcaggctggtgggggagctggtgagcatcgttggggctgtgatcatcctgctcctagagattccagacatcttcagggttggtgcctctcgctattttggaaagacgattcttggggggccattccatgtcatcatcatcacctatgcctccctggtgctggtgaccatggtgatgcggctcaccaacaccaatggggaggtggtgcccatgtcctttgccctggtgctgggctggtgcagtgtcatgtatttcactcgaggattccagatgctgggtcccttcaccatcatgatccagaagatgatttttggagacctaatgcgtttctgctggctgatggctgtggtcatcttgggatttgcctccgcgttctatatcattttccagacagaggacccaaccagtctggggcaattctatgactaccccatggcactgttcaccacctttgagctttttctcactgttattgatgcacctgccaactacgacgtggacttgcccttcatgttcagcattgtcaacttcgccttcgccatcattgccacactgctcatgctcaacttgttcatcgccatgatgggcgacacccactggagggtggcccaggagagggatgagctctggagggcccaggtcgtggccaccacagtgatgctggagcggaagctgcctcgctgcctgtggcctcgctccgggatctgtgggtgcgaattcgggctgggggaccgctggttcctgcgggttgagaaccacaatgatcagaatcctctgcgagtgcttcgctatgtggaagtgttcaagaactcagacaaggaggatgaccaggagcatccatctgagaaacagccctctggggctgagagtgggactctagccagagcctctttggctcttccaacttcctccctgtcccggaccgcgtcccagagcagcagtcaccgaggctgggagatccttcgtcaaaacaccctggggcacttgaatcttggactgaaccttagtgagggggatggagaggaggtctaccatttttgattaacatcgctatcactcttgaccttactcccggttggcctgggggcggggacagagacggagacctctgcctatgcaagtgtctaacttctgtgcctgttaatcatgggagggtgagacagaacaatccctaaagggtcatgcctcacacttcacatcagaatttctggcaatgggcaatggtcatcgattgtctcacgtattttctgggctcttgcaagtcacccatctcaggaaaaaggaggttggcaactaaagacatgaggcagggatgctagattaatgtcaggaccatttctcttctgccccacgcagcccctagaaagtagtaagctgtgaggctattctggctccccagggcttacgtgggaagagccaggcatggcatagaggttgtggcccttctttttttc

SEQ ID NO: 202102 - DNA, 2120 bp, Artificial Sequence
  derived and/or modified sequence
cacacacaccacctcacaaccacacactgcatgcacacacatacaccacagccacacactgtgcatacacgcacaccccacaacccacatactgcatgcacacacacacacctacaagctgcatgctgcatacacaagtcatacaggagataaactcagagtcccagccccaaatagaccccatctcttgctcagttgctgtcatcctagacctgtttctttcgccacatttctataatctgccagtgtctgcaaggagaagacatggggggttttctacctaaggcagaagggcccgggagccaactccagaaacttctgccctcctttctggtcagagaacaagactgggaccagcacctggacaagcttcatatgctgcagcagaagaggattctagagtctccactgcttcgagcatccaaggaaaatgacctgtctgttcttaggcaacttctactggactgcacctgtgacgttcgacaaagaggagccctgggggagacggcgctgcacatagcagccctctatgacaacttggaggcggccttggtgctgatggaggctgccccagagctggtctttgagcccaccacatgtgaggcttttgcaggtcagactgcactgcacatcgctgttgtgaaccagaatgtgaacctggtgcgtgccctgctcacccgcagggccagtgtctctgccagagccacaggcactgccttccgccgtagtccccgcaacctcatctactttggggagcaccctttgtcctttgctgcctgtgtgaacagcgaggagatcgtgcggctgctcattgagcatggagctgacatcagggcccaggactccctgggaaacacagtattacacatcctcatcctccagcccaacaaaacctttgcctgccagatgtacaacctgctgctgtcctacgatggacatggggaccacctgcagcccctggaccttgtgcccaatcaccagggtctcacccccttcaagctggctggagtggagggtaacactgtgatgttccagcacctgatgcagaagcggaggcacatccagtggacgtatggacccctgacctccattctctacgacctcacagagatcgactcctggggagaggagctgtccttcctggagcttgtggtctcctctgataaacgagaggctcgccaaattctggaacagaccccagtgaaggagctggtgagcttcaagtggaacaagtatggccggccgtacttctgcatcctggctgccttgtacctgctctacatgatctgctttaccacgtgctgcgtctaccgcccccttaagtttcgtggtggcaaccgcactcattctcgagacatcaccatcctccagcaaaaactactacaggtgattctcctcagaaggggatgagagagaattgcatcaaggggtgatggtgctggaaacgaagccatgctactcagggacgatgccacgctctgggttccagcaggtgtaggctcctaaacacccaggtagaaattagacatgagaccaggaggccacagatggggtttaatgagcacaagagcatttgtccagggagctgtggattttctcacacaaactttgaaagagtgcttggcatgagtaagcctgtgcttttgtgaaattttttggtaatttacaaaaagtatcagggttttgtagtgggatgttcaaggtaaactctattgctcaaaaggaggaaaattgtgctccaagtccatttctgagtccatttttgttgtatttgggcaacacagacagccctgctggcctgcaccctcttctgtgtgctgtctatatgggcccatgggaataatgtgtcagctgtctgactgcctgtcagacactctgcagaaggatgtctggattgggtatcaggctgaagtaaatactctctgaggctccatttagtgttgtgggcctgccattctgtgttgtggtggccaagggaaaactagggttaggaagaggactgattcgaggtacacagtaaatatagaaatctgctgttgaagaaagtaaacctcctttttgtgcaacagaaagggtagactctaatgagcacttctgaatatatatatttaacaactgta

SEQ ID NO: 202103 - protein, 932 aa, Artificial Sequence [sequence omitted]

SEQ ID NO: 202104 - protein, 933 aa, Artificial Sequence
  derived and/or modified sequence
MPRHHAGGEEGGAAGLWVKSGAAAAAAGGGRLGSGMKDVESGRGRVLLNSAAARGDGLLLLGTRAATLGGGGGGLRESRRGKQGARMSLLGKPLSYTSSQSCRRNVKYRRVQNYLYNVLERPRGWAFIYHAFVFLLVFGCLILSVFSTIPEHTKLASSCLLILEFVMIVVFGLEFIIRIWSAGCCCRYRGWQGRLRFARKPFCVIDTIVLIASIAVVSAKTQGNIFATSALRSLRFLQILRMVRMDRRGGTWKLLGSVVYAHSKELITAWYIGFLVLIFSSFLVYLVEKDANKEFSTYADALWWGTITLTTIGYGDKTPLTWLGRLLSAGFALLGISFFALPAGILGSGFALKVQEQHRQKHFEKRRNPAANLIQCVWRSYAADEKSVSIATWKPHLKALHTCSPTKQNQQGESQSCQKLSFKERVRMASPRGQSIKSRQASVGDRRSPSTDITAEGSPTKVQKSWSFNDRTRFRPSLRLKSSQPKPVIDADTALGTDDVYDEKGCQCDVSVEDLTPPLKTVIRAIRIMKFHVAKRKFKETLRPYDVKDVIEQYSAGHLDMLCRIKSLQTRVDQILGKGQITSDKKSREKITAEHETTDDLSMLGRVVKVEKQVQSIESKLDCLLDIYQQVLRKGSASALALASFQIPPFECEQTSDYQSPVDSKDLSGSAQNSGCLSRSTSANISRGLQFILTPNEFSAQTFYALSPTMHSQATQVPISQSDGSAVAATNTIANQINTAPKPAAPTTLQIPPPLPAIKHLPRPETLHPNPAGLQESISDVTTCLVASKENVQVAQSNLTKDRSMRKSFDMGGETLLSVCPMVPKDLGKSLSVQNLIRSTEELNIQLSGSESSGSRGSQDFYPKWRESKLFITDEEVGPEETETDTFDAAPQPAREAAFASDSLRTGRSRSSQSICKAGESTDALSLPHVKLK

SEQ ID NO: 202105 - protein, 932 aa, Artificial Sequence
  derived and/or modified sequence
MPRHHAGGEEGGAAGLWVKSGAAAAAAGGGRLGSGMKDVESGRGRVLLNSAAARGDGLLLLGTRAATLGGGGGGLRESRRGKQGARMSLLGKPLSYTSSQSCRRNVKYRRVQNYLYNVLERPRGWAFIYHAFVFLLVFGCLILSVFSTIPEHTKLASSCLLILEFVMIVVFGLEFIIRIWSAGCCCRYRGWQGRLRFARKPFCVIDTIVLIASIAVVSAKTQGNIFATSALRSLRFLQILRMVRMDRRGGTWKLLGSVVYAHSKELITAWYIGFLVLIFSSFLVYLVEKDANKEFSTYADALWWGTITLTTIGYGDKTPLTWLGRLLSAGFALLGISFFALPAGILGSGFALKVQEQHRQKHFEKRRNPAANLIQCVWRSYAADEKSVSIATWKPHLKALHTCSPTKKEQGEASSSQKLSFKERVRMASPRGQSIKSRQASVGDRRSPSTDITAEGSPTKVQKSWSFNDRTRFRPSLRLKSSQPKPVIDADTALGTDDVYDEKGCQCDVSVEDLTPPLKTVIRAIRIMKFHVAKRKFKETLRPYDVKDVIEQYSAGHLDMLCRIKSLQTRVDQILGKGQITSDKKSREKITAEHETTDDLSMLGRVVKVEKQVQSIESKLDCLLDIYQQVLRKGSASALALASFQIPPFECEQTSDYQSPVDSKDLSGSAQNSGCLSRSTSANISRGLQFILTPNEFSAQTFYALSPTMHSQATQVPISQSDGSAVAATNTIANQINTAPKPAAPTTLQIPPPLPAIKHLPRPETLHPNPAGLQESISDVTTCLVASKENVQVAQSNLTKDRSMRKSFDMGGETLLSVCPMVPKDLGKSLSVQNLIRSTEELNIQLSGSESSGSRGSQDFYPKWRESKLFITDEEVGPEETETDTFDAAPQPAREAAFASDSLRTGRSRSSQSICKAGESTDALSLPHVKLK

SEQ ID NO: 202106 - DNA, 2799 bp, Artificial Sequence
  derived and/or modified sequence
atgccacggcaccacgccggaggtgaggaagggggggcagctggcctgtgggtgaaatcgggagccgccgccgcagctgctggaggcggtaggctgggctctggcatgaaggacgtggagtccggacgtggacgcgtcctgttgaactccgcggctgcccgaggcgatggactccttctgttgggcactcgtgccgcaacactgggcggcggcggcggtggattgcgggaatcaagacgcgggaagcagggcgcgaggatgtcattgcttggaaagcctttgtcgtatactagcagccaatcatgccggagaaacgttaagtacaggcgagtgcagaactatttgtataatgtacttgaacgcccccgcgggtgggcatttatctatcatgcctttgtgtttctcccagttttcggctgccttatactgagtgtgttcagcacaattcctgaacacaccaagctggcatcctcctgtctcctgattctggagttcgtgatgatcgtggtgttcgggctagagttcattattcgcatctggtccgccggttgctgctgcaggtacagggggtggcagggcaggcttcgcttcgcccggaaaccgttttgcgttattgatacgatcgttcttatcgcttccatcgccgtagtctctgccaagacccaaggtaacatcttcgcaacctcagcattgcgttctttacggttcctgcaaattcttcggatggtccgaatggacagaagaggcggcacctggaaactgcttggtagtgtggtgtacgctcactcaaaagaactgatcactgcctggtacatcgggtttctggtgctgatatttagctccttcctggtttacctcgtggagaaggacgcaaacaaagaattcagtacttatgccgatgccctatggtggggtactatcacgctgactacaattggctatggcgataagacacccctgacatggttgggtcgattattgagcgccggctttgcactgttgggcatcagtttctttgcattgccagccggaattttgggaagtggcttcgcactgaaagtccaggagcagcaccggcagaagcatttcgaaaaaaggcggaacccagcggccaatcttatccaatgcgtttggcgatcatatgcggccgatgagaaatctgtgtcaatcgccacatggaaaccacacctgaaggctctccacacttgctctccaaccaagaaggaacaaggcgaggcctcctcttctcaaaagctaagttttaaagaaagagttcgcatggcatcgccaagaggccagagcatcaagtcaaggcaggccagtgtcggagatagaagatcgccctcaacagacatcacggccgaagggtcgccgaccaaggtacagaagtcctggtcttttaacgaccggaccagattcaggcccagcctgcgactgaagagctcccagcctaaacccgtcattgatgccgacactgccctgggaactgacgacgtctacgatgaaaagggctgccagtgtgatgtgagcgtcgaggacctaactcccccactcaaaaccgtaattcgggccattcgcatcatgaagtttcacgtggccaaacggaaattcaaggaaactctccgcccttatgatgttaaggacgttatcgagcagtatagtgctggccaccttgatatgctttgtcgcataaaaagcctccagacccgggtggatcagattctcggaaaagggcagatcacatcggacaagaagtcacgggagaaaatcacagcagaacatgagacaacagatgatctaagcatgctcgggagggttgtcaaggttgagaaacaggttcagtcaattgagtcaaaactcgactgcctgcttgacatctaccagcaggtgctccgaaaagggtcggcatctgctctcgctctcgcatcctttcaaattcccccctttgaatgtgagcaaacgtctgattaccagagccccgtcgacagtaaggatctctctggcagtgcccaaaacagtggctgtctgtccagaagcactagtgccaacatatctcgcggtctacaattcatccttacccccaatgagttctcagcacagaccttttatgctttgtcccctacgatgcattcgcaggctacacaagtgccaatttcgcaaagcgacggctctgctgtcgccgccactaacactatcgcaaaccagatcaacacagcacccaagccagctgcaccgacgaccttgcagattccgcctcccctccctgcaataaaacatctgccacggcctgaaacgctccatcccaatccagcaggcctgcaagagagcataagcgacgtgactacctgtctggtggctagcaaggaaaatgtgcaagtcgcccaatccaatttaactaaagacagaagcatgcggaagagcttcgatatgggcggggaaactctgctgtcagtgtgccccatggttccaaaagacctgggcaagtctctttctgtgcagaatctgatacggtctaccgaggagcttaatattcagttgagtggcagtgagagcagtggttctcggggctctcaagacttctatcccaaatggcgagagagcaagctgttcatcaccgacgaggaggtggggcccgaggagactgaaacagataccttcgacgcagcccctcagcctgctagggaagccgcattcgccagtgactctttgcgtacaggtcggtcccgtagctcccagagcatctgcaaggctggcgagtccaccgacgccctctctctacctcacgtgaagctgaagtag

SEQ ID NO: 202107 - DNA, 2802 bp, Artificial Sequence
  derived and/or modified sequence
atgcccaggcaccacgcgggaggcgaggaggggggcgccgctgggctctgggtgaagtccggcgccgcagctgcagccgccggggggggacgactaggcagtggaatgaaggacgtcgagagcggcagaggcagggtgctgctgaatagcgctgcggcaagaggcgacgggctcttactgcttggaaccagagccgccaccttgggcggcggaggggggggtttgagggagtcccggagaggcaagcagggagccagaatgagtctacttggcaagcccctgagttataccagcagtcaaagttgccggcgtaacgttaagtaccggagggttcagaattacttgtacaatgtcctggagagaccaaggggttgggccttcatctatcatgcattcgtgtttttactcgtgtttggatgtctgatcctgtcagtattttcaacgattcctgagcacacgaagctcgcgtcaagctgcttattgattctcgaatttgtgatgattgtcgtttttgggcttgagttcatcatccgtatttggagcgctggctgctgttgtcggtacagaggctggcagggtagactgcggttcgcaagaaagccattttgcgtgattgatactattgtgctgattgcttctatcgcagttgtatctgccaaaactcaggggaatatcttcgcgacctcggcactccgatccctgagattcctgcagattcttagaatggtgagaatggatagacggggaggcacgtggaaactgttggggtcagttgtatacgctcatagcaaggaactcattactgcttggtatataggattcctcgttttgatcttttcttcgtttcttgtttacctagtcgagaaggatgccaataaagaattctcaacctacgcagacgctctgtggtggggcacgattacactgactaccatcggctacggtgataagacacctctaacatggttgggccgcctactttccgctggctttgccctcctaggaatctcattcttcgccctccccgccggcattttggggtccggattcgcccttaaagtccaggaacagcacaggcagaagcatttcgaaaagagacgcaatccagcagctaacctgatacagtgtgtttggaggtcttacgccgcggacgaaaaaagcgtcagtatcgccacatggaagccacatctgaaagctcttcacacatgttctcctacgaagcaaaaccagcagggcgaatctcagtcatgccagaagctgtcttttaaggaaagagtccgtatggcttcccctcgaggccagtcaatcaagagccgccaagccagcgtaggcgaccggcgttctccgtcaacagatatcacggctgaaggatcacccactaaagtgcaaaagtcctggtctttcaacgacagaacccggttccgcccgagcctgagactgaaatccagccagcccaagcccgtgatcgatgctgatacagcactggggactgacgatgtctatgacgagaagggctgtcagtgcgacgtatccgtagaggacctgactcctcccctcaagacggtcatcagggccattcgcatcatgaaatttcatgtcgccaaaagaaagtttaaggagacactccgtccttatgacgtgaaggacgtgatagaacaatactccgcagggcatctggacatgctatgtcggatcaagtccctccaaacacgcgtggatcagatcctcgggaaggggcagatcacttccgacaagaagtccagagaaaagatcacggcagaacacgaaaccactgacgacctgagcatgttggggcgggtggtcaaagtggagaagcaggtccagtcaatcgagtctaaactcgactgtctcctcgatatctaccagcaggtcctgcgcaaggggtcggcttccgccctggcgctggcctcatttcagatcccacctttcgaatgcgagcaaacttcagactaccagtcacctgtggattctaaggacctgagcggttccgcgcaaaacagcgggtgtctctcacggagcacaagcgccaacatcagccgtggattacaattcatcctgacacccaacgaattttctgctcagactttttatgccctaagtccaacaatgcacagccaggctacgcaagtaccgatatcccagagtgacggatcagctgtggcggccaccaatacaattgcaaatcagattaacactgctccgaaacccgccgctccaaccacactgcaaatccccccccccctgcctgccattaaacacctccctcgtcccgaaacactgcatcccaaccccgcaggtctgcaagagtcgatctctgatgtcacaacttgcctggtcgcttcgaaggagaacgtgcaagtcgctcagagtaatctcaccaaagacaggagcatgcggaaatcttttgatatggggggggagacactgctctctgtctgccccatggtgccaaaagacctgggcaagtccctgtctgtgcagaatctcataagatcaacagaagaactgaatatccaactgagcggcagtgagtcatctgggagccggggctcccaagacttctatcctaagtggagggaatccaagctcttcattacagacgaggaagtgggtcccgaggagacagaaactgatacgtttgatgctgctccacagcccgctcgagaagcggcatttgctagcgacagcttgcgaactggcagatcaagatcctctcaaagcatctgcaaggcaggagagagcacagacgctcttagcctgccgcacgtcaaattaaaatag

SEQ ID NO: 202108 - DNA, 2799 bp, Artificial Sequence
  derived and/or modified sequence
atgcctcggcatcatgccgggggcgaagaggggggtgccgcaggactgtgggtaaaatccggcgcagccgctgccgcggccggcggcggcagattggggtccggaatgaaggacgttgagagcgggagaggccgggtgttactcaattctgcagccgcccgtggagatggcttgctgctcctggggactagggccgctaccctgggtgggggcggtggggggttgcgtgagagcaggcgagggaagcagggtgcgcgaatgagcctgctcgggaaacccctgagctacacatcctcccagtcctgccgccggaacgtcaaatatagacgggtgcagaattatctctataatgtgttggagagacccagaggatgggcatttatttatcacgccttcgtatttcttctggtttttgggtgcctgatcctatccgtgttctctacgattccggaacatactaagctggcgagttcttgccttttgattctggagttcgtcatgattgtggtgtttggtctggaatttattatcaggatctggagcgcggggtgttgttgccgttacagaggatggcagggcaggctccgcttcgctcgtaagccattctgcgtcatcgacactattgtgttaatcgcctccatcgctgtcgtgtctgccaagacccagggtaacatatttgccacgagtgccctgcgtagccttaggttcttacagatcctccggatggtccgcatggatcggagaggcggcacgtggaaactcctgggatctgtggtgtatgcccactccaaagagctcattaccgcctggtacattggctttcttgtcctaatcttctcttcttttctagtgtacctggtggaaaaagacgccaataaagaattttcaacttacgctgatgctctgtggtggggcactatcacacttactactattggctacggagataaaacccccttgacttggctgggacgactgctgtctgcaggctttgccttgcttggcatttctttttttgccttacccgccggcattttagggagcgggtttgcccttaaagtgcaggagcagcaccgacagaaacatttcgagaagcgacggaatccagctgctaacctgatccagtgtgtgtggaggagctacgccgcagatgaaaagagcgtctctatcgcaacctggaaaccacaccttaaagccctgcacacctgtagtcccacaaaaaaggaacagggggaagcctcttcttcgcagaagctgtcgttcaaagagcgcgtgagaatggcaagtccgcgcggccaatctatcaagagtaggcaagcatcggtgggcgaccggcgatcaccatcaactgatataactgcggagggttccccaacgaaggtccagaaatcctggagcttcaacgaccggacacgattccgtccttccctgcgtcttaagtctagtcagccaaaacccgttattgacgccgataccgcactgggtacagacgacgtgtatgacgaaaaaggctgccagtgtgacgttagtgttgaagatctaacccccccactgaaaaccgtaatccgagcgatacgcataatgaaatttcacgtcgccaaacgaaaattcaaggaaactttacgcccgtatgatgtgaaggacgttattgaacagtatagcgcgggtcacttggacatgctgtgtagaatcaaaagcctgcagacaagagtcgatcagatccttggtaaaggccagattacatcagacaaaaaatctcgagaaaaaataaccgcggagcatgagaccaccgacgacttatccatgctgggccgtgtcgtcaaggtagaaaaacaggtgcaaagcatagagtcaaagctggattgcctcttagacatttaccagcaggttttgagaaaaggttccgctagtgcactggcgttagcctcattccagatacccccattcgaatgcgaacagacgagcgactatcagtcccctgtagatagcaaggacctgagtggatccgctcagaactcaggctgcctttcgagaagtacctccgcaaacattagtcgcggcttgcaatttatacttacacctaacgagttctccgctcagaccttctatgctctatcacccaccatgcacagtcaggcaactcaagttcccatcagccagagcgacggctcagccgtggcagccactaacactattgctaaccagatcaataccgccccaaaaccagccgcgcccacgactctccagatcccaccgcctctccccgctatcaaacacctgccacggccagagaccctgcatccaaacccagctggtctgcaggaatctatctcagatgtaaccacctgcttggtggcttctaaggaaaacgttcaggtcgcccagagcaatttgaccaaggatcgaagtatgagaaagagtttcgacatgggcggcgagaccctgctgagcgtgtgtcccatggtccctaaggacctggggaagtccctgtctgtccagaatctcattagatccacagaagagttgaacattcagctgagtggcagtgaatcctctgggtcacgagggagtcaggacttttatcccaagtggagggagtccaaactgttcattaccgatgaggaggttggccccgaggaaactgagacagataccttcgatgctgccccacagccagccagggaggccgcattcgcctccgattcactccgtacagggcgcagcagatcgtcacagagcatttgcaaggccggagaaagtacggacgctctcagcctgccccacgtaaaactgaaatag

SEQ ID NO: 202109 - DNA, 2799 bp, Artificial Sequence
  derived and/or modified sequence
atgcccaggcaccacgccggcggggaggagggcggggccgccggcctgtgggtgaagagcggggctgctgctgctgctgctgggggcggccgcctgggcagcggcatgaaggatgtggagagcggccggggccgggtgctgctgaacagcgctgctgcccggggagatggcctgctgctgctgggcaccagggctgccaccctgggcggcggcggcggcggcctgcgggagagcagaagaggcaagcagggcgccaggatgagcctgctgggcaagcccctgagctacaccagcagccagagctgcagaagaaatgtgaagtacagaagagtgcagaactacctgtacaacgtgctggagcggccccggggctgggccttcatctaccacgcctttgtgttcctgcctgtgtttggctgcctgatcctgagcgtcttcagcaccatccctgagcacaccaagctggccagcagctgcctgctgatcctggagtttgtgatgattgtggtgtttggcctggagttcatcatccgcatctggagcgctggctgctgctgccgctaccggggctggcagggccgcctgcgctttgccaggaagcccttctgtgtgattgacaccatcgtgctgattgccagcattgctgtggtgtctgccaagacccagggcaacatctttgccaccagcgccctgcggagcctgcgcttcctgcagatcctgaggatggtgaggatggacagaagaggaggcacctggaagctgctgggctctgtggtgtatgcccacagcaaggagctgatcacagcctggtacatcggcttcctggtgctgatcttcagcagcttcctggtgtacctggtggagaaggatgccaacaaggagttcagcacctatgcagatgccctgtggtggggcaccatcaccctgaccaccatcggctacggggacaagacccccctgacctggctgggccgcctgctgtctgctggctttgccctgctgggcatctccttctttgccctgcctgctggcatcctgggcagcggctttgccctgaaggtgcaggagcagcaccggcagaagcactttgagaagagaagaaatcctgctgccaacctgatccagtgtgtgtggaggagctatgctgctgatgagaagtctgtgtccatcgccacctggaagccccacctgaaggccctgcacacctgcagccccaccaagaaggagcagggcgaggccagcagcagccagaagctgtccttcaaggagcgggtgaggatggccagcccccggggccagagcatcaagagccggcaggcctctgtgggggacagaagaagccccagcacagacatcacagctgagggcagccccaccaaggtgcagaagtcctggagcttcaatgacaggacccgcttccggcccagcctgcggctgaagagcagccagcccaagcctgtgattgatgctgacacagccctgggcacagatgatgtgtatgatgagaagggctgccagtgtgatgtgtctgtggaggacctgaccccacccctgaagacagtcatccgggccatccgcatcatgaagttccacgtggccaagaggaagttcaaggagaccctgcggccctatgatgtgaaggatgtgattgagcagtacagcgctggccacctggacatgctgtgccgcatcaagagcctgcagaccagggtggaccagatcctgggcaagggccagatcaccagtgacaagaagagccgggagaagatcacagctgagcacgagaccacagatgacctgtccatgctgggccgggtggtgaaggtggagaagcaggtgcagagcattgagagcaagctggactgcctgctggacatctaccagcaggtgctgaggaaaggaagtgccagcgccctggccctggccagcttccagatccccccatttgaatgtgagcagaccagtgactaccagagccctgtggacagcaaggacctgagcggcagcgcccagaacagcggctgcctgagccgcagcaccagcgccaacatcagccggggcctgcagttcatcctgaccccaaatgagttcagcgcccagaccttctacgccctgagccccaccatgcacagccaggccacccaggtgcccatcagccagagtgatggcagcgctgtggccgccaccaacaccatcgccaaccagatcaacacagcccccaagccagctgcccccaccaccctgcagatccccccacccctgcctgccatcaagcacctgcccaggcctgagaccctgcaccccaacccagctggcctgcaggagagcatcagtgatgtgaccacctgcctggtggccagcaaagaaaatgtgcaggtggcccagagcaacctgaccaaggaccgctccatgaggaagagctttgacatgggcggggagaccctgctgtctgtgtgccccatggtgcccaaggacctgggcaagagcctgtctgtgcagaacctgatccgcagcacagaggagctgaacatccagctgagcggcagcgagagcagcggcagccggggcagccaggacttctaccccaagtggagggagagcaagctgttcatcacagatgaggaggtgggccctgaggagacagaaacagacacctttgatgctgccccccagcctgcccgggaggccgcctttgccagtgacagcctgaggacaggccgcagccgcagcagccagagcatctgcaaggccggggagagcacagatgccctgagcctgccccacgtgaagctgaagtag

SEQ ID NO: 202110 - DNA, 2802 bp, Artificial Sequence
  derived and/or modified sequence
atgcccaggcaccacgccggcggggaggagggcggggccgccggcctgtgggtgaagagcggggctgctgctgctgctgctgggggcggccgcctgggcagcggcatgaaggatgtggagagcggccggggccgggtgctgctgaacagcgctgctgcccggggagatggcctgctgctgctgggcaccagggctgccaccctgggcggcggcggcggcggcctgcgggagagcagaagaggcaagcagggcgccaggatgagcctgctgggcaagcccctgagctacaccagcagccagagctgcagaagaaatgtgaagtacagaagagtgcagaactacctgtacaacgtgctggagcggccccggggctgggccttcatctaccacgcctttgtgttcctgctggtgtttggctgcctgatcctgagcgtcttcagcaccatccctgagcacaccaagctggccagcagctgcctgctgatcctggagtttgtgatgattgtggtgtttggcctggagttcatcatccgcatctggagcgctggctgctgctgccgctaccggggctggcagggccgcctgcgctttgccaggaagcccttctgtgtgattgacaccatcgtgctgattgccagcattgctgtggtgtctgccaagacccagggcaacatctttgccaccagcgccctgcggagcctgcgcttcctgcagatcctgaggatggtgaggatggacagaagaggaggcacctggaagctgctgggctctgtggtgtatgcccacagcaaggagctgatcacagcctggtacatcggcttcctggtgctgatcttcagcagcttcctggtgtacctggtggagaaggatgccaacaaggagttcagcacctatgcagatgccctgtggtggggcaccatcaccctgaccaccatcggctacggggacaagacccccctgacctggctgggccgcctgctgtctgctggctttgccctgctgggcatctccttctttgccctgcctgctggcatcctgggcagcggctttgccctgaaggtgcaggagcagcaccggcagaagcactttgagaagagaagaaatcctgctgccaacctgatccagtgtgtgtggaggagctatgctgctgatgagaagtctgtgtccatcgccacctggaagccccacctgaaggccctgcacacctgcagccccaccaagcagaaccagcagggcgagagccagagctgccagaagctgtccttcaaggagcgggtgaggatggccagcccccggggccagagcatcaagagccggcaggcctctgtgggggaccggcgcagccccagcacagacatcacagctgagggcagccccaccaaggtgcagaagtcctggagcttcaatgacaggacccgcttccggcccagcctgcggctgaagagcagccagcccaagcctgtgattgatgctgacacagccctgggcacagatgatgtgtatgatgagaagggctgccagtgtgatgtgtctgtggaggacctgaccccacccctgaagacagtcatccgggccatccgcatcatgaagttccacgtggccaagaggaagttcaaggagaccctgcggccctatgatgtgaaggatgtgattgagcagtacagcgctggccacctggacatgctgtgccgcatcaagagcctgcagaccagggtggaccagatcctgggcaagggccagatcaccagtgacaagaagagccgggagaagatcacagctgagcacgagaccacagatgacctgtccatgctgggccgggtggtgaaggtggagaagcaggtgcagagcattgagagcaagctggactgcctgctggacatctaccagcaggtgctgaggaagggcagcgccagcgccctggccctggccagcttccagatccccccatttgaatgtgagcagaccagtgactaccagagccctgtggacagcaaggacctgagcggcagcgcccagaacagcggctgcctgagccgcagcaccagcgccaacatcagccggggcctgcagttcatcctgaccccaaatgagttcagcgcccagaccttctacgccctgagccccaccatgcacagccaggccacccaggtgcccatcagccagagtgatggcagcgctgtggccgccaccaacaccatcgccaaccagatcaacacagcccccaagccagctgcccccaccaccctgcagatccccccacccctgcctgccatcaagcacctgcccaggcctgagaccctgcaccccaacccagctggcctgcaggagagcatcagtgatgtgaccacctgcctggtggccagcaaagaaaatgtgcaggtggcccagagcaacctgaccaaggaccgctccatgaggaagagctttgacatgggcggggagaccctgctgtctgtgtgccccatggtgcccaaggacctgggcaagagcctgtctgtgcagaacctgatccgcagcacagaggagctgaacatccagctgagcggcagcgagagcagcggcagccggggcagccaggacttctaccccaagtggagggagagcaagctgttcatcacagatgaggaggtgggccctgaggagacagaaacagacacctttgatgctgccccccagcctgcccgggaggccgcctttgccagtgacagcctgaggacaggccgcagccgcagcagccagagcatctgcaaggccggggagagcacagatgccctgagcctgccccacgtgaagctgaagtag

SEQ ID NO: 202111 - DNA, 2799 bp, Artificial Sequence
  derived and/or modified sequence
atgcccaggcaccacgccggcggggaggagggcggggccgccggcctgtgggtgaagagcggggctgctgctgctgctgctgggggcggccgcctgggcagcggcatgaaggatgtggagagcggccggggccgggtgctgctgaacagcgctgctgcccggggagatggcctgctgctgctgggcaccagggctgccaccctgggcggcggcggcggcggcctgcgggagagcagaagaggcaagcagggcgccaggatgagcctgctgggcaagcccctgagctacaccagcagccagagctgcagaagaaatgtgaagtacagaagagtgcagaactacctgtacaacgtgctggagcggccccggggctgggccttcatctaccacgcctttgtgttcctgctggtgtttggctgcctgatcctgagcgtcttcagcaccatccctgagcacaccaagctggccagcagctgcctgctgatcctggagtttgtgatgattgtggtgtttggcctggagttcatcatccgcatctggagcgctggctgctgctgccgctaccggggctggcagggccgcctgcgctttgccaggaagcccttctgtgtgattgacaccatcgtgctgattgccagcattgctgtggtgtctgccaagacccagggcaacatctttgccaccagcgccctgcggagcctgcgcttcctgcagatcctgaggatggtgaggatggacagaagaggaggcacctggaagctgctgggctctgtggtgtatgcccacagcaaggagctgatcacagcctggtacatcggcttcctggtgctgatcttcagcagcttcctggtgtacctggtggagaaggatgccaacaaggagttcagcacctatgcagatgccctgtggtggggcaccatcaccctgaccaccatcggctacggggacaagacccccctgacctggctgggccgcctgctgtctgctggctttgccctgctgggcatctccttctttgccctgcctgctggcatcctgggcagcggctttgccctgaaggtgcaggagcagcaccggcagaagcactttgagaagagaagaaatcctgctgccaacctgatccagtgtgtgtggaggagctatgctgctgatgagaagtctgtgtccatcgccacctggaagccccacctgaaggccctgcacacctgcagccccaccaagaaggagcagggcgaggccagcagcagccagaagctgtccttcaaggagcgggtgaggatggccagcccccggggccagagcatcaagagccggcaggcctctgtgggggacagaagaagccccagcacagacatcacagctgagggcagccccaccaaggtgcagaagtcctggagcttcaatgacaggacccgcttccggcccagcctgcggctgaagagcagccagcccaagcctgtgattgatgctgacacagccctgggcacagatgatgtgtatgatgagaagggctgccagtgtgatgtgtctgtggaggacctgaccccacccctgaagacagtcatccgggccatccgcatcatgaagttccacgtggccaagaggaagttcaaggagaccctgcggccctatgatgtgaaggatgtgattgagcagtacagcgctggccacctggacatgctgtgccgcatcaagagcctgcagaccagggtggaccagatcctgggcaagggccagatcaccagtgacaagaagagccgggagaagatcacagctgagcacgagaccacagatgacctgtccatgctgggccgggtggtgaaggtggagaagcaggtgcagagcattgagagcaagctggactgcctgctggacatctaccagcaggtgctgaggaaaggaagtgccagcgccctggccctggccagcttccagatccccccatttgaatgtgagcagaccagtgactaccagagccctgtggacagcaaggacctgagcggcagcgcccagaacagcggctgcctgagccgcagcaccagcgccaacatcagccggggcctgcagttcatcctgaccccaaatgagttcagcgcccagaccttctacgccctgagccccaccatgcacagccaggccacccaggtgcccatcagccagagtgatggcagcgctgtggccgccaccaacaccatcgccaaccagatcaacacagcccccaagccagctgcccccaccaccctgcagatccccccacccctgcctgccatcaagcacctgcccaggcctgagaccctgcaccccaacccagctggcctgcaggagagcatcagtgatgtgaccacctgcctggtggccagcaaagaaaatgtgcaggtggcccagagcaacctgaccaaggaccgctccatgaggaagagctttgacatgggcggggagaccctgctgtctgtgtgccccatggtgcccaaggacctgggcaagagcctgtctgtgcagaacctgatccgcagcacagaggagctgaacatccagctgagcggcagcgagagcagcggcagccggggcagccaggacttctaccccaagtggagggagagcaagctgttcatcacagatgaggaggtgggccctgaggagacagaaacagacacctttgatgctgccccccagcctgcccgggaggccgcctttgccagtgacagcctgaggacaggccgcagccgcagcagccagagcatctgcaaggccggggagagcacagatgccctgagcctgccccacgtgaagctgaagtag

SEQ ID NO: 202112 - DNA, 2799 bp, Artificial Sequence
  derived and/or modified sequence
atgccccggcaccacgccggcggcgaggagggcggcgccgccggcctttgggttaaatctggggccgcggctgcagccgccggcggcggtcggctgggatctgggatgaaggatgtcgaatccggaagaggacgggttctcttgaactcagccgcagcaagaggcgatggcctcttgctgctgggcactagggctgcaaccttgggcggtggcggagggggcctccgggaaagccggaggggaaaacagggggcccggatgtctctgctgggaaaacccctttcctatacatctagccaaagttgccggaggaatgtcaagtatagacgcgtgcagaattatctctacaatgtattggagagaccccgcggctgggccttcatataccacgcctttgtgttcctcccggtgttcggttgcctaatactctcggtgttttcaaccatacccgagcacactaaactcgcctcatcatgccttctcatcttggaattcgttatgatagtggtgtttggactcgaatttatcattcggatctggtcggcaggatgctgctgccgatacagaggctggcaaggaaggctgaggtttgcccggaagcctttttgcgtcatagatacaatcgtgctaattgcgagcattgcagtggtctctgctaagacacagggcaacattttcgcaaccagtgctctgcgtagtctccggttcctgcaaatcctccgtatggtgaggatggatcggcgcggaggaacttggaaactcctgggctccgtggtgtatgcccacagcaaagagctaattaccgcctggtacatcggctttttggtcctgatttttagtagcttcctggtgtacctcgtcgagaaggacgccaataaagagttctccacctatgcagacgcactgtggtggggcactatcacactgaccacaattggttacggggataagacccctctgacatggctcggccgcctgctgtcagctggcttcgcccttctcgggattagtttttttgccctcccagccggtattcttgggagcggctttgcactgaaagtacaggaacagcatcggcagaagcattttgaaaaacgtaggaacccggctgccaacctcattcagtgcgtgtggaggtcttacgctgcagacgagaagagcgtcagcatcgctacttggaagccacatctcaaggctctacacacctgctcccctacgaagaaagagcaaggcgaagccagctcgtcccagaagttgtctttcaaggaacgcgtgcgtatggcctcaccacgcggccagtcaatcaagagccgacaggcgtctgtgggcgatagacgcagcccttcgaccgatattacagcggaggggtcccctaccaaggttcagaaaagttggtctttcaacgatcggacacgcttccgaccctcactgagattgaaatccagtcagcccaaaccagtgattgatgccgataccgccctgggaactgacgatgtctacgatgagaaaggttgccagtgcgatgtctccgtagaggatcttactccccccttgaagacggtcattcgcgccatccggatcatgaagtttcacgtggcaaaaaggaaatttaaggaaacattgcgcccttacgatgtgaaagatgtgatcgaacagtactccgctggccacctcgacatgctttgtcggatcaagagtctgcagactcgagtggatcagatcttaggcaaaggtcagattacttctgacaaaaaatccagagagaaaatcactgccgagcacgagactacagacgacctctcaatgctgggtcgagttgtgaaagttgagaagcaggtccagagcatagagtccaaactggactgccttctggacatctaccaacaagtcctcaggaaagggtccgccagtgccttggccctggcctcttttcaaatcccaccgtttgaatgtgaacagaccagcgactaccagtccccagtggacagcaaggatctgtctggctccgctcagaattcggggtgtctgtctcgttctacctctgcaaatatcagtcgagggctgcagttcatccttacacccaatgaattttccgcacaaaccttctacgcgctatctccaactatgcactcacaggcgacccaagttccgattagccagtccgatggaagtgctgtggccgccacaaacactattgctaaccagattaataccgctccaaaaccagctgctcctactactctgcaaattccccccccactgcctgccatcaagcatctgccacgtcccgagacattgcatcctaatcccgccgggctgcaagaatccatctctgacgtgaccacatgcctggtggcaagcaaagaaaatgtgcaggtcgcccaaagcaacctgacgaaagaccgatccatgaggaaatctttcgatatgggaggtgaaactctgttgtcggtatgcccaatggtaccaaaagacctcggaaagtctttgtcagttcagaacttaataagatcgactgaggagctgaacattcaactcagcggatcggaaagtagtggctcccgcggatcacaggatttttaccccaaatggagagaaagtaagctctttatcaccgacgaggaagttgggccagaggaaacagagactgatacctttgacgctgcgcctcagcctgcacgcgaagcagcgtttgccagtgactcactcagaaccggtcgttcccggagctcgcaatctatttgcaaagcaggggagagcacagacgccctgagccttccacatgtgaagctgaaatag

SEQ ID NO: 202113 - DNA, 2802 bp, Artificial Sequence
  derived and/or modified sequence
atgccccggcaccacgccggcggcgaggagggcggcgccgccggcctctgggtgaagagtggtgcggcggcagccgctgccgggggagggaggctgggaagcgggatgaaagatgtagaatctggacgcggcagagtgttgctgaattccgccgcggcaaggggagacggtctcttactattggggactcgagccgccacactggggggtggtggcgggggactccgggaaagccgcaggggaaagcagggagcacggatgagcctgttgggcaagccactcagctacacaagcagtcagagttgtcgccgaaacgttaaataccgccgggttcagaattacctgtataacgtgctcgaacgtcctcgagggtgggccttcatttatcatgcattcgtgttccttctggtattcgggtgccttatcttaagcgtgttcagcacgatcccagagcatacaaaactggcatcgtcctgcctgttgatcctggagttcgtcatgatcgtggtttttgggctcgagtttatcatacggatatggagcgcaggatgctgctgtcggtaccgaggttggcaggggcggctccgcttcgcccgcaaaccattttgtgtcatagacaccatagtgctgattgcgtcaattgcggtggttagcgcaaagacccaaggtaatatcttcgctacctctgctttaaggtcattaaggttcttgcagatcttgcgtatggtgaggatggatcgccggggagggacatggaagttgttgggcagcgtggtgtatgcacattccaaagaattaattaccgcatggtatatcggcttcctcgttctgattttttcaagcttccttgtatacctggtggagaaggacgctaacaaggagttttccacttatgccgatgccttatggtggggcacaatcactctgaccacaattggatatggagacaaaacaccactgacctggctgggccgattactctctgccggatttgcactgctcggaatctcatttttcgcactgcccgccggcattttgggcagtggttttgccctcaaagttcaggagcagcatagacaaaagcactttgagaaacggcgaaaccctgccgctaacctgatacagtgcgtctggcgctcttacgctgcggacgaaaaatccgtttctatcgcaacatggaaaccccacctgaaggcactgcacacctgttcccctactaaacagaaccaacagggcgagagccagagttgccagaagttatcattcaaggagagagtacgaatggcatcacccaggggtcagagcatcaagtcgaggcaggcgagtgttggagatagacggtctccaagcactgacataaccgcagagggtagtccaaccaaggtccagaagtcctggtcattcaacgaccggactcgttttcgaccgtccctgaggctgaagagttcccaacccaagccagtgattgatgccgatacagccctgggcaccgacgatgtgtacgatgagaagggatgtcagtgtgatgtttcggtcgaagatttgaccccgccgttgaagactgtgattcgcgcgatcagaataatgaagttccatgtcgctaagcgaaagttcaaggagactttgcgtccttatgacgtgaaggatgtgatcgagcagtactcggccggccatctggacatgctttgtcgaatcaagagcctgcagacaagagtagaccaaatattgggcaaggggcagattacgtcagacaaaaaatcacgcgaaaagataaccgccgaacatgaaacgaccgacgatctctcaatgttgggtcgcgtcgtcaaggtcgagaaacaggtgcaatcgatcgaatccaagctggattgtctgctggacatttaccaacaggtcctgcgcaagggatccgcgtccgctctggccctcgcctcctttcaaatacctccttttgagtgtgagcagactagtgactatcagagcccagttgactccaaggacctctctggatccgcacaaaactcaggttgccttagtagaagcacttccgccaatatctccagaggcctccaattcatccttacccccaatgaattctccgcccagacattttacgccttgagccctaccatgcattctcaggctacccaggtgcccatcagtcagagtgacggctcggcagtggcagcaaccaatacaatagcaaaccagataaacactgctcctaagcctgccgccccgacaaccttgcagattccaccccctttaccagcaatcaagcatttgccgagaccagagacgcttcacccgaacccagcaggtctgcaggagtctatttccgacgtcacgacctgcctcgtagcgagtaaggaaaacgttcaggttgctcaatcgaatctcaccaaggaccggagcatgcgcaagtcattcgatatggggggggagaccttgctttccgtgtgtccaatggtgcccaaggacctaggtaagtctctgagcgtgcagaatttaattaggagcacagaggagctcaatatccaactcagtggaagtgaatcctccgggtcaaggggctcgcaggacttctatcccaaatggcgcgaatctaagctcttcatcactgatgaggaagtgggcccggaagagaccgaaactgacacgttcgacgccgccccacagcccgccagggaagccgctttcgcgagcgactcccttcgcacgggccgctcacgcagttcgcagtccatatgtaaggctggcgagtcgacagatgctctgtccctaccgcatgtcaaattgaaatag

SEQ ID NO: 202114 - DNA, 2799 bp, Artificial Sequence
  derived and/or modified sequence
atgccccggcaccacgccggcggcgaggagggcggcgccgccggcctgtgggtaaagtccggagctgcggccgccgctgcaggcggcggcagactggggagcggaatgaaagatgtcgagagtgggcggggcagggtgctgctgaattccgcagctgcccggggtgatgggctgcttcttctggggacgagggctgctaccttaggtggtgggggtggcggactgagagaatcgcgccggggaaaacagggggctcggatgtctctgctggggaagccgctgtcttatacctcttcccagagttgccgccgcaatgtaaagtacagaagagtgcaaaattatctgtataacgttcttgagaggccacgagggtgggcctttatttatcatgcatttgtgttcttattggtgtttggctgtctgatcctttcagtcttttcaactattcccgagcacactaagttagctagctcttgtttgctgatcctcgagtttgtgatgattgtggttttcggcttggagtttatcataaggatctggagcgctgggtgttgttgtaggtacaggggttggcagggtcggcttcgcttcgcccggaaaccattttgcgtcattgacactattgtgctgatcgcctctatcgcagtagtgtccgctaaaacccaaggcaatatcttcgcaacttctgccctgcgctccctccggtttctgcagatcctcagaatggtgcgcatggaccggcgggggggtacctggaaattgttgggcagcgttgtttatgcccacagtaaagaattgattaccgcctggtatatcggcttcctcgttttgattttctccagcttcttggtgtacctggtggagaaagacgctaataaagaattctctacgtacgcagacgccctctggtggggtacaattacccttactaccatcggatatggcgataaaaccccactcacatggctcggccgattgctttccgccggctttgcattactgggaataagtttcttcgcgctgcccgctggaatacttggaagtggatttgctctgaaggtgcaggagcagcatcggcagaagcacttcgaaaagcgaaggaacccggccgccaatcttatccagtgcgtgtggcgctcatatgctgccgatgaaaaaagcgtgagcattgcaacatggaagcctcatctgaaagcactgcatacgtgtagccctacaaagaaggaacagggagaggcttctagcagccagaaactatctttcaaggagagggtccgcatggcaagtccacggggacagtctattaaatcaaggcaagctagtgtcggggaccgcaggtccccatctacagatatcacagccgaaggctctccaaccaaggtacagaagtcatggagttttaatgatcgaacccgttttagaccctccctgcgcctgaaaagcagtcagccgaaaccagtgatcgacgcggacacagccctggggacggatgacgtctacgacgagaaagggtgccagtgtgacgtcagtgtagaggatttgactccccccctgaagaccgtgatcagggccattcgcataatgaaattccatgtcgccaaacggaaattcaaggaaacactcagaccctatgatgtcaaggacgtaatagagcaatattccgccggacacctggatatgctatgccgaatcaaaagcctacagacccgcgttgaccagattctagggaagggtcaaatcacatccgataagaaatctcgggagaaaataaccgcagagcatgagaccactgatgacctgtccatgctgggcagagtcgttaaggtcgaaaagcaggtgcagtccatcgagagtaagctggattgtctactggacatctatcaacaagtgctgcgtaaagggtctgcttcagctctggcgctcgcgtccttccagattcctcctttcgagtgcgagcagacaagcgattatcagtctcctgtggatagtaaagatttaagcggctctgcccagaacagcggctgcctctcacgatctacatccgccaacatcagcagggggctccagtttatactaactcctaacgaattcagcgctcagaccttttacgctttgagccccactatgcactcccaggctactcaggttccaatttcccagagcgatgggtccgctgtggccgccaccaacaccatcgccaatcagattaacaccgcccctaagccagctgcgcctaccactctgcagatcccccccccgctcccagccatcaaacatctcccccgcccggaaaccctccaccccaatcccgcagggcttcaggagtctatctcagatgttactacgtgcctcgtcgcctcgaaggagaacgtgcaagtcgcccagtcaaacctgacaaaagacagatccatgagaaaatcttttgatatgggcggcgagactctgctatctgtgtgtcctatggtccccaaagaccttggaaagagcctatcggtacagaaccttatacggtctacggaggaattgaacatccagctgtcgggatccgagagtagtggaagcaggggatcccaggatttttacccaaagtggcgggaatccaagctgttcattacagatgaagaggtgggtcctgaggagacagagaccgatacatttgacgccgccccgcagcctgcccgtgaggctgccttcgcaagcgactcactcaggactggacggtctagatcctcccagtctatctgcaaagcaggagagtcaactgacgcactctccctgcctcatgttaagctgaaatag

SEQ ID NO: 202115 - DNA, 6566 bp, Artificial Sequence
  derived and/or modified sequence
actctatccccgggggcagtttgggaaggagggagtggtagtcgcgggaatgagggagcaagagaaaccctctcaaagtgacgccccaaacaggtccggatttagaattcgaagctaaaggctgttagaaattgggactcctcggcctcctctgcagcccctcctttcccgccccgaagcccgggcggtttgctggctgcctgcttccccgcccccggctcagaggtctctggctggcgggcgccccgtcggccgccggcttcctccttgaaacccgccggcgcacatgaggccgctgcccccgccgcaggcgctggcggccccctcgcggtgcccgtggtgatgccatgccccgccaccacgcgggaggagaggagggcggcgccgccgggctctgggtgaagagcggcgcagcggcggcggcggcgggcggggggcgcttgggcagcggcatgaaggatgtggagtccggccggggcagggtgctgctgaactcggcagccgccaggggcgacggcctgctactgctgggcacccgcgcggccacgctcggtggcggcggcggtggcctgagggagagccgccggggcaagcagggggcccggatgagcctgctggggaagccgctctcttacacgagtagccagagctgccggcgcaacgtcaagtaccggcgggtgcagaactacctgtacaacgtgctggagagaccccgcggctgggcgttcatctaccacgctttcgtttttctccctgtctttggttgcttgattttgtcagtgttttctaccatccctgagcacacaaaattggcctcaagttgcctcttgatcctggagttcgtgatgattgtcgtctttggtttggagttcatcattcgaatctggtctgcgggttgctgttgtcgatatagaggatggcaaggaagactgaggtttgctcgaaagcccttctgtgttatagataccattgttcttatcgcttcaatagcagttgtttctgcaaaaactcagggtaatatttttgccacgtctgcactcagaagtctccgtttcctacagatcctccgcatggtgcgcatggaccgaaggggaggcacttggaaattactgggttcagtggtttatgctcacagcaaggaattaatcacagcttggtacataggatttttggttcttattttttcgtctttccttgtctatctggtggaaaaggatgccaataaagagttttctacatatgcagatgctctctggtggggcacaattacattgacaactattggctatggagacaaaactcccctaacttggctgggaagattgctttctgcaggctttgcactccttggcatttctttctttgcacttcctgccggcattcttggctcaggttttgcattaaaagtacaagaacaacaccgccagaaacactttgagaaaagaaggaacccagctgccaacctcattcagtgtgtttggcgtagttacgcagctgatgagaaatctgtttccattgcaacctggaagccacacttgaaggccttgcacacctgcagccctaccaagaaagaacaaggggaagcatcaagcagtcagaagctaagttttaaggagcgagtgcgcatggctagccccaggggccagagtattaagagccgacaagcctcagtaggtgacaggaggtccccaagcaccgacatcacagccgagggcagtcccaccaaagtgcagaagagctggagcttcaacgaccgaacccgcttccggccctcgctgcgcctcaaaagttctcagccaaaaccagtgatagatgctgacacagcccttggcactgatgatgtatatgatgaaaaaggatgccagtgtgatgtatcagtggaagacctcaccccaccacttaaaactgtcattcgagctatcagaattatgaaatttcatgttgcaaaacggaagtttaaggaaacattacgtccatatgatgtaaaagatgtcattgaacaatattctgctggtcatctggacatgttgtgtagaattaaaagccttcaaacacgtgttgatcaaattcttggaaaagggcaaatcacatcagataagaagagccgagagaaaataacagcagaacatgagaccacagacgatctcagtatgctcggtcgggtggtcaaggttgaaaaacaggtacagtccatagaatccaagctggactgcctactagacatctatcaacaggtccttcggaaaggctctgcctcagccctcgctttggcttcattccagatcccaccttttgaatgtgaacagacatctgactatcaaagccctgtggatagcaaagatctttcgggttccgcacaaaacagtggctgcttatccagatcaactagtgccaacatctcgagaggcctgcagttcattctgacgccaaatgagttcagtgcccagactttctacgcgcttagccctactatgcacagtcaagcaacacaggtgccaattagtcaaagcgatggctcagcagtggcagccaccaacaccattgcaaaccaaataaatacggcacccaagccagcagccccaacaactttacagatcccacctcctctcccagccatcaagcatctgcccaggccagaaactctgcaccctaaccctgcaggcttacaggaaagcatttctgacgtcaccacctgccttgttgcctccaaggaaaatgttcaggttgcacagtcaaatctcaccaaggaccgttctatgaggaaaagctttgacatgggaggagaaactctgttgtctgtctgtcccatggtgccgaaggacttgggcaaatctttgtctgtgcaaaacctgatcaggtcgaccgaggaactgaatatacaactttcagggagtgagtcaagtggctccagaggcagccaagatttttaccccaaatggagggaatccaaattgtttataactgatgaagaggtgggtcccgaagagacagagacagacacttttgatgccgcaccgcagcctgccagggaagctgcctttgcatcagactctctaaggactggaaggtcacgatcatctcagagcatttgtaaggcaggagaaagtacagatgccctcagcttgcctcatgtcaaactgaaataagttcttcattttctttccaggcatagcagttctttagccatacatatcattgcatgaactatttcgaaagcccttctaaaaagttgaaattgcaagaatcgggaagaacatgaaaggcagtttataagcccgttaccttttaattgcatgaaaatgcatgtttagggatggctaaaattccaaggtgcatcgacattaacccactcatttagtaatgtaccttgagttaaaaagcctgagaaaccaaacacagctaatgctatggggtgtatgaatatgtcaagtttaggtcatttagaagatttgacactgtattttgaaattatgggagtaaacaccttcaaatttcaggcatttctgctttgtgactaaatacaaactacattttcaagattaggccataatgtatatttaaacacaatggctatcaacagctgctaataaggtatcaactaaagcagaattggggaataatagaaatggctgcttatttcaagatatatttgccaacccattcctattcagtcattttattattaatgtaatttgaatgtcaatttgtgtgcttttggtgatttagcgctgtggcaagcaattttgcacatcattttcatgttgttctttatgacaagaatgttcttcaattagaaaatgtgcaaataatgaaattcagggccagtgaggcaaatagactatctgacatatttgactttatgaaaacatattgcctgatggcagaatcaactttataagtggtcaacttctacacaagcgtatgaaatactggtcagtagaacagccattgtgattggactggtttctctgcaatggcgccaaccccaggcttgccaatactgcctatgtaaagggcaagtgtgagaagctattctcatttcgctgacatacaggtaggactatgggggatgggacatttgagtgggactgagataggaaaggcttgaaaagaacccagaaacaccaccaggaagttggcaaagtaaaagaaaatgacttccccctcaaagggcaatgagagggagagaaacaaaccaaaatagaagaactagactttttagaaaatgagtattgctagggaattcaactacctaatcttcccttattcttatatataagcagagaatttttgcaaggtatttattttttaatatgccctgaatgtcttttgctattatgtgtacattttgcatatgaaagtctaaaacgaaacttcctttactttttatactgtagtgaaaattttctattcttcccaagaatgttgtcccaaatctgaaattactggttcaatttcctgatataaacatttacaattagaagctagatagtactggcagagtctgcaaatcagaacacttaaatatatcatggcagcaaaaagaccaagggaaacaaaatgacaaatgtatttatcagaaagcaagcaatgctgactgcttgttagaaacccatctagctatcttaggtcaccagaacttcagccaacgtaatgacattcaaaaaaaaaggacataagagatagcatttcaattcaattaaaccctagccacaggaggactcaagaaaggaagttgtttccttggcagacataaatgctgcctccagaagtacttctccagcagccaagcagaatgagcagggttatcaagtggatgttcaaaggaagaaggaggccctgaactccaccaatcctccccagccctccccaacaggctttctccatcattgactctcccctgcttttcttcttcattaactccttattcattccctgccagtattttgcttctgaacttcaccaggccttaaccagcctccatccccaggtcaaccagttctccgctttacctaaaatgtgcttctcaaccttttagaaccttgtcccttttgataaacatggaaatttttaaagcttcctcttcgcatcccacttggattctaagacaattagaatcatttagaatctttttggctgctggaaatgtatagaagatagaggctaaattttacacttcagttaagacattgtcaatccttttaagcaattgttttcattttcaaaatacagaatgttagtaaattatgaaaatcaatttttcatcttcattcaacctgaagttgtgattcccccttgcaagaatgttgcatacacacacacacacacacacacacacacacacacacacacacacacacacacacacacacacccctccactgacctaaagccagacacctgccgtgactgggcaggctctctcccattattaacagaggaagaggagggaggcagcaactttcaggtagcactgattcttggacatactctgtcctgggtcaaaccccactggcagcaggaattctgaatgtattggggacccctccttaggcctcgttaagtctcaaacacagtacagctcacccagcattgctgacgactgaagattcagaaacaaaacctacacacagcactgaggtcttaatcatagcaaaatgtgataaaccatgttgtgaaaaacttttatacattgaagccatgaccattttgtgtctatcttactctagcacaaaaattgggggatgttaaaagatagttgtgtggaagctataaggttctgtctgtcgtgttactctctgtggaaatgagaggggtctcccatttacactaagcaaatttccattggtcaattttaatgatgtcttgaagcacaatttagctgagcactgagtagccatatgctttctgagtacaagtgtgtctgccttcttcaacatgtagggttgatcaagctaatacttaattgcaaatatcccttgtatgaggttaactaaaaaaattttgctatgtctgatctacatgtttgcattttgttcaactaaattaatatttgtagattgcaagttttgtttaaaataactttattgagtttttaagtcctgatctgttctaaggtgcctttctcacctcccattgattcagtgattctgaagttcttaatttgcaagtaaaataagtctactagagaggaggaaatcaggcacaaattgaccaattctcatgccatttgcaaagcaaaactgtaaggatgatgaaacctggctaactaaattaatggatcatttcactaaatcagatagaggaaatatcataaatattaacttgtctccctagaagctgagatttttcgccttaaatgacatggttgtgtttttgtaagagaaacttaatctaatctaataatgtgcatttaagtaagcagttctaagtcatgtatgacaatgcaattgtctgtttcctgaaaacaaataaatcgggaacaccatatccatttcaagctatcattaaagtgtaatttcctttgctctcttttactgggattatttgttttaaagtaaaacatt

SEQ ID NO: 202116 - DNA, 2802 bp, Artificial Sequence
  derived and/or modified sequence
atgccccgccaccacgcgggaggagaggagggcggcgccgccgggctctgggtgaagagcggcgcagcggcggcggcggcgggcggggggcgcttgggcagcggcatgaaggatgtggagtccggccggggcagggtgctgctgaactcggcagccgccaggggcgacggcctgctactgctgggcacccgcgcggccacgctcggtggcggcggcggtggcctgagggagagccgccggggcaagcagggggcccggatgagcctgctggggaagccgctctcttacacgagtagccagagctgccggcgcaacgtcaagtaccggcgggtgcagaactacctgtacaacgtgctggagagaccccgcggctgggcgttcatctaccacgctttcgtttttctccttgtctttggttgcttgattttgtcagtgttttctaccatccctgagcacacaaaattggcctcaagttgcctcttgatcctggagttcgtgatgattgtcgtctttggtttggagttcatcattcgaatctggtctgcgggttgctgttgtcgatatagaggatggcaaggaagactgaggtttgctcgaaagcccttctgtgttatagataccattgttcttatcgcttcaatagcagttgtttctgcaaaaactcagggtaatatttttgccacgtctgcactcagaagtctccgtttcctacagatcctccgcatggtgcgcatggaccgaaggggaggcacttggaaattactgggttcagtggtttatgctcacagcaaggaattaatcacagcttggtacataggatttttggttcttattttttcgtctttccttgtctatctggtggaaaaggatgccaataaagagttttctacatatgcagatgctctctggtggggcacaattacattgacaactattggctatggagacaaaactcccctaacttggctgggaagattgctttctgcaggctttgcactccttggcatttctttctttgcacttcctgccggcattcttggctcaggttttgcattaaaagtacaagaacaacaccgccagaaacactttgagaaaagaaggaacccagctgccaacctcattcagtgtgtttggcgtagttacgcagctgatgagaaatctgtttccattgcaacctggaagccacacttgaaggccttgcacacctgcagccctaccaagcagaaccagcaaggagaatcccagagttgtcagaagctaagttttaaggagcgagtgcgcatggctagccccaggggccagagtattaagagccgacaagcctcagtaggtgacaggaggtccccaagcaccgacatcacagccgagggcagtcccaccaaagtgcagaagagctggagcttcaacgaccgaacccgcttccggccctcgctgcgcctcaaaagttctcagccaaaaccagtgatagatgctgacacagcccttggcactgatgatgtatatgatgaaaaaggatgccagtgtgatgtatcagtggaagacctcaccccaccacttaaaactgtcattcgagctatcagaattatgaaatttcatgttgcaaaacggaagtttaaggaaacattacgtccatatgatgtaaaagatgtcattgaacaatattctgctggtcatctggacatgttgtgtagaattaaaagccttcaaacacgtgttgatcaaattcttggaaaagggcaaatcacatcagataagaagagccgagagaaaataacagcagaacatgagaccacagacgatctcagtatgctcggtcgggtggtcaaggttgaaaaacaggtacagtccatagaatccaagctggactgcctactagacatctatcaacaggtccttcggaaaggctctgcctcagccctcgctttggcttcattccagatcccaccttttgaatgtgaacagacatctgactatcaaagccctgtggatagcaaagatctttcgggttccgcacaaaacagtggctgcttatccagatcaactagtgccaacatctcgagaggcctgcagttcattctgacgccaaatgagttcagtgcccagactttctacgcgcttagccctactatgcacagtcaagcaacacaggtgccaattagtcaaagcgatggctcagcagtggcagccaccaacaccattgcaaaccaaataaatacggcacccaagccagcagccccaacaactttacagatcccacctcctctcccagccatcaagcatctgcccaggccagaaactctgcaccctaaccctgcaggcttacaggaaagcatttctgacgtcaccacctgccttgttgcctccaaggaaaatgttcaggttgcacagtcaaatctcaccaaggaccgttctatgaggaaaagctttgacatgggaggagaaactctgttgtctgtctgtcccatggtgccgaaggacttgggcaaatctttgtctgtgcaaaacctgatcaggtcgaccgaggaactgaatatacaactttcagggagtgagtcaagtggctccagaggcagccaagatttttaccccaaatggagggaatccaaattgtttataactgatgaagaggtgggtcccgaagagacagagacagacacttttgatgccgcaccgcagcctgccagggaagctgcctttgcatcagactctctaaggactggaaggtcacgatcatctcagagcatttgtaaggcaggagaaagtacagatgccctcagcttgcctcatgtcaaactgaaataa

SEQ ID NO: 202117 - DNA, 6345 bp, Artificial Sequence
  derived and/or modified sequence
gggcgccccgtcggccgccggcttcctccttgaaacccgccggcgcacatgaggccgctgcccccgccgcaggcgctggcggccccctcgcggtgcccgtggtgatgccatgccccgccaccacgcgggaggagaggagggcggcgccgccgggctctgggtgaagagcggcgcagcggcggcggcggcgggcggggggcgcttgggcagcggcatgaaggatgtggagtccggccggggcagggtgctgctgaactcggcagccgccaggggcgacggcctgctactgctgggcacccgcgcggccacgctcggtggcggcggcggtggcctgagggagagccgccggggcaagcagggggcccggatgagcctgctggggaagccgctctcttacacgagtagccagagctgccggcgcaacgtcaagtaccggcgggtgcagaactacctgtacaacgtgctggagagaccccgcggctgggcgttcatctaccacgctttcgtttttctccttgtctttggttgcttgattttgtcagtgttttctaccatccctgagcacacaaaattggcctcaagttgcctcttgatcctggagttcgtgatgattgtcgtctttggtttggagttcatcattcgaatctggtctgcgggttgctgttgtcgatatagaggatggcaaggaagactgaggtttgctcgaaagcccttctgtgttatagataccattgttcttatcgcttcaatagcagttgtttctgcaaaaactcagggtaatatttttgccacgtctgcactcagaagtctccgtttcctacagatcctccgcatggtgcgcatggaccgaaggggaggcacttggaaattactgggttcagtggtttatgctcacagcaaggaattaatcacagcttggtacataggatttttggttcttattttttcgtctttccttgtctatctggtggaaaaggatgccaataaagagttttctacatatgcagatgctctctggtggggcacaattacattgacaactattggctatggagacaaaactcccctaacttggctgggaagattgctttctgcaggctttgcactccttggcatttctttctttgcacttcctgccggcattcttggctcaggttttgcattaaaagtacaagaacaacaccgccagaaacactttgagaaaagaaggaacccagctgccaacctcattcagtgtgtttggcgtagttacgcagctgatgagaaatctgtttccattgcaacctggaagccacacttgaaggccttgcacacctgcagccctaccaagaaagaacaaggggaagcatcaagcagtcagaagctaagttttaaggagcgagtgcgcatggctagccccaggggccagagtattaagagccgacaagcctcagtaggtgacaggaggtccccaagcaccgacatcacagccgagggcagtcccaccaaagtgcagaagagctggagcttcaacgaccgaacccgcttccggccctcgctgcgcctcaaaagttctcagccaaaaccagtgatagatgctgacacagcccttggcactgatgatgtatatgatgaaaaaggatgccagtgtgatgtatcagtggaagacctcaccccaccacttaaaactgtcattcgagctatcagaattatgaaatttcatgttgcaaaacggaagtttaaggaaacattacgtccatatgatgtaaaagatgtcattgaacaatattctgctggtcatctggacatgttgtgtagaattaaaagccttcaaacacgtgttgatcaaattcttggaaaagggcaaatcacatcagataagaagagccgagagaaaataacagcagaacatgagaccacagacgatctcagtatgctcggtcgggtggtcaaggttgaaaaacaggtacagtccatagaatccaagctggactgcctactagacatctatcaacaggtccttcggaaaggctctgcctcagccctcgctttggcttcattccagatcccaccttttgaatgtgaacagacatctgactatcaaagccctgtggatagcaaagatctttcgggttccgcacaaaacagtggctgcttatccagatcaactagtgccaacatctcgagaggcctgcagttcattctgacgccaaatgagttcagtgcccagactttctacgcgcttagccctactatgcacagtcaagcaacacaggtgccaattagtcaaagcgatggctcagcagtggcagccaccaacaccattgcaaaccaaataaatacggcacccaagccagcagccccaacaactttacagatcccacctcctctcccagccatcaagcatctgcccaggccagaaactctgcaccctaaccctgcaggcttacaggaaagcatttctgacgtcaccacctgccttgttgcctccaaggaaaatgttcaggttgcacagtcaaatctcaccaaggaccgttctatgaggaaaagctttgacatgggaggagaaactctgttgtctgtctgtcccatggtgccgaaggacttgggcaaatctttgtctgtgcaaaacctgatcaggtcgaccgaggaactgaatatacaactttcagggagtgagtcaagtggctccagaggcagccaagatttttaccccaaatggagggaatccaaattgtttataactgatgaagaggtgggtcccgaagagacagagacagacacttttgatgccgcaccgcagcctgccagggaagctgcctttgcatcagactctctaaggactggaaggtcacgatcatctcagagcatttgtaaggcaggagaaagtacagatgccctcagcttgcctcatgtcaaactgaaataagttcttcattttctttccaggcatagcagttctttagccatacatatcattgcatgaactatttcgaaagcccttctaaaaagttgaaattgcaagaatcgggaagaacatgaaaggcagtttataagcccgttaccttttaattgcatgaaaatgcatgtttagggatggctaaaattccaaggtgcatcgacattaacccactcatttagtaatgtaccttgagttaaaaagcctgagaaaccaaacacagctaatgctatggggtgtatgaatatgtcaagtttaggtcatttagaagatttgacactgtattttgaaattatgggagtaaacaccttcaaatttcaggcatttctgctttgtgactaaatacaaactacattttcaagattaggccataatgtatatttaaacacaatggctatcaacagctgctaataaggtatcaactaaagcagaattggggaataatagaaatggctgcttatttcaagatatatttgccaacccattcctattcagtcattttattattaatgtaatttgaatgtcaatttgtgtgcttttggtgatttagcgctgtggcaagcaattttgcacatcattttcatgttgttctttatgacaagaatgttcttcaattagaaaatgtgcaaataatgaaattcagggccagtgaggcaaatagactatctgacatatttgactttatgaaaacatattgcctgatggcagaatcaactttataagtggtcaacttctacacaagcgtatgaaatactggtcagtagaacagccattgtgattggactggtttctctgcaatggcgccaaccccaggcttgccaatactgcctatgtaaagggcaagtgtgagaagctattctcatttcgctgacatacaggtaggactatgggggatgggacatttgagtgggactgagataggaaaggcttgaaaagaacccagaaacaccaccaggaagttggcaaagtaaaagaaaatgacttccccctcaaagggcaatgagagggagagaaacaaaccaaaatagaagaactagactttttagaaaatgagtattgctagggaattcaactacctaatcttcccttattcttatatataagcagagaatttttgcaaggtatttattttttaatatgccctgaatgtcttttgctattatgtgtacattttgcatatgaaagtctaaaacgaaacttcctttactttttatactgtagtgaaaattttctattcttcccaagaatgttgtcccaaatctgaaattactggttcaatttcctgatataaacatttacaattagaagctagatagtactggcagagtctgcaaatcagaacacttaaatatatcatggcagcaaaaagaccaagggaaacaaaatgacaaatgtatttatcagaaagcaagcaatgctgactgcttgttagaaacccatctagctatcttaggtcaccagaacttcagccaacgtaatgacattcaaaaaaaaaggacataagagatagcatttcaattcaattaaaccctagccacaggaggactcaagaaaggaagttgtttccttggcagacataaatgctgcctccagaagtacttctccagcagccaagcagaatgagcagggttatcaagtggatgttcaaaggaagaaggaggccctgaactccaccaatcctccccagccctccccaacaggctttctccatcattgactctcccctgcttttcttcttcattaactccttattcattccctgccagtattttgcttctgaacttcaccaggccttaaccagcctccatccccaggtcaaccagttctccgctttacctaaaatgtgcttctcaaccttttagaaccttgtcccttttgataaacatggaaatttttaaagcttcctcttcgcatcccacttggattctaagacaattagaatcatttagaatctttttggctgctggaaatgtatagaagatagaggctaaattttacacttcagttaagacattgtcaatccttttaagcaattgttttcattttcaaaatacagaatgttagtaaattatgaaaatcaatttttcatcttcattcaacctgaagttgtgattcccccttgcaagaatgttgcatacacacacacacacacacacacacacacacacacacacacacacacacacacacacacacacccctccactgacctaaagccagacacctgccgtgactgggcaggctctctcccattattaacagaggaagaggagggaggcagcaactttcaggtagcactgattcttggacatactctgtcctgggtcaaaccccactggcagcaggaattctgaatgtattggggacccctccttaggcctcgttaagtctcaaacacagtacagctcacccagcattgctgacgactgaagattcagaaacaaaacctacacacagcactgaggtcttaatcatagcaaaatgtgataaaccatgttgtgaaaaacttttatacattgaagccatgaccattttgtgtctatcttactctagcacaaaaattgggggatgttaaaagatagttgtgtggaagctataaggttctgtctgtcgtgttactctctgtggaaatgagaggggtctcccatttacactaagcaaatttccattggtcaattttaatgatgtcttgaagcacaatttagctgagcactgagtagccatatgctttctgagtacaagtgtgtctgccttcttcaacatgtagggttgatcaagctaatacttaattgcaaatatcccttgtatgaggttaactaaaaaaattttgctatgtctgatctacatgtttgcattttgttcaactaaattaatatttgtagattgcaagttttgtttaaaataactttattgagtttttaagtcctgatctgttctaaggtgcctttctcacctcccattgattcagtgattctgaagttcttaatttgcaagtaaaataagtctactagagaggaggaaatcaggcacaaattgaccaattctcatgccatttgcaaagcaaaactgtaaggatgatgaaacctggctaactaaattaatggatcatttcactaaatcagatagaggaaatatcataaatattaacttgtctccctagaagctgagatttttcgccttaaatgacatggttgtgtttttgtaagagaaacttaatctaatctaataatgtgcatttaagtaagcagttctaagtcatgtatgacaatgcaattgtctgtttcctgaaaacaaataaatcgggaacaccatatccatttcaagctatcattaaagtgtaatttcctttgctctcttttactgggattatttgttttaaagtaaaacattaaaaagatgtctataaa

SEQ ID NO: 202118 - DNA, 2799 bp, Artificial Sequence
  derived and/or modified sequence
atgcctcgtcaccatgcagggggtgaagaaggaggtgccgctggactgtgggtgaaatccggtgccgcagcggcagccgcaggcggtggccgtctaggatcagggatgaaggatgtagaaagcggtagaggacgtgttcttctaaattcagccgcagcccgaggtgacggcctccttttgctgggcacaagggctgctactctcggaggcggtggtggcggtctcagagagagtcgccgaggaaaacagggggctcgtatgtctctgctgggaaaacccctgagttatacctcctcacagtcctgccggagaaacgttaaatacaggcgggtacagaactatttgtacaacgtcctggagaggcccaggggctgggccttcatttaccacgccttcgtattccttcccgtcttcggatgtctaatcctctccgtcttcagcactatacccgagcacaccaaattggctagttcatgtctgctcatactggaatttgtcatgatcgtcgtatttggattagaatttattatcaggatctggtctgctggatgctgttgccggtataggggctggcagggcaggttgcgctttgcccgaaaaccattttgtgtgatagataccatagtgctcatagctagtattgcagtcgtgagtgccaagacccagggcaacatctttgcgacaagtgcactaaggtccctgcggtttctgcagattctccgcatggtgcgtatggaccgacgcggaggaacgtggaagcttctcggatctgtcgtgtacgcccattctaaggaactgatcacagcctggtatatagggttcctcgtcttgatctttagctctttcctggtgtatcttgtcgaaaaagatgctaataaagagttttccacatatgcagacgcactgtggtggggaaccattactctgacaactatcggttacggggacaagactccattaacctggcttggaaggctgctatccgcgggttttgccctgctcggcataagcttttttgctctacccgcaggaatcttaggtagtggctttgccctcaaagtgcaggagcagcaccggcagaaacacttcgagaagagacgaaatcccgctgccaaccttatccagtgcgtttggcgcagctacgcagcagatgagaaaagcgtctccatcgctacatggaagccacacctgaaagcgcttcatacttgtagccctactaagaaggaacaaggagaggcatctagctcacaaaagctcagctttaaggaacgggtcagaatggcctctccccgtggacagagtattaagtccaggcaggcttctgtgggcgacagacgatcaccgtcgaccgatatcaccgccgaggggtcaccaaccaaagttcagaagagttggtccttcaacgaccgaactcggttcagaccctcgctgaggctcaagtcctcccagcctaagcccgttatagatgcggataccgccttggggactgatgacgtctacgacgaaaaaggatgtcagtgcgatgtgtctgtagaagatctcaccccaccattaaaaacagttattcgagctattcggattatgaagtttcacgtggccaagagaaaattcaaggagacacttcgtccctacgacgtcaaagatgtcattgagcagtattccgccggacatcttgatatgttatgtagaatcaaatctctacagactcgcgtggatcagatcctgggcaaaggtcagattacctccgacaaaaagtctcgggagaagatcaccgccgagcatgagactacagatgatctgagcatgcttgggagagttgttaaggtagaaaaacaagtccaatcgattgagtctaaactcgactgtttgttggacatatatcagcaggtgcttcgcaaggggagcgcctccgctttagctctcgctagtttccagatccctccatttgagtgcgaacagaccagcgattaccaatcgcccgtagactcaaaggacctgagcggttctgctcagaacagtggctgcctgtcccggtcaacttccgctaatataagtaggggcttgcaatttatcctgacccctaacgaattcagcgctcagacgttttacgccctcagtccaactatgcacagccaggccacacaagttcccatcagccagagtgacggaagcgcagttgccgctacaaacaccattgccaatcaaataaacaccgcacccaagcctgccgcacccacgactctccagatccccccacctctacccgcaatcaaacatctgcctagacctgaaacactgcatcccaaccctgctggactccaggaatccatttccgatgttaccacatgtttagtggcttcaaaggagaatgtacaagttgcacagtcaaatttgactaaggaccgatccatgagaaaatcctttgatatgggcggtgaaacgctcctctcggtctgccctatggtgcctaaggacctgggcaagtctctttccgtgcaaaatttgatacgctcgacggaagagcttaatattcaactgtctggcagcgagagtagtggcagccgaggctcccaggacttttatccaaaatggagggagagcaagctgttcatcactgacgaggaagtggggcctgaggagaccgagactgacactttcgacgcagctccacaacccgcacgggaagccgcatttgccagcgactccttgcggacagggcgatccagatccagccagagcatttgcaaagctggtgagagcacagacgcattatcactcccccatgtaaagcttaaatag

SEQ ID NO: 202119 - DNA, 2802 bp, Artificial Sequence
  derived and/or modified sequence
atgcctcgacaccacgccggaggtgaggagggtggggctgctggcctctgggtaaaatcaggggctgctgcggcagctgctggagggggacgactgggcagcggcatgaaggacgttgagtctggcagaggcagggtgctcctgaactctgctgcagctaggggcgacggccttctgctgctaggcacaagagccgcaactctcggtgggggagggggagggctaagggagtcacgccgaggcaagcaaggcgcaagaatgtccctgctgggtaagccattaagctacacctcaagccagtcatgccggcgaaacgtcaagtaccgacgagttcagaactatttgtataacgtactggagagacccaggggctgggccttcatctatcacgcattcgtgttcctgttggttttcggatgcctgattctgagcgtgttcagtacaatccccgagcataccaaactggctagcagctgtctcctgattcttgagtttgtgatgattgtcgtgttcggactggagtttatcatccgcatctggtctgctggctgttgctgcaggtatcgagggtggcaagggagattgcgatttgcaaggaaacccttttgtgtgatcgatactatagtgctcatcgcatccatcgcagtagtgtccgctaaaactcagggaaatattttcgccacttctgcgctccgctccttgagattccttcagatactacgcatggtcaggatggacaggcggggtggtacgtggaagttattagggtccgtcgtgtatgcccactccaaagaactgataacggcctggtacatcgggttcctagtgctcatcttttctagcttcctcgtttatcttgtcgaaaaggatgcaaataaagaattttccacctatgcggacgctctgtggtggggcacgattactctgacgacgattgggtatggtgataagacccctttgacatggcttggccgactcctcagcgccggatttgccctgcttggcatcagcttcttcgctctgcccgcagggatactcggatcaggcttcgcactgaaggtgcaggagcaacatcgccaaaaacactttgaaaagaggcgcaatcccgctgccaaccttatacagtgtgtgtggcgaagctacgccgcagacgaaaaaagtgtgagcatcgctacctggaagcctcacctgaaggcccttcatacatgtagtcctactaaacaaaaccagcagggcgaatcccagtcttgtcaaaagctctccttcaaagagcgggtgagaatggcatcccctcgaggacaatccattaagtctcgacaggcctctgttggtgataggagatctccaagtacagacatcacagctgaggggtcacctacgaaagtccagaagtcttggtccttcaacgatagaaccagatttcgccctagcttgcgacttaagtcttcacagcctaagcccgttattgacgccgacacagcactcggcacagatgacgtctatgacgagaaaggctgccagtgcgacgtctccgttgaggacttaacccctcccctgaagaccgtgatacgcgcaattcggattatgaagttccatgtcgccaaaagaaaatttaaggagacactgcggccatacgacgtgaaagacgtgattgagcagtactcagcgggtcaccttgacatgctatgtcggatcaaatccctacagacacgggtcgaccagatcctaggcaaaggccagattacctcagataaaaagtcaagagaaaagatcacggccgagcatgaaacaactgacgacctgagcatgcttggcagggtcgtgaaggttgagaaacaagtacaaagcatcgaatcaaagcttgattgtttactggatatatatcagcaggtcctccggaagggatcagcctccgccttagcgctggcatctttccagattccccctttcgagtgcgagcagacatctgattatcagtctccagtggactcaaaagacctgtcaggttcagcgcagaactccgggtgtctgtccaggtctacatctgctaacatctccaggggtcttcagttcattttgacacccaacgagttttctgcacagaccttttatgccctttctcctaccatgcattcccaagccactcaagttcctatttcccagagcgatggctcagctgttgctgcgaccaacactatcgcgaatcagattaacactgcccctaagccagcggctcccactaccctccaaattccacctcccctgcctgcgataaaacatctgccccgaccagaaacattacacccgaacccagcgggtttacaagagagcatcagtgacgtgaccacctgcctggtcgcttctaaggagaatgtgcaagtggcgcaatctaacctgacgaaggatcgcagcatgcgcaagtcatttgacatggggggtgagacactcttgagcgtttgtcctatggtgccgaaggacctcgggaaaagtttgagtgtgcagaatctgattaggtccactgaggaattgaacatccagctttccgggtccgagtctagcgggagccgcggttcacaggacttctacccaaagtggagggagtccaagcttttcatcacagatgaggaagtgggccctgaagagaccgaaaccgacacctttgacgccgcacctcaacctgcaagggaggcagcatttgcttccgattctttgcgaacaggcagatctcgcagctcgcaaagcatttgcaaagctggcgaatccactgacgccctgagtcttccccacgtcaagctgaagtag

SEQ ID NO: 202120 - DNA, 2799 bp, Artificial Sequence
  derived and/or modified sequence
atgcctcgccaccacgccggaggagaggaagggggagcggcaggtctgtgggttaagtcaggggcagcagccgcagctgcagggggaggaaggttgggctccggcatgaaagatgttgagagcggcaggggaagggtcctacttaatagcgccgctgctaggggcgatgggttgctcctcctaggcactcgcgctgcaaccttagggggaggtggaggtggactacgggagtcaaggaggggcaaacaaggagccagaatgagcctcctagggaaaccgctgtcatacacctctagtcagtcttgtcgtcggaacgtaaagtatcgcagagtgcaaaattacctgtacaacgtcctggaaaggccacgcggttgggctttcatctaccacgccttcgtgttcctgttagtgtttggctgtctaatcctgagtgtcttttccactattcccgagcatacaaagctagcttcaagctgccttcttattcttgagttcgtgatgatcgtggtcttcgggttggagtttattatccgaatttggagtgccggttgttgttgtcgatacagaggttggcaggggagacttcgcttcgcccgaaagcccttttgtgttattgacaccatcgtcttgatcgcgtccatcgctgtggtctcagcaaagactcagggaaacatttttgccacttctgcacttcggtctctccgatttctgcagatcctccgcatggtaaggatggatcggagagggggaacctggaagctactgggctccgtcgtgtacgcccatagcaaggagctcattacagcttggtatattggattcctcgtgttgatcttttcatcattcctggtgtatcttgtcgaaaaggacgctaacaaggagttttccacttacgctgacgctctgtggtggggtaccatcactctaacaaccattggatacggcgacaagacccccctgacttggcttgggaggctgcttagcgctggctttgctctgctgggaatcagcttttttgccctgcccgcaggtattctcggcagtgggttcgctctcaaagtgcaagagcagcaccggcagaagcactttgagaagcgaagaaatccagctgccaacctgattcagtgtgtctggcggagctacgcagcggatgagaagagtgtttctatcgcaacctggaagccccacctaaaggcgctgcacacttgctcacccacaaagaaagaacagggtgaagcttcttcctcccagaagcttagttttaaagagcgagtccgaatggccagcccacgcggacagagcattaagtctcgccaggcctccgtaggcgataggcgctcacccagcactgatattactgccgaaggctctccaactaaagtacaaaagtcctggagcttcaacgaccgcactaggtttcggccttctttgcgcctcaagagttcacagcccaagcccgtcatcgacgccgacacggcgcttggtacagatgatgtgtacgacgagaagggttgccagtgcgacgtgagcgtggaggatctgactccacccctgaagacagtgatccgagctatcagaataatgaagttccacgtcgctaagagaaaatttaaggaaacactccggccttacgacgtgaaggacgttatagaacagtatagcgccggacacctcgacatgttgtgccgtataaagagcctccagacacgggtggaccagatcctgggcaagggtcaaattacctccgacaaaaagagcagggagaagattaccgctgaacatgagactaccgacgatctttccatgctaggacgggttgttaaagtggagaaacaagtgcagtctatcgaatcgaagcttgactgtcttctcgacatttaccagcaggtcctccggaaaggctccgctagcgctctggcccttgcctctttccagattccaccgttcgagtgcgagcagacctcagactaccagtcaccagtcgactcaaaggacctatcaggctcagcccaaaactccggttgtctctctagaagtaccagcgctaatatcagccggggactgcagttcatccttactcctaatgaattctctgctcaaaccttctacgccctgagtccgacaatgcatagccaggcgacccaggtgcctatctcacagagtgacgggtcagccgttgcggcaaccaatactattgctaatcagattaacacagcccctaagcctgcagctcctaccactcttcaaattcctcctccattgcccgcaatcaagcacctgcctaggcccgaaaccctgcatccaaaccccgctggcctgcaggaatccatctccgacgtcacgacttgcctggtggcttccaaggagaacgtccaggtcgcccaatcgaatctgaccaaagacagatccatgagaaagtcatttgatatgggtggcgagacattgctgagcgtctgcccgatggttcccaaggacctgggcaaaagtctgagtgtgcagaacctgatccggagtaccgaggaactcaacatccagttatccggctcggagtccagcggttctcggggttctcaggatttttaccccaagtggagagaaagtaagctgtttattacagacgaagaagtgggcccagaagagaccgaaactgatactttcgacgccgcaccgcagccggcacgcgaggcagccttcgcctcagactcattaagaactggccgtagcaggtcaagccaatcaatctgcaaggcaggcgagtctactgacgccctttccttgccccacgtgaagcttaaatag

SEQ ID NO: 202121 - DNA, 2799 bp, Artificial Sequence
  derived and/or modified sequence
atgcccagacaccacgccggcggcgaggagggcggcgccgccggcctgtgggtgaagagcggcgccgccgccgccgccgccggcggcggcagactgggcagcggcatgaaggacgtggagagcggcagaggcagagtgctgctgaacagcgccgccgccagaggcgacggcctgctgctgctgggcaccagagccgccaccctgggcggcggcggcggcggcctgagagagagcagaagaggcaagcagggcgccagaatgagcctgctgggcaagcccctgagctacaccagcagccagagctgcagaagaaacgtgaagtacagaagagtgcagaactacctgtacaacgtgctggagagacccagaggctgggccttcatctaccacgccttcgtgttcctgcccgtgttcggctgcctgatcctgagcgtgttcagcaccatccccgagcacaccaagctggccagcagctgcctgctgatcctggagttcgtgatgatcgtggtgttcggcctggagttcatcatcagaatctggagcgccggctgctgctgcagatacagaggctggcagggcagactgagattcgccagaaagcccttctgcgtgatcgacaccatcgtgctgatcgccagcatcgccgtggtgagcgccaagacccagggcaacatcttcgccaccagcgccctgagaagcctgagattcctgcagatcctgagaatggtgagaatggacagaagaggcggcacctggaagctgctgggcagcgtggtgtacgcccacagcaaggagctgatcaccgcctggtacatcggcttcctggtgctgatcttcagcagcttcctggtgtacctggtggagaaggacgccaacaaggagttcagcacctacgccgacgccctgtggtggggcaccatcaccctgaccaccatcggctacggcgacaagacccccctgacctggctgggcagactgctgagcgccggcttcgccctgctgggcatcagcttcttcgccctgcccgccggcatcctgggcagcggcttcgccctgaaggtgcaggagcagcacagacagaagcacttcgagaagagaagaaaccccgccgccaacctgatccagtgcgtgtggagaagctacgccgccgacgagaagagcgtgagcatcgccacctggaagccccacctgaaggccctgcacacctgcagccccaccaagaaggagcagggcgaggccagcagcagccagaagctgagcttcaaggagagagtgagaatggccagccccagaggccagagcatcaagagcagacaggccagcgtgggcgacagaagaagccccagcaccgacatcaccgccgagggcagccccaccaaggtgcagaagagctggagcttcaacgacagaaccagattcagacccagcctgagactgaagagcagccagcccaagcccgtgatcgacgccgacaccgccctgggcaccgacgacgtgtacgacgagaagggctgccagtgcgacgtgagcgtggaggacctgaccccccccctgaagaccgtgatcagagccatcagaatcatgaagttccacgtggccaagagaaagttcaaggagaccctgagaccctacgacgtgaaggacgtgatcgagcagtacagcgccggccacctggacatgctgtgcagaatcaagagcctgcagaccagagtggaccagatcctgggcaagggccagatcaccagcgacaagaagagcagagagaagatcaccgccgagcacgagaccaccgacgacctgagcatgctgggcagagtggtgaaggtggagaagcaggtgcagagcatcgagagcaagctggactgcctgctggacatctaccagcaggtgctgagaaagggcagcgccagcgccctggccctggccagcttccagatcccccccttcgagtgcgagcagaccagcgactaccagagccccgtggacagcaaggacctgagcggcagcgcccagaacagcggctgcctgagcagaagcaccagcgccaacatcagcagaggcctgcagttcatcctgacccccaacgagttcagcgcccagaccttctacgccctgagccccaccatgcacagccaggccacccaggtgcccatcagccagagcgacggcagcgccgtggccgccaccaacaccatcgccaaccagatcaacaccgcccccaagcccgccgcccccaccaccctgcagatccccccccccctgcccgccatcaagcacctgcccagacccgagaccctgcaccccaaccccgccggcctgcaggagagcatcagcgacgtgaccacctgcctggtggccagcaaggagaacgtgcaggtggcccagagcaacctgaccaaggacagaagcatgagaaagagcttcgacatgggcggcgagaccctgctgagcgtgtgccccatggtgcccaaggacctgggcaagagcctgagcgtgcagaacctgatcagaagcaccgaggagctgaacatccagctgagcggcagcgagagcagcggcagcagaggcagccaggacttctaccccaagtggagagagagcaagctgttcatcaccgacgaggaggtgggccccgaggagaccgagaccgacaccttcgacgccgccccccagcccgccagagaggccgccttcgccagcgacagcctgagaaccggcagaagcagaagcagccagagcatctgcaaggccggcgagagcaccgacgccctgagcctgccccacgtgaagctgaagtag

SEQ ID NO: 202122 - DNA, 2802 bp, Artificial Sequence
  derived and/or modified sequence
atgcccagacaccacgccggcggcgaggagggcggcgccgccggcctgtgggtgaagagcggcgccgccgccgccgccgccggcggcggcagactgggcagcggcatgaaggacgtggagagcggcagaggcagagtgctgctgaacagcgccgccgccagaggcgacggcctgctgctgctgggcaccagagccgccaccctgggcggcggcggcggcggcctgagagagagcagaagaggcaagcagggcgccagaatgagcctgctgggcaagcccctgagctacaccagcagccagagctgcagaagaaacgtgaagtacagaagagtgcagaactacctgtacaacgtgctggagagacccagaggctgggccttcatctaccacgccttcgtgttcctgctggtgttcggctgcctgatcctgagcgtgttcagcaccatccccgagcacaccaagctggccagcagctgcctgctgatcctggagttcgtgatgatcgtggtgttcggcctggagttcatcatcagaatctggagcgccggctgctgctgcagatacagaggctggcagggcagactgagattcgccagaaagcccttctgcgtgatcgacaccatcgtgctgatcgccagcatcgccgtggtgagcgccaagacccagggcaacatcttcgccaccagcgccctgagaagcctgagattcctgcagatcctgagaatggtgagaatggacagaagaggcggcacctggaagctgctgggcagcgtggtgtacgcccacagcaaggagctgatcaccgcctggtacatcggcttcctggtgctgatcttcagcagcttcctggtgtacctggtggagaaggacgccaacaaggagttcagcacctacgccgacgccctgtggtggggcaccatcaccctgaccaccatcggctacggcgacaagacccccctgacctggctgggcagactgctgagcgccggcttcgccctgctgggcatcagcttcttcgccctgcccgccggcatcctgggcagcggcttcgccctgaaggtgcaggagcagcacagacagaagcacttcgagaagagaagaaaccccgccgccaacctgatccagtgcgtgtggagaagctacgccgccgacgagaagagcgtgagcatcgccacctggaagccccacctgaaggccctgcacacctgcagccccaccaagcagaaccagcagggcgagagccagagctgccagaagctgagcttcaaggagagagtgagaatggccagccccagaggccagagcatcaagagcagacaggccagcgtgggcgacagaagaagccccagcaccgacatcaccgccgagggcagccccaccaaggtgcagaagagctggagcttcaacgacagaaccagattcagacccagcctgagactgaagagcagccagcccaagcccgtgatcgacgccgacaccgccctgggcaccgacgacgtgtacgacgagaagggctgccagtgcgacgtgagcgtggaggacctgaccccccccctgaagaccgtgatcagagccatcagaatcatgaagttccacgtggccaagagaaagttcaaggagaccctgagaccctacgacgtgaaggacgtgatcgagcagtacagcgccggccacctggacatgctgtgcagaatcaagagcctgcagaccagagtggaccagatcctgggcaagggccagatcaccagcgacaagaagagcagagagaagatcaccgccgagcacgagaccaccgacgacctgagcatgctgggcagagtggtgaaggtggagaagcaggtgcagagcatcgagagcaagctggactgcctgctggacatctaccagcaggtgctgagaaagggcagcgccagcgccctggccctggccagcttccagatcccccccttcgagtgcgagcagaccagcgactaccagagccccgtggacagcaaggacctgagcggcagcgcccagaacagcggctgcctgagcagaagcaccagcgccaacatcagcagaggcctgcagttcatcctgacccccaacgagttcagcgcccagaccttctacgccctgagccccaccatgcacagccaggccacccaggtgcccatcagccagagcgacggcagcgccgtggccgccaccaacaccatcgccaaccagatcaacaccgcccccaagcccgccgcccccaccaccctgcagatccccccccccctgcccgccatcaagcacctgcccagacccgagaccctgcaccccaaccccgccggcctgcaggagagcatcagcgacgtgaccacctgcctggtggccagcaaggagaacgtgcaggtggcccagagcaacctgaccaaggacagaagcatgagaaagagcttcgacatgggcggcgagaccctgctgagcgtgtgccccatggtgcccaaggacctgggcaagagcctgagcgtgcagaacctgatcagaagcaccgaggagctgaacatccagctgagcggcagcgagagcagcggcagcagaggcagccaggacttctaccccaagtggagagagagcaagctgttcatcaccgacgaggaggtgggccccgaggagaccgagaccgacaccttcgacgccgccccccagcccgccagagaggccgccttcgccagcgacagcctgagaaccggcagaagcagaagcagccagagcatctgcaaggccggcgagagcaccgacgccctgagcctgccccacgtgaagctgaagtag

SEQ ID NO: 202123 - DNA, 2799 bp, Artificial Sequence
  derived and/or modified sequence
atgcccagacaccacgccggcggcgaggagggcggcgccgccggcctgtgggtgaagagcggcgccgccgccgccgccgccggcggcggcagactgggcagcggcatgaaggacgtggagagcggcagaggcagagtgctgctgaacagcgccgccgccagaggcgacggcctgctgctgctgggcaccagagccgccaccctgggcggcggcggcggcggcctgagagagagcagaagaggcaagcagggcgccagaatgagcctgctgggcaagcccctgagctacaccagcagccagagctgcagaagaaacgtgaagtacagaagagtgcagaactacctgtacaacgtgctggagagacccagaggctgggccttcatctaccacgccttcgtgttcctgctggtgttcggctgcctgatcctgagcgtgttcagcaccatccccgagcacaccaagctggccagcagctgcctgctgatcctggagttcgtgatgatcgtggtgttcggcctggagttcatcatcagaatctggagcgccggctgctgctgcagatacagaggctggcagggcagactgagattcgccagaaagcccttctgcgtgatcgacaccatcgtgctgatcgccagcatcgccgtggtgagcgccaagacccagggcaacatcttcgccaccagcgccctgagaagcctgagattcctgcagatcctgagaatggtgagaatggacagaagaggcggcacctggaagctgctgggcagcgtggtgtacgcccacagcaaggagctgatcaccgcctggtacatcggcttcctggtgctgatcttcagcagcttcctggtgtacctggtggagaaggacgccaacaaggagttcagcacctacgccgacgccctgtggtggggcaccatcaccctgaccaccatcggctacggcgacaagacccccctgacctggctgggcagactgctgagcgccggcttcgccctgctgggcatcagcttcttcgccctgcccgccggcatcctgggcagcggcttcgccctgaaggtgcaggagcagcacagacagaagcacttcgagaagagaagaaaccccgccgccaacctgatccagtgcgtgtggagaagctacgccgccgacgagaagagcgtgagcatcgccacctggaagccccacctgaaggccctgcacacctgcagccccaccaagaaggagcagggcgaggccagcagcagccagaagctgagcttcaaggagagagtgagaatggccagccccagaggccagagcatcaagagcagacaggccagcgtgggcgacagaagaagccccagcaccgacatcaccgccgagggcagccccaccaaggtgcagaagagctggagcttcaacgacagaaccagattcagacccagcctgagactgaagagcagccagcccaagcccgtgatcgacgccgacaccgccctgggcaccgacgacgtgtacgacgagaagggctgccagtgcgacgtgagcgtggaggacctgaccccccccctgaagaccgtgatcagagccatcagaatcatgaagttccacgtggccaagagaaagttcaaggagaccctgagaccctacgacgtgaaggacgtgatcgagcagtacagcgccggccacctggacatgctgtgcagaatcaagagcctgcagaccagagtggaccagatcctgggcaagggccagatcaccagcgacaagaagagcagagagaagatcaccgccgagcacgagaccaccgacgacctgagcatgctgggcagagtggtgaaggtggagaagcaggtgcagagcatcgagagcaagctggactgcctgctggacatctaccagcaggtgctgagaaagggcagcgccagcgccctggccctggccagcttccagatcccccccttcgagtgcgagcagaccagcgactaccagagccccgtggacagcaaggacctgagcggcagcgcccagaacagcggctgcctgagcagaagcaccagcgccaacatcagcagaggcctgcagttcatcctgacccccaacgagttcagcgcccagaccttctacgccctgagccccaccatgcacagccaggccacccaggtgcccatcagccagagcgacggcagcgccgtggccgccaccaacaccatcgccaaccagatcaacaccgcccccaagcccgccgcccccaccaccctgcagatccccccccccctgcccgccatcaagcacctgcccagacccgagaccctgcaccccaaccccgccggcctgcaggagagcatcagcgacgtgaccacctgcctggtggccagcaaggagaacgtgcaggtggcccagagcaacctgaccaaggacagaagcatgagaaagagcttcgacatgggcggcgagaccctgctgagcgtgtgccccatggtgcccaaggacctgggcaagagcctgagcgtgcagaacctgatcagaagcaccgaggagctgaacatccagctgagcggcagcgagagcagcggcagcagaggcagccaggacttctaccccaagtggagagagagcaagctgttcatcaccgacgaggaggtgggccccgaggagaccgagaccgacaccttcgacgccgccccccagcccgccagagaggccgccttcgccagcgacagcctgagaaccggcagaagcagaagcagccagagcatctgcaaggccggcgagagcaccgacgccctgagcctgccccacgtgaagctgaagtag

SEQ ID NO: 202124 - protein, 748 aa, Artificial Sequence
  derived and/or modified sequence
MDQHQHLNKTAESASSEKKKTRRCNGFKMFLAALSFSYIAKALGGIIMKISITQIERRFDISSSLAGLIDGSFEIGNLLVIVFVSYFGSKLHRPKLIGIGCLLMGTGSILTSLPHFFMGYYRYSKETHINPSENSTSSLSTCLINQTLSFNGTSPEIVEKDCVKESGSHMWIYVFMGNMLRGIGETPIVPLGISYIDDFAKEGHSSLYLGSLNAIGMIGPVIGFALGSLFAKMYVDIGYVDLSTIRITPKDSRWVGAWWLGFLVSGLFSIISSIPFFFLPKNPNKPQKERKISLSLHVLKTNDDRNQTANLTNQGKNVTKNVTGFFQSLKSILTNPLYVIFLLLTLLQVSSFIGSFTYVFKYMEQQYGQSASHANFLLGIITIPTVATGMFLGGFIIKKFKLSLVGIAKFSFLTSMISFLFQLLYFPLICESKSVAGLTLTYDGNNSVASHVDVPLSYCNSECNCDESQWEPVCGNNGITYLSPCLAGCKSSSGIKKHTVFYNCSCVEVTGLQNRNYSAHLGECPRDNTCTRKFFIYVAIQVINSLFSATGGTTFILLTVKIVQPELKALAMGFQSMVIRTLGGILAPIYFGALIDKTCMKWSTNSCGAQGACRIYNSVFFGIVQPELKALAIGFHSMIMRSLGGILVPIYFGALIDTTCMKWSTNSCGARGACRIYNSTYLGRAFFGLKVALIFPVLVLLTVFIFVVRKKSHGKDTKVLENERQVMDEANLEFLNDSEHFVPSAEEQ

SEQ ID NO: 202125 - protein, 702 aa, Artificial Sequence
  derived and/or modified sequence
MDQHQHLNKTAESASSEKKKTRRCNGFKMFLAALSFSYIAKALGGIIMKISITQIERRFDISSSLAGLIDGSFEIGNLLVIVFVSYFGSKLHRPKLIGIGCLLMGTGSILTSLPHFFMGYYRYSKETHINPSENSTSSLSTCLINQTLSFNGTSPEIVEKDCVKESGSHMWIYVFMGNMLRGIGETPIVPLGISYIDDFAKEGHSSLYLGSLNAIGMIGPVIGFALGSLFAKMYVDIGYVDLSTIRITPKDSRWVGAWWLGFLVSGLFSIISSIPFFFLPKNPNKPQKERKISLSLHVLKTNDDRNQTANLTNQGKNVTKNVTGFFQSLKSILTNPLYVIFLLLTLLQVSSFIGSFTYVFKYMEQQYGQSASHANFLLGIITIPTVATGMFLGGFIIKKFKLSLVGIAKFSFLTSMISFLFQLLYFPLICESKSVAGLTLTYDGNNSVASHVDVPLSYCNSECNCDESQWEPVCGNNGITYLSPCLAGCKSSSGIKKHTVFYNCSCVEVTGLQNRNYSAHLGECPRDNTCTRKFFIYVAIQVINSLFSATGGTTFILLTVKIVQPELKALAMGFQSMVIRTLGGILAPIYFGALIDKTCMKWSTNSCGAQGACRIYNSVFFGRVYLGLSIALRFPALVLYIVFIFAMKKKFQGKDTKASDNERKVMDEANLEFLNNGEHFVPSAGTDSKTCNLDMQDNAAAN

SEQ ID NO: 202126 - DNA, 2247 bp, Artificial Sequence
  derived and/or modified sequence
atggaccagcaccagcacctgaacaagaccgccgagagcgccagcagcgagaagaagaagaccagaagatgcaacggcttcaagatgttcctggccgccctgagcttcagctacatcgccaaggccctgggcggcatcatcatgaagatcagcatcacccagatcgagagaagattcgacatcagcagcagcctggccggcctgatcgacggcagcttcgagatcggcaacctgctggtgatcgtgttcgtgagctacttcggcagcaagctgcacagacccaagctgatcggcatcggctgcctgctgatgggcaccggcagcatcctgaccagcctgccccacttcttcatgggctactacagatacagcaaggagacccacatcaaccccagcgagaacagcaccagcagcctgagcacctgcctgatcaaccagaccctgagcttcaacggcaccagccccgagatcgtggagaaggactgcgtgaaggagagcggcagccacatgtggatctacgtgttcatgggcaacatgctgagaggcatcggcgagacccccatcgtgcccctgggcatcagctacatcgacgacttcgccaaggagggccacagcagcctgtacctgggcagcctgaacgccatcggcatgatcggccccgtgatcggcttcgccctgggcagcctgttcgccaagatgtacgtggacatcggctacgtggacctgagcaccatcagaatcacccccaaggacagcagatgggtgggcgcctggtggctgggcttcctggtgagcggcctgttcagcatcatcagcagcatccccttcttcttcctgcccaagaaccccaacaagccccagaaggagagaaagatcagcctgagcctgcacgtgctgaagaccaacgacgacagaaaccagaccgccaacctgaccaaccagggcaagaacgtgaccaagaacgtgaccggcttcttccagagcctgaagagcatcctgaccaaccccctgtacgtgatcttcctgctgctgaccctgctgcaggtgagcagcttcatcggcagcttcacctacgtgttcaagtacatggagcagcagtacggccagagcgccagccacgccaacttcctgctgggcatcatcaccatccccaccgtggccaccggcatgttcctgggcggcttcatcatcaagaagttcaagctgagcctggtgggcatcgccaagttcagcttcctgaccagcatgatcagcttcctgttccagctgctgtacttccccctgatctgcgagagcaagagcgtggccggcctgaccctgacctacgacggcaacaacagcgtggccagccacgtggacgtgcccctgagctactgcaacagcgagtgcaactgcgacgagagccagtgggagcccgtgtgcggcaacaacggcatcacctacctgagcccctgcctggccggctgcaagagcagcagcggcatcaagaagcacaccgtgttctacaactgcagctgcgtggaggtgaccggcctgcagaacagaaactacagcgcccacctgggcgagtgccccagagacaacacctgcaccagaaagttcttcatctacgtggccatccaggtgatcaacagcctgttcagcgccaccggcggcaccaccttcatcctgctgaccgtgaagatcgtgcagcccgagctgaaggccctggccatgggcttccagagcatggtgatcagaaccctgggcggcatcctggcccccatctacttcggcgccctgatcgacaagacctgcatgaagtggagcaccaacagctgcggcgcccagggcgcctgcagaatctacaacagcgtgttcttcggcatcgtgcagcccgagctgaaggccctggccatcggcttccacagcatgatcatgagaagcctgggcggcatcctggtgcccatctacttcggcgccctgatcgacaccacctgcatgaagtggagcaccaacagctgcggcgccagaggcgcctgcagaatctacaacagcacctacctgggcagagccttcttcggcctgaaggtggccctgatcttccccgtgctggtgctgctgaccgtgttcatcttcgtggtgagaaagaagagccacggcaaggacaccaaggtgctggagaacgagagacaggtgatggacgaggccaacctggagttcctgaacgacagcgagcacttcgtgcccagcgccgaggagcagtag

SEQ ID NO: 202127 - DNA, 2247 bp, Artificial Sequence
  derived and/or modified sequence
atggaccagcaccaacatttgaataagaccgctgaatctgcctcatcggagaaaaagaaaacgaggaggtgtaacggtttcaagatgttcctggcagccctctcttttagttacattgccaaagcactcggcggcataatcatgaagatcagcatcacacagatcgagaggcgctttgacattagcagctccctagcaggtttaattgacggctccttcgagatcggaaaccttcttgtaattgttttcgtctcgtatttcggatctaagctgcacagacctaagcttatcggaatcggttgtcttctgatggggacaggatctattctaacatctctgcctcactttttcatgggatattatcgatatagtaaagaaactcacatcaacccctccgaaaacagcacatccagcttgtccacatgtctgatcaaccagacactttctttcaatggcacctcccccgagattgtggagaaagattgcgtgaaggaaagcggttctcatatgtggatctatgtctttatggggaacatgctgcggggaataggtgagacaccaattgttccactaggcatctcatacattgacgacttcgccaaagagggccatagttccctttacctcggatccctaaatgccatcggcatgatcggccctgtcataggctttgcgctgggtagtctattcgccaaaatgtacgtggatatcggatacgttgatctgtccacaatcaggatcacacctaaggattcacgatgggtgggggcctggtggctcggctttttggtgagtggcctgtttagcattattagcagcattcccttttttttcctgcctaagaatcccaataaaccgcagaaggagcgaaagattagcctcagcctccacgtgctaaagaccaatgatgatcggaaccagactgcaaacctgaccaatcaggggaaaaatgtgacaaaaaacgtgacaggctttttccagtcactgaagtcaattctgactaaccctttgtacgtgatctttctcctactaaccctgcttcaagtgagcagctttattggctcattcacttatgtgtttaagtacatggaacagcagtatggccaatccgcgtcacacgctaatttcttacttgggatcattactatacccaccgtagctacaggcatgttcctgggggggtttatcatcaaaaagtttaagctctcacttgtgggaatcgcgaagttcagctttctgacctccatgatctcgttcctcttccagctgctctatttccccctgatttgcgaaagcaaatcagttgcaggcctgactctgacttacgatgggaacaacagcgtcgcctcacacgtggacgtgcccctctcttactgtaacagtgaatgcaattgtgacgagtcccagtgggagccagtctgtggcaacaatgggatcacatacctgagtccttgcctggctggatgtaagtcatcttctgggattaagaagcatacagttttctacaattgcagctgcgtcgaagttactgggctacagaacaggaattactccgctcatctgggtgaatgtcctcgggataatacttgtacgcgcaaatttttcatctatgtggccattcaggtgatcaattctttattcagcgcaacaggagggacgacatttatcctcctgacggtcaagatagtgcaacccgagttaaaagcgctggccatgggtttccagagcatggttattcggactctaggcggaatcctcgcgcccatctactttggcgccctgatagacaagacatgcatgaaatggtctaccaattcttgcggggcacagggcgcctgtcgcatctataactcagtattttttgggattgttcagcctgagctgaaagctctggcaatcgggttccatagtatgattatgaggtcattaggtggaattttggtacccatctacttcggggcccttatcgataccacctgtatgaaatggtccacaaatagctgtggggccaggggagcttgtaggatctataacagcacctacctcgggcgggccttcttcggtcttaaagttgcactcatatttcccgtcctggtcctcctgactgtgttcatttttgtagttcgaaagaagtcacacggcaaggacaccaaggtgctcgaaaatgaacggcaggtaatggatgaagccaatctggagttccttaatgacagcgagcactttgtgccatctgctgaagaacagtag

SEQ ID NO: 202128 - DNA, 2247 bp, Artificial Sequence
  derived and/or modified sequence
atggaccagcaccagcacctgaacaagacagctgagagcgccagcagcgagaagaagaagacccggcgctgcaatggcttcaagatgttcctggccgccctgtccttctcctacatcgccaaggccctgggcggcatcatcatgaagatcagcatcacccagattgaaagaagatttgacatcagcagcagcctggccggcctgattgatggcagctttgaaattggcaacctgctggtgattgtgtttgtgtcctacttcggcagcaagctgcaccggcccaagctgattggaattggctgcctgctgatgggcaccggcagcatcctgaccagcctgccccacttcttcatgggctactaccgctacagcaaggagacccacatcaaccccagcgagaacagcaccagcagcctgagcacctgcctgatcaaccagaccctgtccttcaacggcaccagccctgagatcgtggagaaggactgtgtgaaggagagcggcagccacatgtggatctacgtgttcatgggcaacatgctgcggggcattggagagacccccatcgtgcccctgggcatctcctacattgatgactttgccaaggagggccacagcagcctgtacctgggcagcctgaatgccatcggcatgattggccctgtgattggatttgccctgggcagcctgtttgccaagatgtatgtggacatcggctacgtggacctgagcaccatccgcatcacccccaaggacagccgctgggtgggcgcctggtggctgggcttcctggtgtctggcctcttcagcatcatcagcagcatccccttcttcttcctgcccaagaaccccaacaagccccagaaggagaggaagatcagcctgagcctgcacgtgctgaagaccaatgatgacaggaaccagacagccaacctgaccaaccagggcaagaatgtgaccaagaatgtgacaggcttcttccagagcctgaagagcatcctgaccaaccccctgtatgtgatcttcctgctgctgaccctgctgcaggtgtcctccttcatcggcagcttcacctacgtgttcaagtacatggagcagcagtatggccagagcgccagccacgccaacttcctgctgggcatcatcaccatccccaccgtggccaccggcatgttcctgggcggcttcatcatcaagaagttcaagctgagcctggtgggcatcgccaagttctccttcctgacctccatgatctccttcctgttccagctgctgtacttccccctcatctgtgagagcaagtctgtggccggcctgaccctgacctatgatggcaacaacagcgtggccagccacgtggatgtgcccctgagctactgcaacagcgagtgcaactgtgatgagagccagtgggagcctgtgtgtggcaacaacggcatcacctacctgagcccctgcctggccggctgcaagagcagcagcggcatcaagaagcacacagtgttctacaactgcagctgtgtggaggtgacaggcctgcagaacagaaactacagcgcccacctgggagaatgtccccgggacaacacctgcaccaggaagttcttcatctacgtggccatccaggtgatcaacagcctcttcagcgccaccggcggcaccaccttcatcctgctgactgtgaagatcgtgcagcctgagctgaaggccctggccatgggcttccagagcatggtgatccgcaccctgggcggcatcctggcccccatctactttggagccctgattgacaagacctgcatgaagtggagcaccaacagctgtggggcccagggcgcctgccgcatctacaacagcgtcttctttggaattgtgcagcctgagctgaaggccctggccatcggcttccacagcatgatcatgaggagcctgggcggcatcctggtgcccatctactttggagccctgattgacaccacctgcatgaagtggagcaccaacagctgtggggcccggggggcctgccgcatctacaacagcacctacctgggccgggccttcttcggcctgaaggtggccctgatcttccctgtgctggtgctgctgaccgtcttcatctttgtggtgaggaagaagagccacggcaaggacaccaaggtgctggagaatgaaaggcaggtgatggatgaggccaacctggagttcctgaatgacagcgagcactttgtgcccagcgctgaggagcagtag

SEQ ID NO: 202129 - DNA, 2247 bp, Artificial Sequence
  derived and/or modified sequence
atggaccagcaccagcacctgaacaagaccgccgagagcgccagcagcgagaaaaagaagacaagacggtgcaacggctttaagatgttcctggccgcgctatccttctcatacatcgctaaggctttgggcgggattatcatgaagatctccattactcaaatagagcggcgctttgacatcagttcctctttggccgggctgatcgatggcagcttcgagattggaaacctgttagtcatcgtttttgtgtcttactttggctccaaattgcacaggcccaaactgatcggaattggctgccttctgatgggcacaggttcaattttgacctcactcccgcacttctttatgggatattacaggtattctaaagagacacatataaacccatccgaaaactcaaccagttcactcagtacttgcctaatcaaccagacactgtcttttaatggcacctcacccgagattgtggagaaagactgtgtgaaggagtcagggagccacatgtggatctacgtgttcatgggcaatatgctccgcggtattggcgaaacacctatcgtaccattaggcatttcctatatcgacgattttgccaaagagggtcattcttccctgtacctaggaagccttaatgcaatagggatgattgggccagtcattggctttgccctgggcagcctgtttgcaaagatgtacgttgacatcggctatgtggacctgtccaccatccgcatcacgcccaaagattctcgatgggtaggagcatggtggcttggctttctagtctctgggctgttcagcattatctctagtatcccattcttcttcctgccaaaaaatcccaataaaccacaaaaagaacgtaagatcagcttaagcctccacgttttaaagacaaacgacgacagaaaccagactgcaaacttaacaaatcaaggaaaaaacgtgactaagaacgtcacagggttctttcaatctctcaagtctatactgaccaatccactgtatgtgatctttctgttgttaacgctgcttcaagtgtcctctttcattgggtcgtttacatacgtgttcaaatatatggagcagcaatacggccagagcgcctcccatgcgaattttctgctcggaattatcaccattcccactgttgcaaccgggatgttcttaggcggattcatcatcaagaagttcaaactgtctctggtgggcattgccaagttcagtttcctcactagcatgattagctttctgttccaacttctgtatttccctttgatatgcgagtctaagagtgtagccggcttaacactgacgtacgatggaaacaatagtgtggcttctcatgtcgacgtgccgttaagttactgcaactcagaatgtaactgtgatgagtcccagtgggagcctgtgtgcggaaataacggtatcacttatctgagtccttgcctagctgggtgtaaatcgtcgagcggcattaagaaacacaccgtgttctacaactgttcgtgcgttgaggtcacaggcctccaaaaccggaattattcagctcacctgggtgagtgccccagggacaacacctgcactaggaaattctttatctatgttgctattcaagtcatcaactcccttttctctgccaccggtggcacaacctttatactcctgaccgtcaagattgtgcagcctgaactgaaggcccttgcaatgggcttccagtccatggtcattcggacattgggaggcattcttgcacccatctattttggggcactgattgataaaacttgtatgaagtggtcgaccaatagctgcggcgcccagggagcctgccggatttataacagcgtctttttcggaattgttcagcctgagctgaaagccctagctatcgggtttcacagcatgattatgcgatccctgggcggtatattagtgcccatttacttcggtgcactaatagatacgacttgcatgaaatggtccaccaattcttgtggggctcggggcgcttgcagaatctacaactccacctacctgggacgtgcatttttcgggcttaaggtggccctgatcttccccgtactggtcctgctcacagtcttcatttttgtagttcgcaaaaagtcccatggcaaagacactaaggtgttagaaaacgaacgacaggtcatggatgaagccaatctagagtttctgaacgactcagaacatttcgtgccctctgctgaagaacagtag

SEQ ID NO: 202130 - DNA, 2247 bp, Artificial Sequence
  derived and/or modified sequence
atggaccagcatcagcacctgaacaagaccgccgaaagcgcttccagtgaaaaaaaaaagacccgacggtgcaacggtttcaagatgttcctcgccgctctaagtttctcctatatcgctaaagctctgggcggaataatcatgaagatctccattacgcagatagagcgcaggttcgacatctcatcgtcactggccggtcttatcgatggatcctttgaaattggtaacttacttgtcatcgtttttgtgtcatacttcggcagcaagctgcaccggcctaagctgatagggataggctgtctgctgatgggaaccggctccattttaacaagccttccccacttcttcatgggctactaccgatactcaaaagagacccacatcaaccctagcgagaattccacctcttccttgtctacttgcctcatcaatcaaaccctgagcttcaatggaacaagtcctgagatagtggaaaaggactgcgttaaggaaagcggttcacacatgtggatttatgtctttatgggcaacatgttaagaggcataggtgaaacccccatcgtacctctcggcataagctacattgatgattttgccaaggaggggcacagctccttgtacctgggaagcctgaacgcaattggaatgattggaccggtgataggttttgctctgggaagtctgtttgctaagatgtacgtcgatatcggctacgttgatctgagcacaattcggatcacacccaaagattcccgctgggtgggcgcatggtggctagggttcctcgtgtctggcctgtttagtataatatcttcaatcccatttttctttcttcctaagaatcccaacaagccacagaaggagcgaaagatttctctgagcctacatgtgctgaagacaaacgatgaccggaatcagacggcaaacctgaccaaccaaggcaagaacgtaacaaagaacgtgaccggctttttccagtctctgaagtctatactcactaatcctctttacgtaatattcttgctgcttacactccttcaagtgagctcctttatcggatcctttacttatgtcttcaagtacatggagcaacagtacgggcagtctgcctcacacgctaattttcttctcggcataattacaatccccactgtggccaccggcatgttcctagggggattcattatcaagaaattcaaattgtctttagtgggcatagcaaagttttcgtttctcacatcaatgatctccttcctcttccaattgctctatttccccctgatctgcgagtccaaatctgtcgccggtttgaccctcacatacgatggaaataatagcgttgcgtcgcatgtcgatgtgccactgagctattgtaactccgagtgtaactgcgatgagagccagtgggaaccagtgtgcgggaataacggaatcacctacctgtctccttgtctggcaggatgtaagagctctagtggcatcaaaaaacacactgtgttctataactgttcctgtgtcgaagttaccggccttcagaaccggaactattcagcgcacctcggagagtgcccccgagataacacttgtaccagaaaattctttatttatgtggcaatccaagttattaattccctcttttctgccacaggcggtacaacattcatccttttaacagtaaagattgtgcagccggaactgaaagccctcgctatgggttttcagagcatggtgatacgcaccttaggcggtatcctggcccctatctacttcggagctctcattgataagacttgtatgaagtggagtaccaactcctgtggggcacagggcgcatgcaggatctataattcagtgttctttggcatcgtccagccggaactaaaagcactggccatcggcttccatagcatgatcatgagaagcctgggaggcatcctggtccctatttatttcggagccttgatcgacaccacctgcatgaagtggtctaccaactcttgcggagcccgtggcgcttgccgcatctataattccacttatcttggccgagccttcttcggactgaaggtcgctctcatattcccagttctcgtgttgctgaccgtgtttatctttgtggtacggaagaagagtcacgggaaagacactaaagttctggagaatgagaggcaggtgatggacgaagccaacctggaatttctcaatgattccgagcatttcgtcccctcagccgaggagcagtag

SEQ ID NO: 202131 - DNA, 2451 bp, Artificial Sequence
  derived and/or modified sequence
gtgatcatttcaaaccaagcatcagcaacaattaaaaatattcacttggtatctgtagtttaataatggaccaacatcaacatttgaataaaacagcagagtcagcatcttcagagaaaaagaaaacaagacgctgcaatggattcaagatgttcttggcagccctgtcattcagctatattgctaaagcactaggtggaatcattatgaaaatttccatcactcaaatagaaaggagatttgacatatcctcttctcttgctggtttaattgatggaagctttgaaattggaaatttgcttgtgattgtatttgtaagttactttggatctaaactacacagaccgaagttaattggaattggttgtctccttatgggaactggaagtattttgacatctttaccacatttcttcatgggatattataggtattctaaagaaacccatattaatccatcagaaaattcaacatcaagtttatcaacctgtttaattaatcaaaccttatcattcaatggaacatcacctgagatagtagaaaaagattgtgtaaaggaatctgggtcacacatgtggatctatgtcttcatggggaatatgcttcgtggcataggggaaacccccatagtaccattggggatttcatacattgatgattttgcaaaagaaggacattcttccttgtatttaggtagtttgaatgcaataggaatgattggtccagtcattggctttgcactgggatctctgtttgctaaaatgtacgtggatattggatatgtagatctgagcactatcagaataactcctaaggactctcgttgggttggagcttggtggcttggtttccttgtgtctggactattttccattatttcttccataccattttttttcttgccgaaaaatccaaataaaccacaaaaagaaagaaaaatttcactatcattgcatgtgctgaaaacaaatgatgatagaaatcaaacagctaatttgaccaaccaaggaaaaaatgttaccaaaaatgtgactggttttttccagtctttgaaaagcatccttaccaatcccctgtatgttatatttctgcttttgacattgttacaagtaagcagctttattggttcttttacttacgtctttaaatatatggagcaacagtacggtcagtctgcatctcatgctaactttttgttgggaatcataaccattcctacggttgcaactggaatgtttttaggaggatttatcattaaaaaattcaaattgtctttagttggaattgccaaattttcatttcttacttcgatgatatccttcttgtttcaacttctatatttccctctaatctgcgaaagcaaatcagttgccggcctaaccttgacctatgatggaaataattcagtggcatctcatgtagatgtaccactttcttattgcaactcagagtgcaattgtgatgaaagtcagtgggaaccagtctgtgggaacaatggaataacttacctgtcaccttgtctagcaggatgcaaatcctcaagtggtattaaaaagcatacagtgttttataactgtagttgtgtggaagtaactggtctccagaacagaaattactcagcacacttgggtgaatgcccaagagataatacttgtacaaggaaatttttcatctatgttgcaattcaagtcataaactctttgttctctgcaacaggaggtaccacatttatcttgttgactgtgaagattgttcaacctgaattgaaagcacttgcaatgggtttccagtcaatggttataagaacactaggaggaattctagctccaatatattttggggctctgattgataaaacatgtatgaagtggtccaccaacagctgtggagcacaaggggcttgtaggatatataattccgtattttttgggattgttcaacctgaattgaaagcacttgcaatcggcttccattcaatgattatgcgatcgctaggaggtattctagttccaatatattttggggctctgattgatacaacgtgtatgaagtggtccaccaacagctgtggagcacgaggggcttgtaggatatataattccacatatttgggaagagccttcttcggcttgaaggtagccctaatatttccagtacttgttttacttactgtatttatttttgttgtaaggaaaaaatcccatggaaaggataccaaagtattagaaaatgaaagacaagtaatggatgaagcaaacttagaattcttaaacgacagtgaacattttgtaccttctgctgaagaacagtaaagcatgtaattaagaggaggaaaaaaataattttgctgctgtttccaactaatgtattgattccataagacgttatttttgtggtgttctgagtcttttcactgagaattcccacattcttcacttatgatgcaacaat

SEQ ID NO: 202132 - DNA, 2109 bp, Artificial Sequence
  derived and/or modified sequence
atggaccagcaccagcacctgaacaagaccgccgagagcgccagcagcgagaagaagaagaccagaagatgcaacggcttcaagatgttcctggccgccctgagcttcagctacatcgccaaggccctgggcggcatcatcatgaagatcagcatcacccagatcgagagaagattcgacatcagcagcagcctggccggcctgatcgacggcagcttcgagatcggcaacctgctggtgatcgtgttcgtgagctacttcggcagcaagctgcacagacccaagctgatcggcatcggctgcctgctgatgggcaccggcagcatcctgaccagcctgccccacttcttcatgggctactacagatacagcaaggagacccacatcaaccccagcgagaacagcaccagcagcctgagcacctgcctgatcaaccagaccctgagcttcaacggcaccagccccgagatcgtggagaaggactgcgtgaaggagagcggcagccacatgtggatctacgtgttcatgggcaacatgctgagaggcatcggcgagacccccatcgtgcccctgggcatcagctacatcgacgacttcgccaaggagggccacagcagcctgtacctgggcagcctgaacgccatcggcatgatcggccccgtgatcggcttcgccctgggcagcctgttcgccaagatgtacgtggacatcggctacgtggacctgagcaccatcagaatcacccccaaggacagcagatgggtgggcgcctggtggctgggcttcctggtgagcggcctgttcagcatcatcagcagcatccccttcttcttcctgcccaagaaccccaacaagccccagaaggagagaaagatcagcctgagcctgcacgtgctgaagaccaacgacgacagaaaccagaccgccaacctgaccaaccagggcaagaacgtgaccaagaacgtgaccggcttcttccagagcctgaagagcatcctgaccaaccccctgtacgtgatcttcctgctgctgaccctgctgcaggtgagcagcttcatcggcagcttcacctacgtgttcaagtacatggagcagcagtacggccagagcgccagccacgccaacttcctgctgggcatcatcaccatccccaccgtggccaccggcatgttcctgggcggcttcatcatcaagaagttcaagctgagcctggtgggcatcgccaagttcagcttcctgaccagcatgatcagcttcctgttccagctgctgtacttccccctgatctgcgagagcaagagcgtggccggcctgaccctgacctacgacggcaacaacagcgtggccagccacgtggacgtgcccctgagctactgcaacagcgagtgcaactgcgacgagagccagtgggagcccgtgtgcggcaacaacggcatcacctacctgagcccctgcctggccggctgcaagagcagcagcggcatcaagaagcacaccgtgttctacaactgcagctgcgtggaggtgaccggcctgcagaacagaaactacagcgcccacctgggcgagtgccccagagacaacacctgcaccagaaagttcttcatctacgtggccatccaggtgatcaacagcctgttcagcgccaccggcggcaccaccttcatcctgctgaccgtgaagatcgtgcagcccgagctgaaggccctggccatgggcttccagagcatggtgatcagaaccctgggcggcatcctggcccccatctacttcggcgccctgatcgacaagacctgcatgaagtggagcaccaacagctgcggcgcccagggcgcctgcagaatctacaacagcgtgttcttcggcagagtgtacctgggcctgagcatcgccctgagattccccgccctggtgctgtacatcgtgttcatcttcgccatgaagaagaagttccagggcaaggacaccaaggccagcgacaacgagagaaaggtgatggacgaggccaacctggagttcctgaacaacggcgagcacttcgtgcccagcgccggcaccgacagcaagacctgcaacctggacatgcaggacaacgccgccgccaactag

SEQ ID NO: 202133 - DNA, 2109 bp, Artificial Sequence
  derived and/or modified sequence
atggatcagcatcagcatctgaataagacggcagagtccgcctctagtgaaaagaaaaagaccaggaggtgtaacgggtttaaaatgtttttggccgcactgtccttttcatatattgccaaagccctgggagggattatcatgaagatttccattacacagatcgagagacgctttgacatcagctccagcctggctgggctcattgatggctctttcgagatcggtaacctcctggtcattgtctttgtgtcttacttcggatccaaactgcacaggccaaagttgattgggatcgggtgtcttcttatggggacaggctccattcttacatctctaccccattttttcatggggtactataggtactccaaagagacgcacataaatcctagtgaaaattcaacttccagcctctcaacttgcttgatcaatcagaccctctctttcaacggaacaagccctgagattgtggaaaaagactgtgtcaaagagagcggctcccacatgtggatatatgttttcatgggcaatatgctgcgtggcatcggggaaactcctatcgttccccttggcatttcttacatcgatgacttcgcaaaagaggggcacagctctctgtatctgggctccttaaacgcgatcggtatgattggccccgtaattgggttcgctttaggatccctgtttgccaaaatgtatgtggacattggctatgtggacctgtctacaattcgcattacccccaaagatagcaggtgggttggcgcttggtggcttggatttctggtctccggtctcttcagcattatcagttctataccattcttctttcttcctaagaatccaaacaagcctcagaaggagagaaaaatctcactgtcactgcacgtgctcaagaccaacgacgatcggaaccaaaccgctaatctgaccaatcagggtaaaaatgtgaccaaaaacgtcacaggcttcttccagtctttaaagtctatccttaccaaccccctttatgttatttttctactgctgacgctactacaggtgtcttcgtttatcggatccttcacgtatgtgtttaaatacatggagcagcagtacggccaatcagcctcccacgcaaatttccttctgggcataattacgattcctaccgttgctaccggcatgtttctgggcggattcatcatcaagaaattcaaattaagccttgttggcatcgcaaaatttagcttcctcaccagcatgattagttttctgttccagctgctatactttcccctgatttgcgagagcaagtccgtcgcaggcttgaccctcacctacgatgggaacaactccgtcgcttctcacgtcgatgtgcctctgagttactgcaacagcgaatgcaactgtgatgaatctcagtgggaaccagtgtgcggtaacaatggcattacatacttatccccatgtctggcagggtgcaagtccagctctggcatcaagaaacacacagtcttctacaactgctcatgcgtcgaggtgaccggcctccagaaccgaaattattctgcccacctaggggaatgccctagggataatacatgtacaaggaagttcttcatctatgtcgctattcaagtgattaattccctgttttccgctactggggggactacatttatcctgctgaccgtgaaaatagtccagcccgagctaaaagccctcgcaatgggctttcagtcaatggtaatacggactctcggagggattctggcccccatctactttggcgcactgatcgacaaaacttgcatgaaatggtcgactaacagctgcggggctcagggcgcgtgccggatctacaacagcgtattctttgggcgcgtctacctcggactgtccatcgctctgcgattcccagcactcgtgctttatatcgtgtttatctttgcgatgaagaagaaattccagggtaaggacacaaaagctagcgataatgagcgtaaggtcatggacgaggcaaatctggagtttctgaataatggagaacatttcgtgcctagcgccggcacggactccaaaacatgcaatctggacatgcaggataacgcagcggccaactag

SEQ ID NO: 202134 - DNA, 2109 bp, Artificial Sequence
  derived and/or modified sequence
atggaccaacatcaacacctcaacaaaacggctgagagtgccagcagcgagaagaagaagactcgtcgatgtaatggattcaaaatgttcctcgccgctctgagtttctcctacatagcaaaagctctgggggggattatcatgaagatcagcattacacaaatcgagagaagatttgacatatccagttccttagccggattgatagatggttctttcgagatcgggaacctgctagtgattgtcttcgtaagctactttggctctaaattgcatcgccccaaactcatcggcatcgggtgtttactcatgggcactggatctattctgacttcactgccgcacttttttatgggatactacagatattcaaaggaaactcacattaatcccagcgagaactccaccagcagtttgtcaacttgtctgatcaaccagactcttagcttcaatggcacgtcaccagagatagttgagaaagactgtgttaaggagtcaggatcgcacatgtggatctatgttttcatgggcaatatgctgaggggaattggtgaaactcccatcgtaccactgggcatttcctatatcgacgatttcgccaaggagggccatagtagcctctacttagggtctctgaacgctatcgggatgattggacccgttattgggtttgccctgggcagtctctttgctaaaatgtatgtcgatattggttatgtcgacctcagcacaatacgaattaccccaaaagatagccgatgggtgggagcctggtggctgggttttcttgtgagcggactcttctcaatcatcagcagtatcccattctttttcctgcctaagaatcccaacaagccacagaaagaaagaaagatcagcctctcacttcacgtgttaaagactaacgacgaccggaatcagacagccaacttaactaaccaggggaagaacgtgaccaaaaacgtgaccggattcttccagtctctgaaatccatccttactaatccactatacgtcatttttctgttattaaccttgcttcaggtgtcttcctttattgggtcctttacctacgtgtttaagtacatggaacagcagtacggccagagcgccagccacgcgaattttctcctggggataatcactatcccgacagttgctactggcatgtttttggggggatttattattaaaaagtttaagctgtcgctcgtaggcatcgccaagttttccttcctgactagcatgatatcgtttctctttcagctgctgtattttcctctgatatgcgagagcaagtctgtggccggactgacgttgacctacgacggcaataattctgtggcatcccacgtggatgttcccctgtcctattgtaatagcgagtgcaattgtgatgagtcccagtgggagcccgtatgtgggaacaacggcatcacatacctcagtccatgcttggccgggtgtaaatcaagctccgggattaaaaagcacactgtcttttacaactgctcttgtgtggaagtcaccggactccaaaatagaaattactcagcccatctcggagaatgcccccgggacaatacatgtacccgcaaatttttcatctacgtcgcaatccaggtgataaatagccttttcagcgcaactggaggcaccacatttatcctgctgaccgtcaaaatcgttcaaccagaattgaaggccctggccatgggtttccaaagtatggtgattcggacactcggcggaattcttgcaccaatctacttcggcgctcttatagacaagacttgcatgaagtggagcactaatagttgcggcgcgcagggcgcttgccgtatctacaactccgtcttttttggccgggtgtatctgggactgtcgatagcgctgagatttcctgctctggtgctgtatattgtcttcattttcgccatgaaaaagaagttccagggtaaagatacaaaggcaagcgacaatgagagaaaggtgatggatgaagccaacctcgaattcctgaataacggcgaacatttcgttccttccgccgggaccgactcaaagacttgcaacctcgacatgcaagacaatgcggccgcaaactag

SEQ ID NO: 202135 - DNA, 2247 bp, Artificial Sequence
  derived and/or modified sequence
atggatcagcaccagcatctaaacaaaaccgccgagtctgcctcctctgaaaagaaaaaaacccggcggtgcaatgggttcaagatgttcttagctgcactgtcctttagttatattgccaaagccctgggcggtataattatgaaaataagtatcacacaaatagagagaagatttgacattagctcatctctggcaggactgatagatggcagcttcgaaattggcaacctgttagttattgttttcgtaagctattttgggtccaagctgcaccggccaaagttaatcgggattggatgtctacttatgggaacggggtcaatcttaacatcactgccacatttttttatgggatattatcgctattccaaggaaactcacataaatccctcagaaaatagtacgagttcactttcaacgtgcctgatcaaccagacgttgagcttcaatgggactagccctgagatcgttgaaaaagattgtgtgaaggaaagcggttcccacatgtggatctacgttttcatgggaaacatgttaagaggaattggcgaaactcccatcgtgcccctgggaatttcatatattgacgatttcgccaaagaaggacactcaagcctctacttaggatcgctgaatgccatcggcatgataggaccagtgatcgggtttgccttgggatctcttttcgccaaaatgtatgtcgacattgggtacgttgacctcagtacaatcagaattacgcctaaagatagcaggtgggtcggcgcttggtggttggggtttctggtttcagggttgttttccatcatttcttctatcccatttttcttcttacccaagaatccgaacaagccacaaaaggaacggaaaatctcgctttccctgcacgtcctcaagacaaacgacgacagaaaccagactgcaaacctgacaaatcaaggtaagaatgtgaccaagaatgttaccggtttcttccaatccttgaaatcaatcctgacaaatcctctgtacgttattttcctgctgctgactctgctccaggtgagttctttcattggatcgttcacgtatgtgtttaagtacatggagcagcagtatgggcaatctgcgtcccatgcaaattttcttcttggcatcattaccatacccactgtcgccactgggatgttcctcggtggcttcataattaaaaagtttaagttatcactcgtggggatagccaagttctcctttctcacctcaatgatctctttcttattccagctgctctattttccgttaatctgtgaaagcaaatccgtggcgggtcttaccctgacatacgacggcaacaattccgtcgcctcacatgttgatgtgcccctgagctattgcaattccgagtgtaactgtgatgaatctcagtgggagccagtgtgtggcaataatggcatcacttacctgtcaccctgtctggcaggctgcaagtcctctagtgggattaagaaacacaccgttttctacaattgttcctgtgtcgaagtcaccggccttcagaatagaaactattcagcccacctgggggagtgccctcgggataacacctgtactaggaaatttttcatatatgtagccatccaggtgatcaactccctatttagtgcgactggtggaactacctttattcttctcaccgtcaagattgtgcaacccgaacttaaagctctggccatgggatttcagagcatggtgatccggaccctcgggggaatcttggctccaatctatttcggagcactcattgacaagacctgcatgaagtggtctactaactcgtgtggggcacagggagcttgccggatctacaacagcgttttctttggaattgtgcaacctgagcttaaggccctcgctatcggcttccacagcatgatcatgcggtccttgggtggtatcctagtcccgatctacttcggggctttgatcgatactacttgcatgaaatggtctaccaattcctgcggggcccggggagcttgccgtatatacaatagcacttatctgggcagggcattctttggacttaaagtagctcttattttccccgtcctggtgctgcttaccgtttttatttttgtggtacgcaaaaagtcacacgggaaagacacaaaggtgctggaaaacgaaagacaggttatggatgaggcaaatctggaattcctgaatgactcagagcacttcgttccgtctgcagaggaacagtag

SEQ ID NO: 202136 - DNA, 2109 bp, Artificial Sequence
  derived and/or modified sequence
atggaccagcaccagcacctgaacaagacagctgagagcgccagcagcgagaagaagaagacccggcgctgcaatggcttcaagatgttcctggccgccctgtccttctcctacatcgccaaggccctgggcggcatcatcatgaagatcagcatcacccagattgaaagaagatttgacatcagcagcagcctggccggcctgattgatggcagctttgaaattggcaacctgctggtgattgtgtttgtgtcctacttcggcagcaagctgcaccggcccaagctgattggaattggctgcctgctgatgggcaccggcagcatcctgaccagcctgccccacttcttcatgggctactaccgctacagcaaggagacccacatcaaccccagcgagaacagcaccagcagcctgagcacctgcctgatcaaccagaccctgtccttcaacggcaccagccctgagatcgtggagaaggactgtgtgaaggagagcggcagccacatgtggatctacgtgttcatgggcaacatgctgcggggcattggagagacccccatcgtgcccctgggcatctcctacattgatgactttgccaaggagggccacagcagcctgtacctgggcagcctgaatgccatcggcatgattggccctgtgattggatttgccctgggcagcctgtttgccaagatgtatgtggacatcggctacgtggacctgagcaccatccgcatcacccccaaggacagccgctgggtgggcgcctggtggctgggcttcctggtgtctggcctcttcagcatcatcagcagcatccccttcttcttcctgcccaagaaccccaacaagccccagaaggagaggaagatcagcctgagcctgcacgtgctgaagaccaatgatgacaggaaccagacagccaacctgaccaaccagggcaagaatgtgaccaagaatgtgacaggcttcttccagagcctgaagagcatcctgaccaaccccctgtatgtgatcttcctgctgctgaccctgctgcaggtgtcctccttcatcggcagcttcacctacgtgttcaagtacatggagcagcagtatggccagagcgccagccacgccaacttcctgctgggcatcatcaccatccccaccgtggccaccggcatgttcctgggcggcttcatcatcaagaagttcaagctgagcctggtgggcatcgccaagttctccttcctgacctccatgatctccttcctgttccagctgctgtacttccccctcatctgtgagagcaagtctgtggccggcctgaccctgacctatgatggcaacaacagcgtggccagccacgtggatgtgcccctgagctactgcaacagcgagtgcaactgtgatgagagccagtgggagcctgtgtgtggcaacaacggcatcacctacctgagcccctgcctggccggctgcaagagcagcagcggcatcaagaagcacacagtgttctacaactgcagctgtgtggaggtgacaggcctgcagaacagaaactacagcgcccacctgggagaatgtccccgggacaacacctgcaccaggaagttcttcatctacgtggccatccaggtgatcaacagcctcttcagcgccaccggcggcaccaccttcatcctgctgactgtgaagatcgtgcagcctgagctgaaggccctggccatgggcttccagagcatggtgatccgcaccctgggcggcatcctggcccccatctactttggagccctgattgacaagacctgcatgaagtggagcaccaacagctgtggggcccagggcgcctgccgcatctacaacagcgtcttcttcggccgggtgtacctgggcctgagcatcgccctgcgcttccctgccctggtgctgtacatcgtgttcatctttgccatgaagaagaagttccagggcaaggacaccaaggccagtgacaatgaaaggaaggtgatggatgaggccaacctggagttcctgaacaacggggagcactttgtgcccagcgctggaacagacagcaagacctgcaacctggacatgcaggacaatgctgctgccaactag

SEQ ID NO: 202137 - DNA, 2109 bp, Artificial Sequence
  derived and/or modified sequence
atggaccagcaccagcacctgaacaagaccgccgagagcgccagctcggagaagaaaaaaactagaagatgcaatggctttaagatgttcctggcagccttgtcattttcatatatcgccaaagcactgggagggattatcatgaagatttcaatcacacagattgaaaggagattcgacatcagcagcagtctggccggcctaattgatgggagctttgagatagggaacctgctggtaattgtgtttgttagttactttggcagtaagctccaccgtcccaagctgataggtattggatgcctgttgatgggcacaggttctattttaacctcactcccccacttcttcatggggtactaccgatatagtaaagagactcacataaacccatccgagaactctactagctcactgtctacatgtctgatcaaccagaccctgtcctttaatggtactagtccagaaatcgttgagaaggattgcgtgaaagaaagcgggagccacatgtggatttatgtgtttatgggcaatatgttgcgcggtataggtgaaacccctatcgtgccattgggcattagctacattgatgatttcgccaaggagggacactccagcctctacctgggtagtcttaatgctatcggcatgataggcccagtgataggatttgccttgggtagtctcttcgccaagatgtacgtggatatcggctatgtcgacctctctaccattagaattactccgaaggattcccgatgggtcggggcctggtggctgggcttcctggtgtctgggctgttttccattatcagctccattccctttttcttcttacccaaaaatcctaataagccccagaaggagcgaaaaatcagcctgtctctgcatgtgcttaagaccaacgacgatcggaaccagacggctaatctcacaaaccagggcaagaacgtgaccaaaaacgttacagggttttttcagagcctgaagagtatcctaaccaaccccttatatgttattttcctgctgctcacattactgcaggtgagctctttcatcgggagctttacgtatgtattcaaatacatggagcagcagtacggccagtcagcctctcacgcaaattttctgctgggcatcatcactatacctactgtggccacaggcatgttcctaggggggttcatcattaagaaattcaaactctctttagtgggaattgccaagttttcttttctgacttctatgatttcatttcttttccaacttctctactttccacttatctgcgagtctaagagcgtcgctggcctcacactgacttacgacggaaataactccgtggccagccatgtcgacgtccctctctcttattgcaacagcgagtgtaattgtgacgagtcccagtgggagccggtatgcggcaataatgggattacctatcttagcccatgcctggcagggtgtaagagcagttctggcataaaaaaacacacggtcttttacaattgctcgtgcgtagaggtcaccggactacagaaccggaactattctgctcatttaggagagtgcccacgcgataatacttgtaccagaaaattcttcatctacgtcgccatccaagtgatcaatagtttgttttccgcaaccgggggaaccacatttattcttctcaccgttaagatcgtacagccagagctaaaagccctcgcgatgggtttccaaagtatggtgataagaacactgggtgggatcctggcgccgatatactttggggccctgatagacaagacctgtatgaaatggtcaaccaacagttgtggagcacagggcgcttgccgcatctacaatagtgtgttctttgggagggtgtatttaggactgagcatcgcgctcaggtttcccgcattggtcctgtatatcgtctttattttcgccatgaagaagaagttccaaggcaaggacacaaaagcaagtgacaatgagcggaaggtgatggatgaggcgaacttggaattcctgaacaatggcgagcactttgtcccctctgcaggcactgatagcaaaacttgtaaccttgatatgcaagacaacgctgcagccaattag

SEQ ID NO: 202138 - DNA, 2109 bp, Artificial Sequence
  derived and/or modified sequence
atggaccagcaccagcacctgaacaagaccgccgagagcgccagctccgagaagaagaaaactcggcgctgcaatggatttaaaatgttcctggcagccctgagcttttcctacattgctaaagccctcgggggcattatcatgaagatttctattacacagatagagaggcgcttcgatatttcctcctcactggccggcctgattgatgggagtttcgagattggcaacctcttagtaattgttttcgtctcatattttgggagtaagctccacaggccgaagttgattggaatcggctgtctgttgatgggaacgggatccattctgacctctctgcctcatttttttatgggctattatcgatattccaaagaaacacatattaatccttccgagaactcaacctccagcctctcaacttgcctgattaatcaaacgttgtctttcaatggaacgagtcccgaaatcgtggagaaagactgcgtgaaagaaagtggatcacatatgtggatatacgtttttatgggaaatatgttgaggggtatcggggagacgcccatcgtccctcttggtatttcctacatagatgatttcgccaaagaggggcatagtagtttatatctggggtcactcaacgctatcggcatgatcggaccggtaatcggctttgccctcggaagcttgttcgccaaaatgtatgtagacattggatacgtggatctttccactatcagaattactccaaaggatagtagatgggtgggtgcttggtggctgggatttttggtgtctgggctttttagcatcatatcatccatcccattcttttttctgcctaaaaaccctaacaaaccccagaaggaacggaaaatttccctcagcttgcacgtgttgaagacaaacgatgaccggaatcagacagctaatctgacgaatcagggcaaaaatgtgacaaagaacgttacaggtttttttcagagtctcaagagtatcctcaccaacccactctatgtgattttcctcctcctgacattgcttcaagtttccagcttcattggaagctttacatacgtgtttaaatacatggagcagcaatatggacagagcgcatctcacgcaaactttctgctgggcattatcacgatcccaacagttgctaccggcatgtttttgggcggattcataattaaaaagttcaagctttccctggtgggtatcgcgaagttctccttcttgacaagtatgatctccttcctcttccagcttttgtacttccctctgatctgcgagtccaagtcagtggctgggctgacactgacgtatgacggcaataacagcgtggcctcccacgtcgacgtccctttgagttactgtaattcagaatgtaactgcgatgagtcgcagtgggagcccgtatgcggaaacaacggcattacatatctaagtccctgccttgcaggttgcaaaagtagctccggcatcaaaaagcataccgtgttctacaactgcagttgtgtggaggtgaccggcctccagaatagaaattatagcgcccacctgggcgaatgccctagggacaatacgtgtaccaggaagttttttatctacgtggccattcaggtgatcaacagtcttttcagcgccacagggggtaccacattcatattgttgactgtaaagattgtgcaacccgagctgaaggcactggccatgggctttcagtctatggtcataaggacactcggtggcatcctcgcacccatatacttcggcgctctgatcgataagacatgcatgaaatggtccactaacagttgcggcgcgcagggagcctgcagaatttataacagtgtttttttcggtagagtatacttgggccttagcatcgcccttcgctttccagcattggtactgtacatcgttttcatcttcgccatgaaaaaaaaatttcaggggaaagatacaaaggcaagcgacaacgagcgaaaggttatggacgaagctaacctggagttccttaacaacggagagcactttgttccctctgccggcacggacagcaaaacctgtaatctggatatgcaagataacgccgctgccaattag

SEQ ID NO: 202139 - DNA, 2247 bp, Artificial Sequence
  derived and/or modified sequence
atggaccagcaccagcacctgaacaagaccgccgagagcgccagctccgagaaaaaaaagaccaggagatgtaatggcttcaagatgttccttgctgctctaagtttctcatatattgccaaagcacttggagggattatcatgaaaatctcaatcactcagattgaaaggcgattcgatattagctcctcactggcaggcctcattgacggctcatttgaaattgggaatctactcgtgatcgtttttgttagttacttcgggtcgaaacttcatcgcccaaagctgatagggatcgggtgtctgctgatggggaccggaagcattctgacaagcctgccccactttttcatggggtactaccgctactcgaaggagacgcacataaatcccagcgaaaactccactagctcactaagcacttgtctcattaatcaaacactgtctttcaacggcacctctcctgagatcgtggagaaagattgcgtgaaggagtccggcagtcatatgtggatatacgtcttcatgggtaatatgctaagaggcattggggaaacacctatcgttcccttgggcatcagttacattgacgactttgctaaggaggggcactcgagcctgtatctggggagtctgaacgccattggaatgattggcccggtaatcgggttcgcacttggctccttgtttgccaaaatgtatgttgacattggctatgtagatctgtccaccatcaggattactccaaaagactcaagatgggtaggtgcctggtggttgggattccttgtgtctggcctcttcagtattatttcttctatccctttcttctttcttcccaagaatcccaataaacctcagaaggaacgcaagatctctctctctctccatgtgctgaaaacgaacgacgaccgtaatcaaaccgccaatcttacaaaccaggggaagaatgtgaccaaaaatgtgaccggatttttccagtctctgaaaagtattctgacaaaccccctgtatgtgatttttctattgcttactctgctacaagtttccagtttcataggtagctttacatacgtatttaaatacatggagcagcagtatggtcagagcgctagtcatgccaacttcctgctgggtattatcacaatcccaacagtggcaaccggaatgttcctaggcggtttcattatcaaaaaatttaaactctctttagtgggtattgcgaaattcagctttcttacaagcatgatcagctttctttttcagctgctctactttccattaatttgcgaaagtaagagtgtcgctggcctgacattgacatacgatgggaacaacagtgtcgcaagccatgttgatgtgccattgtcttactgcaattctgaatgcaattgcgatgaatcacaatgggaaccagtgtgtggaaacaatggaatcacttacctctccccatgtcttgcgggctgcaaatcatcctctggcatcaagaagcatacagtgttctataactgttcctgtgtggaagtgactgggttacagaacagaaattactctgcacatttaggagagtgccccagggataacacttgtacaagaaagttcttcatctacgttgctattcaagtcatcaactccctcttcagtgcaacaggaggaaccacttttattttgttaactgttaagattgtgcaacccgagctgaaagcacttgctatgggcttccagtccatggtgatacgtactctgggagggattttggccccaatctattttggcgctttgatcgataaaacctgcatgaagtggtctacaaacagctgtggtgctcaaggcgcctgccgaatctacaattcagtttttttcggcattgtccaacccgagctgaaggccctggccatcgggttccacagcatgatcatgagatctctgggcggtatcctcgtccctatttacttcggggcactgattgataccacctgcatgaagtggagtactaacagctgtggagcacggggcgcgtgtaggatttacaacagcacctacctcggccgcgcttttttcggactcaaagtcgccttgatatttcctgtgttggtcctgcttacagtctttatcttcgttgtccgaaagaagtctcatggcaaagacaccaaagttctagaaaatgagcggcaggtcatggatgaggctaatctggagtttctgaacgacagtgagcactttgtgcccagtgcagaagagcagtag

SEQ ID NO: 202140 - DNA, 2109 bp, Artificial Sequence
  derived and/or modified sequence
atggatcagcatcagcaccttaataaaaccgccgaatccgccagctctgaaaaaaaaaaaacacggagatgtaacgggttcaagatgttcctggccgcactgtcttttagttatattgctaaagcgctggggggaatcatcatgaagatcagcatcacacagattgagaggagattcgacatctcgtcaagcctggctggcttaattgatggctctttcgaaatcgggaatctgcttgtgatcgtgtttgtgagttattttggcagcaagctccatcgtcctaagctgataggaataggatgtctgctcatgggaacgggctccattttaacatcattgccccacttcttcatggggtattataggtactccaaggaaacccatattaacccttccgaaaattctacaagctctctaagcacttgccttatcaaccagacgctcagtttcaacgggacctccccagaaatcgtcgagaaagattgcgttaaggaatctggttctcatatgtggatctacgtgttcatgggaaacatgctgcgcggtatcggagaaacccctattgtacctttggggatatcttacattgacgactttgccaaggagggacatagttctctttacttgggatccctgaatgctattgggatgatcgggcctgttataggatttgcgctggggtcactattcgccaaaatgtacgtggatatcgggtatgtggacctgagcacgatcaggattacgcctaaagactctcgatgggtcggcgcttggtggctgggattcctggtatccggcctgttctcaataattagttctataccctttttctttctcccaaagaatcccaataaaccccagaaggaaagaaagatttccctgtctctgcatgtgctgaagacgaacgatgaccggaatcagacggctaatctaaccaatcaggggaagaacgtgactaagaatgtaactggatttttccagtccctgaagtccatcctaacaaatccactgtatgtcattttcctgctgctgactctgctgcaggtgagctcctttatcggttcctttacttacgtgtttaaatatatggagcagcagtatggccagtctgcgtcacatgctaacttcttgcttgggatcatcactattcctacagttgccaccggaatgttcctgggaggttttattattaagaagttcaagcttagccttgtcggaattgcaaagttctcatttctcacgtcgatgatttccttcctctttcagttgctatattttcccctcatctgcgagagcaagagcgtggcagggctcaccctgacttatgatggcaataattctgtggcgtcccatgtggacgtgccgctcagttattgtaattccgaatgcaattgtgacgagtcacagtgggagccggtctgtggaaataacgggatcacatatctgagtccttgcctggccggatgcaagagctcatctggaatcaagaaacatactgtcttttacaactgttcctgcgtggaggtaactggactgcagaaccgtaactattctgctcacctcggggaatgtccgagggacaatacctgtacacggaagttttttatttatgtcgcgattcaggtgatcaacagtctgttcagcgccaccgggggaactaccttcatcctgttgaccgtaaaaattgtgcaacctgaattaaaagctctggcgatggggttccagagcatggtgatacgcactctcggtggaatattggctcctatctacttcggggctctgatcgataagacctgcatgaaatggagcacaaactcatgtggcgctcagggcgcatgtcggatctataacagcgtgttctttgggagggtctatctcggcctgtccatcgcactcaggtttcccgctttagtactctatattgtttttatcttcgccatgaagaagaagttccaaggcaaggacaccaaggcatccgacaacgagagaaaggttatggatgaagcaaacttagagttcctcaataatggagagcattttgtaccaagcgccggaacagactcaaaaacatgcaatttggacatgcaagataacgctgccgctaactag

SEQ ID NO: 202141 - DNA, 2109 bp, Artificial Sequence
  derived and/or modified sequence
atggaccagcaccagcacctgaataaaaccgcagaaagcgcctccagcgagaagaaaaaaacaagacgttgtaacggatttaagatgtttcttgccgctctgagcttctcctacattgcgaaggctctggggggaattattatgaaaatctctatcacccaaattgagagacggttcgacatttcgtccagcctggccggtctcatagatgggtcatttgagattggaaacctcttggtgatcgtattcgtgtcctatttcgggagtaagcttcaccgcccaaaactgattggcattggttgtctcctcatgggcactggcagcattcttacaagcctgccccacttttttatgggatactaccggtattcgaaagagacacatattaatccctcagagaattccacttctagcctttccacatgtctgattaatcagacactttctttcaacggcacctcacccgagatcgttgaaaaagactgtgtgaaggagagcgggtctcacatgtggatctatgtattcatgggaaacatgctccgaggtatcggcgagacacctatcgtgccactcggaattagttacatagacgacttcgcaaaggagggacattcaagtctttacctgggcagtcttaacgccattggcatgatcggacctgtcattggatttgccttgggcagtctgttcgcaaaaatgtacgtcgacatcgggtatgtcgatctaagcacgatccggatcacacccaaagattctaggtgggtgggggcatggtggctgggtttcctggtgagcggccttttctcaatcattagctcaatcccgttcttcttccttccaaagaacccaaacaaacctcagaaagagaggaagatctcgctgtctcttcatgtactgaagaccaatgatgatagaaaccagactgctaacttgaccaatcagggcaaaaacgtaactaaaaatgtgaccggcttttttcaaagcctcaaaagcattctgacaaatcctctgtatgtgatttttctccttctcacactgctgcaagtgtcctctttcatcggctcctttacctatgtgtttaagtacatggaacagcagtacggacagtccgcctctcatgctaacttcctgctcggcatcataaccatccctaccgtagctaccggcatgtttctgggaggattcataatcaaaaaatttaagttatccttggtgggtatcgctaaatttagcttccttacctccatgattagtttcctctttcagctcctctattttcccctgatttgtgaatcaaagtctgtcgctgggctgactttaacctatgacggcaacaacagtgttgctagtcacgttgacgtccctctgagctactgcaatagcgagtgtaactgcgatgagtcacagtgggaacctgtttgcggaaacaacggcatcacctacttgagcccctgtttagcagggtgcaaatccagctcagggattaagaagcatacagtattctacaactgttcttgtgtggaggttaccggcttacagaacagaaattatagcgcccacctaggagaatgtcccagagacaacacctgtacccggaaatttttcatctatgtagccatccaagtaattaactcgcttttttccgccacaggaggaactaccttcattctcctgacggttaagatagtacagccagagctgaaggcactcgcaatgggtttccaatcaatggtcataagaacactcgggggaatcttggcaccgatctactttggagctctcatagataaaacctgcatgaagtggagcacaaatagttgcggggctcagggagcttgccggatatacaatagcgtgtttttcggacgagtgtacctgggactgtcaattgccttgcgctttcctgccctcgtgttgtatattgtgtttatctttgctatgaagaaaaagtttcagggaaaggacaccaaggctagtgataatgagaggaaggtgatggacgaggcaaatctcgagttcttgaacaatggagaacacttcgtaccatctgctgggaccgactctaagacatgtaatctagatatgcaggataacgcagcagcaaactag

SEQ ID NO: 202142 - DNA, 2247 bp, Artificial Sequence
  derived and/or modified sequence
atggaccagcaccaacacttgaacaagactgcagaatcagcaagtagtgaaaagaagaagacccggaggtgtaacgggtttaagatgttcttggcagccctgtctttttcatatattgcaaaggccttggggggaattattatgaagatatccattactcagattgagcggaggtttgacatctcctctagcttagcagggctgattgatggctccttcgagatcggtaatttgctggtgatagttttcgtgtcctactttggaagtaagcttcaccgccctaaactgatcggcatcgggtgccttctgatgggcaccggctcgatacttaccagtctgccacatttctttatgggatattatagatactcgaaggagacccacattaatcccagtgaaaactccactagtagcctcagcacctgcctgattaaccagacattgagtttcaatggcacaagtcctgagatcgttgagaaggactgtgtgaaagaaagtggcagtcacatgtggatctatgtgtttatgggcaatatgttgcggggtatcggagagactccaatcgtaccccttgggattagctatatcgatgattttgcaaaagagggccattcttcgctctacctcggctcactcaatgctatcggaatgatagggccagtgatcggcttcgcacttgggtctctgtttgccaaaatgtatgtcgatattggttacgttgacctgagtaccattaggattacacccaaagatagtcgctgggttggcgcttggtggcttggtttcttagtgtccgggcttttctctattatcagctcaatccccttcttctttctgcccaaaaatccaaacaagccacagaaggagcggaagatctcattatctctacacgttttgaagaccaacgatgatcgcaaccaaaccgccaatctgacaaatcaagggaagaatgttaccaaaaacgtaaccggcttctttcaaagcctgaagtccatcctgacaaatccactgtacgttatttttttactgcttacgctgctgcaggtatcaagcttcatcggttcttttacctatgtctttaagtacatggagcagcaatatggacagagtgccagtcatgcgaattttttactcggcatcatcacaattcccacggtggccaccggaatgttccttggcggattcattattaagaaattcaagctcagcctggtgggaatcgctaaattctccttcctgaccagcatgatatcattcctttttcagctcctgtattttcctctgatttgtgagtccaagtctgtcgccggactgaccctcacatacgacgggaataatagcgtcgcttcacacgtagatgttcccttatcatattgtaatagcgagtgcaactgcgacgagtctcaatgggagcctgtgtgcggaaataatgggataacatatttgagtccttgtctggctggctgtaaaagctcctcaggtattaaaaagcacacagtcttttataactgctcatgcgtggaagtcacaggattacagaatcgcaactactccgctcaccttggagaatgtcctcgggacaacacatgcacgcgcaaatttttcatttatgtcgccatccaggtgatcaactcactgttttccgcaaccggcggtacaacttttattctcttgactgtcaaaattgtccagccagagttgaaggccttggcaatggggtttcagagtatggtgattcggaccctgggtggaatcctggcccctatatatttcggcgctctgattgacaaaacctgcatgaagtggagcactaatagctgtggtgcacagggggcttgtagaatctacaatagcgtgttttttggaattgtgcagcctgagttaaaggccctggccatcggcttccacagcatgatcatgcgctcactgggtgggatccttgtcccgatctattttggtgccttgatcgatacaacatgcatgaagtggagcacaaacagttgtggcgcacgcggagcttgccggatatataatagtacctatctcggcagagccttttttggactgaaggtggctttaatttttccggttctggttctgcttactgtgtttattttcgtagttcggaagaagtctcacgggaaggacaccaaagttttggagaatgaaagacaggtgatggacgaggccaatctcgagttcctgaacgacagcgagcacttcgtgccctccgccgaggaacagtag

SEQ ID NO: 202143 - DNA, 2712 bp, Artificial Sequence
  derived and/or modified sequence
gagactttaacatcagaaaaaggatggacttgttgcagttgctgtagcattcaaagtcaaggtgatcatttcaaaccaagcatcagcaacaattaaaaatattcacttggtatctgtagtttaataatggaccaacatcaacatttgaataaaacagcagagtcagcatcttcagagaaaaagaaaacaagacgctgcaatggattcaagatgttcttggcagccctgtcattcagctatattgctaaagcactaggtggaatcattatgaaaatttccatcactcaaatagaaaggagatttgacatatcctcttctcttgctggtttaattgatggaagctttgaaattggaaatttgcttgtgattgtatttgtaagttactttggatctaaactacacagaccgaagttaattggaattggttgtctccttatgggaactggaagtattttgacatctttaccacatttcttcatgggatattataggtattctaaagaaacccatattaatccatcagaaaattcaacatcaagtttatcaacctgtttaattaatcaaaccttatcattcaatggaacatcacctgagatagtagaaaaagattgtgtaaaggaatctgggtcacacatgtggatctatgtcttcatggggaatatgcttcgtggcataggggaaacccccatagtaccattggggatttcatacattgatgattttgcaaaagaaggacattcttccttgtatttaggtagtttgaatgcaataggaatgattggtccagtcattggctttgcactgggatctctgtttgctaaaatgtacgtggatattggatatgtagatctgagcactatcagaataactcctaaggactctcgttgggttggagcttggtggcttggtttccttgtgtctggactattttccattatttcttccataccattttttttcttgccgaaaaatccaaataaaccacaaaaagaaagaaaaatttcactatcattgcatgtgctgaaaacaaatgatgatagaaatcaaacagctaatttgaccaaccaaggaaaaaatgttaccaaaaatgtgactggttttttccagtctttgaaaagcatccttaccaatcccctgtatgttatatttctgcttttgacattgttacaagtaagcagctttattggttcttttacttacgtctttaaatatatggagcaacagtacggtcagtctgcatctcatgctaactttttgttgggaatcataaccattcctacggttgcaactggaatgtttttaggaggatttatcattaaaaaattcaaattgtctttagttggaattgccaaattttcatttcttacttcgatgatatccttcttgtttcaacttctatatttccctctaatctgcgaaagcaaatcagttgccggcctaaccttgacctatgatggaaataattcagtggcatctcatgtagatgtaccactttcttattgcaactcagagtgcaattgtgatgaaagtcagtgggaaccagtctgtgggaacaatggaataacttacctgtcaccttgtctagcaggatgcaaatcctcaagtggtattaaaaagcatacagtgttttataactgtagttgtgtggaagtaactggtctccagaacagaaattactcagcacacttgggtgaatgcccaagagataatacttgtacaaggaaatttttcatctatgttgcaattcaagtcataaactctttgttctctgcaacaggaggtaccacatttatcttgttgactgtgaagattgttcaacctgaattgaaagcacttgcaatgggtttccagtcaatggttataagaacactaggaggaattctagctccaatatattttggggctctgattgataaaacatgtatgaagtggtccaccaacagctgtggagcacaaggggcttgtaggatatataattccgtattttttggaagggtctacttgggcttatctatagctttaagattcccagcacttgttttatatattgttttcatttttgctatgaagaaaaaatttcaaggaaaagataccaaggcatcggacaatgaaagaaaagtaatggatgaagcaaacttagaattcttaaataatggtgaacattttgtaccttctgctggaacagatagtaaaacatgtaatttggacatgcaagacaatgctgctgccaactaacattgcattgattcattaagatgttatttttgaggtgttcctggtctttcactgacaattccaacattctttacttacagtggaccaatggataagtctatgcatctataataaactataaaaaatgggagtacccatggttaggatatagctatgcctttatggttaagattagaatatatgatccataaaaatttaaagtgagaggcatggttagtgtgtgatacaataaaaagtaattgtttggtagttgtaactgctaataaaaccagtgactagaatataagggaggtaaaaaggacaagatagattaatagcctaaataaagagaaaagcctgatgcctttaaaaaaaatgaaacactttggatgtattacttaggccaaaatctggcctggatttatgctataatatatattttcatgttaagttgtatatttttcagaaattataaatattattaatttaaaatttgaa

SEQ ID NO: 202144 - DNA, 2805 bp, Artificial Sequence
  derived and/or modified sequence
gatggacttgttgcagttgctgtagcattcaaagtcaagttgtgctttgcgatgctgagtttactgttttaaatggacttcaagcatagccctgaagtgttgtcccgttgttcccacctcctagagggcctgacagaagaggtacatatgctatgtgatcatttcaaaccaagcatcagcaacaattaaaaatattcacttggtatctgtagtttaataatggaccaacatcaacatttgaataaaacagcagagtcagcatcttcagagaaaaagaaaacaagacgctgcaatggattcaagatgttcttggcagccctgtcattcagctatattgctaaagcactaggtggaatcattatgaaaatttccatcactcaaatagaaaggagatttgacatatcctcttctcttgctggtttaattgatggaagctttgaaattggaaatttgcttgtgattgtatttgtaagttactttggatctaaactacacagaccgaagttaattggaattggttgtctccttatgggaactggaagtattttgacatctttaccacatttcttcatgggatattataggtattctaaagaaacccatattaatccatcagaaaattcaacatcaagtttatcaacctgtttaattaatcaaaccttatcattcaatggaacatcacctgagatagtagaaaaagattgtgtaaaggaatctgggtcacacatgtggatctatgtcttcatggggaatatgcttcgtggcataggggaaacccccatagtaccattggggatttcatacattgatgattttgcaaaagaaggacattcttccttgtatttaggtagtttgaatgcaataggaatgattggtccagtcattggctttgcactgggatctctgtttgctaaaatgtacgtggatattggatatgtagatctgagcactatcagaataactcctaaggactctcgttgggttggagcttggtggcttggtttccttgtgtctggactattttccattatttcttccataccattttttttcttgccgaaaaatccaaataaaccacaaaaagaaagaaaaatttcactatcattgcatgtgctgaaaacaaatgatgatagaaatcaaacagctaatttgaccaaccaaggaaaaaatgttaccaaaaatgtgactggttttttccagtctttgaaaagcatccttaccaatcccctgtatgttatatttctgcttttgacattgttacaagtaagcagctttattggttcttttacttacgtctttaaatatatggagcaacagtacggtcagtctgcatctcatgctaactttttgttgggaatcataaccattcctacggttgcaactggaatgtttttaggaggatttatcattaaaaaattcaaattgtctttagttggaattgccaaattttcatttcttacttcgatgatatccttcttgtttcaacttctatatttccctctaatctgcgaaagcaaatcagttgccggcctaaccttgacctatgatggaaataattcagtggcatctcatgtagatgtaccactttcttattgcaactcagagtgcaattgtgatgaaagtcagtgggaaccagtctgtgggaacaatggaataacttacctgtcaccttgtctagcaggatgcaaatcctcaagtggtattaaaaagcatacagtgttttataactgtagttgtgtggaagtaactggtctccagaacagaaattactcagcacacttgggtgaatgcccaagagataatacttgtacaaggaaatttttcatctatgttgcaattcaagtcataaactctttgttctctgcaacaggaggtaccacatttatcttgttgactgtgaagattgttcaacctgaattgaaagcacttgcaatgggtttccagtcaatggttataagaacactaggaggaattctagctccaatatattttggggctctgattgataaaacatgtatgaagtggtccaccaacagctgtggagcacaaggggcttgtaggatatataattccgtattttttggaagggtctacttgggcttatctatagctttaagattcccagcacttgttttatatattgttttcatttttgctatgaagaaaaaatttcaaggaaaagataccaaggcatcggacaatgaaagaaaagtaatggatgaagcaaacttagaattcttaaataatggtgaacattttgtaccttctgctggaacagatagtaaaacatgtaatttggacatgcaagacaatgctgctgccaactaacattgcattgattcattaagatgttatttttgaggtgttcctggtctttcactgacaattccaacattctttacttacagtggaccaatggataagtctatgcatctataataaactataaaaaatgggagtacccatggttaggatatagctatgcctttatggttaagattagaatatatgatccataaaaatttaaagtgagaggcatggttagtgtgtgatacaataaaaagtaattgtttggtagttgtaactgctaataaaaccagtgactagaatataagggaggtaaaaaggacaagatagattaatagcctaaataaagagaaaagcctgatgcctttaaaaaaaatgaaacactttggatgtattacttaggccaaaatctggcctggatttatgctataatatatattttcatgttaagttgtatatttttcagaaattataaatattattaatttaaaatttgaa

SEQ ID NO: 202145 - DNA, 2247 bp, Artificial Sequence
  derived and/or modified sequence
atggaccaacatcaacatttgaataaaacagcagagtcagcatcttcagagaaaaagaaaacaagacgctgcaatggattcaagatgttcttggcagccctgtcattcagctatattgctaaagcactaggtggaatcattatgaaaatttccatcactcaaatagaaaggagatttgacatatcctcttctcttgctggtttaattgatggaagctttgaaattggaaatttgcttgtgattgtatttgtaagttactttggatctaaactacacagaccgaagttaattggaattggttgtctccttatgggaactggaagtattttgacatctttaccacatttcttcatgggatattataggtattctaaagaaacccatattaatccatcagaaaattcaacatcaagtttatcaacctgtttaattaatcaaaccttatcattcaatggaacatcacctgagatagtagaaaaagattgtgtaaaggaatctgggtcacacatgtggatctatgtcttcatggggaatatgcttcgtggcataggggaaacccccatagtaccattggggatttcatacattgatgattttgcaaaagaaggacattcttccttgtatttaggtagtttgaatgcaataggaatgattggtccagtcattggctttgcactgggatctctgtttgctaaaatgtacgtggatattggatatgtagatctgagcactatcagaataactcctaaggactctcgttgggttggagcttggtggcttggtttccttgtgtctggactattttccattatttcttccataccattttttttcttgccgaaaaatccaaataaaccacaaaaagaaagaaaaatttcactatcattgcatgtgctgaaaacaaatgatgatagaaatcaaacagctaatttgaccaaccaaggaaaaaatgttaccaaaaatgtgactggttttttccagtctttgaaaagcatccttaccaatcccctgtatgttatatttctgcttttgacattgttacaagtaagcagctttattggttcttttacttacgtctttaaatatatggagcaacagtacggtcagtctgcatctcatgctaactttttgttgggaatcataaccattcctacggttgcaactggaatgtttttaggaggatttatcattaaaaaattcaaattgtctttagttggaattgccaaattttcatttcttacttcgatgatatccttcttgtttcaacttctatatttccctctaatctgcgaaagcaaatcagttgccggcctaaccttgacctatgatggaaataattcagtggcatctcatgtagatgtaccactttcttattgcaactcagagtgcaattgtgatgaaagtcagtgggaaccagtctgtgggaacaatggaataacttacctgtcaccttgtctagcaggatgcaaatcctcaagtggtattaaaaagcatacagtgttttataactgtagttgtgtggaagtaactggtctccagaacagaaattactcagcacacttgggtgaatgcccaagagataatacttgtacaaggaaatttttcatctatgttgcaattcaagtcataaactctttgttctctgcaacaggaggtaccacatttatcttgttgactgtgaagattgttcaacctgaattgaaagcacttgcaatgggtttccagtcaatggttataagaacactaggaggaattctagctccaatatattttggggctctgattgataaaacatgtatgaagtggtccaccaacagctgtggagcacaaggggcttgtaggatatataattccgtattttttgggattgttcaacctgaattgaaagcacttgcaatcggcttccattcaatgattatgcgatcgctaggaggtattctagttccaatatattttggggctctgattgatacaacgtgtatgaagtggtccaccaacagctgtggagcacgaggggcttgtaggatatataattccacatatttgggaagagccttcttcggcttgaaggtagccctaatatttccagtacttgttttacttactgtatttatttttgttgtaaggaaaaaatcccatggaaaggataccaaagtattagaaaatgaaagacaagtaatggatgaagcaaacttagaattcttaaacgacagtgaacattttgtaccttctgctgaagaacagtaa

SEQ ID NO: 202146 - protein, 109 aa, Artificial Sequence
  derived and/or modified sequence
MNPALGNQTDVAGLFLANSSEALERAVRCCTQASVVTDDGFAEGGPDERSLYIMRVVQIAVMCVLSLTVVFGIFFLGCNLLIKSEGMINFLVKDRRPSKEVEAVVVGPY

SEQ ID NO: 202147 - DNA, 330 bp, Artificial Sequence
  derived and/or modified sequence
atgaatcctgccctcggcaatcagactgatgtcgcagggctgtttctggctaattcttctgaagctttggaaagagcggttcggtgttgtacccaagctagcgtcgtcacagatgatggttttgccgaaggcgggcccgacgaacggtctctgtatattatgcgggtcgtgcagatcgcggttatgtgtgtgctgtcactaacagtggtttttggaattttcttcctgggctgtaatctgctcatcaaaagcgaaggaatgattaattttctggtgaaggaccgccgcccatccaaggaggtcgaggcagtggtagtcgggccctactag

SEQ ID NO: 202148 - DNA, 330 bp, Artificial Sequence
  derived and/or modified sequence
atgaacccagccctgggcaaccagacagatgtggccggcctcttcctggccaacagcagcgaggccctggagagagctgtgcgctgctgcacccaggcctctgtggtgacagatgatggctttgctgagggcggcccagatgagaggagcctgtacatcatgagggtggtgcagattgctgtgatgtgtgtgctgagcctgactgtggtgtttggcatcttcttcctgggctgcaacctgctgatcaagtctgagggcatgatcaacttcctggtgaaggacagaagacccagcaaggaggtggaggccgtggtggtgggcccctactag

SEQ ID NO: 202149 - DNA, 330 bp, Artificial Sequence
  derived and/or modified sequence
atgaaccccgccctgggcaaccagaccgacgtggccggcctgttcctggcaaattctagtgaggctttagagagagcggtgcgctgttgcacgcaggcgtcagtggtgactgatgacggcttcgccgaaggtggcccagacgagagatccttgtatattatgcgagtggttcagatagctgtcatgtgtgtgctatccctgactgttgtgttcggaatctttttcttggggtgtaacctgctgatcaaatcagaggggatgatcaacttcctggtcaaggaccggagacccagcaaagaagtggaagccgtcgtcgtgggtccttactag

SEQ ID NO: 202150 - DNA, 330 bp, Artificial Sequence
  derived and/or modified sequence
atgaatcccgcactggggaaccagaccgacgtagcaggcttgtttttggccaactcttctgaggcccttgaaagggccgtgcgctgctgcacgcaggcctccgtagtaactgatgatggattcgccgagggcggaccagatgagcgcagtctatacattatgagagtggtgcaaattgctgtcatgtgcgtgctctcactgacagtcgtgttcggaatttttttcttgggctgcaatctactaattaagagtgaggggatgatcaattttctggttaaggatcgtcgtcctagcaaagaagtggaagccgtggtcgtcgggccttactag

SEQ ID NO: 202151 - DNA, 1471 bp, Artificial Sequence
  derived and/or modified sequence
gcgagcgccgggaacgagcaccaccagggctggagcggacggctttagaagagcctagctgctgcgcgcgtcggagaggctcctgggaaactcccacggcccagggactttcgaaagcagagcgaggagccctcgcacgcgctagtctgcgagtgagcgctcagcccggcacctgttcctccagcgccgccgccttcccacccctcggacccgcgccgctcgcggcgcccgcccgttcctgcgatgaatccggccctaggcaaccagacggacgtggcgggcctgttcctggccaacagcagcgaggcgctggagcgagccgtgcgctgctgcacccaggcgtccgtggtgaccgacgacggcttcgcggagggaggcccggacgagcgtagcctgtacataatgcgcgtggtgcagatcgcggtcatgtgcgtgctctcactcaccgtggtcttcggcatcttcttcctcggctgcaatctgctcatcaagtccgagggcatgatcaacttcctcgtgaaggaccggaggccgtctaaggaggtggaggcggtggtcgtggggccctactgacccgccctctgcccccgcggcaaccgctcccacgcctgcccactttgctagcccggctgtgcccctcactatcagagactgggcgaagcaaacctgtcggagtcaattatttctctcgacttcggcctttcggaaagaagcgaccggtttctccctcgccctctgaaagtcctcatgcctggcagtcggaggagagcgcccagactctgaactcagcagaaagtggcaagaagagggcgattagggcgcagaactttggaagctgctacttacttggaatgcggggagaccgacggtgcgaaggcccttctccacccgcaggtgggccaagctctgggggcaggtggagagggcgggcaggggagagacccagcggcactgatcgccttgtgaccggaagagtgacctgttaaaagccacgcagcagactcatggggtctcacaaatccgtgtccgggtgcgctcccactcttctcctgctccccccctgccctggaggggaggggcgataaatacctttgattgtaacgtgccgttttaagaggttttgtgtttgtttgcttgaatacaaatgtttgataagtctttttctgccccagtggcctgtttgcctgcctgaggagttacagttttgtcattgtgggagaaggggtggggggagggggagcctgcgaatttgaacggggtgagttgtttcttttagtgcatttcccactgggtcttttgggaggcgtctagcgttcctgctggccctgggacaaagacccagaatagaactcgtagctcgtgactgcacggtttacgccacaaaagtgctcttgacatccgtgacaccgttttgactttttgtttttttcttatttaacatttccttaataaatgcaacatttaagcgttt

SEQ ID NO: 202152 - DNA, 330 bp, Artificial Sequence
  derived and/or modified sequence
atgaaccccgccctgggcaaccagaccgacgtggccggcctgttcctggccaacagcagcgaggccctggagagagccgtgagatgctgcacccaggccagcgtggtgaccgacgacggcttcgccgagggcggccccgacgagagaagcctgtacatcatgagagtggtgcagatcgccgtgatgtgcgtgctgagcctgaccgtggtgttcggcatcttcttcctgggctgcaacctgctgatcaagagcgagggcatgatcaacttcctggtgaaggacagaagacccagcaaggaggtggaggccgtggtggtgggcccctactag

SEQ ID NO: 202153 - protein, 523 aa, Artificial Sequence
  derived and/or modified sequence
MAGHTQQPSGRGNPRPAPSPSPVPGTVPGASERVALKKEIGLLSACTIIIGNIIGSGIFISPKGVLEHSGSVGLALFVWVLGGGVTALGSLCYAELGVAIPKSGGDYAYVTEIFGGLAGFLLLWSAVLIMYPTSLAVISMTFSNYVLQPVFPNCIPPTTASRVLSMACLMLLTWVNSSSVRWATRIQDMFTGGKLLALSLIIGVGLLQIFQGHFEELRPSNAFAFWMTPSVGHLALAFLQGSFAFSGWNFLNYVTEEMVDARKNLPRAIFISIPLVTFVYTFTNIAYFTAMSPQELLSSNAVAVTFGEKLLGYFSWVMPVSVALSTFGGINGYLFTYSRLCFSGAREGHLPSLLAMIHVRHCTPIPALLVCCGATAVIMLVGDTYTLINYVSFINYLCYGVTILGLLLLRWRRPALHRPIKVNLLIPVAYLVFWAFLLVFSFISEPMVCGVGVIIILTGVPIFFLGVFWRSKPKCVHRLTESMTHWGQELCFVVYPQDAPEEEENGPCPPSLLPATDKPSKPQ

SEQ ID NO: 202154 - DNA, 1572 bp, Artificial Sequence
  derived and/or modified sequence
atggccggccacacccagcagcccagcggcagaggcaaccccagacccgcccccagccccagccccgtgcccggcaccgtgcccggcgccagcgagagagtggccctgaagaaggagatcggcctgctgagcgcctgcaccatcatcatcggcaacatcatcggcagcggcatcttcatcagccccaagggcgtgctggagcacagcggcagcgtgggcctggccctgttcgtgtgggtgctgggcggcggcgtgaccgccctgggcagcctgtgctacgccgagctgggcgtggccatccccaagagcggcggcgactacgcctacgtgaccgagatcttcggcggcctggccggcttcctgctgctgtggagcgccgtgctgatcatgtaccccaccagcctggccgtgatcagcatgaccttcagcaactacgtgctgcagcccgtgttccccaactgcatcccccccaccaccgccagcagagtgctgagcatggcctgcctgatgctgctgacctgggtgaacagcagcagcgtgagatgggccaccagaatccaggacatgttcaccggcggcaagctgctggccctgagcctgatcatcggcgtgggcctgctgcagatcttccagggccacttcgaggagctgagacccagcaacgccttcgccttctggatgacccccagcgtgggccacctggccctggccttcctgcagggcagcttcgccttcagcggctggaacttcctgaactacgtgaccgaggagatggtggacgccagaaagaacctgcccagagccatcttcatcagcatccccctggtgaccttcgtgtacaccttcaccaacatcgcctacttcaccgccatgagcccccaggagctgctgagcagcaacgccgtggccgtgaccttcggcgagaagctgctgggctacttcagctgggtgatgcccgtgagcgtggccctgagcaccttcggcggcatcaacggctacctgttcacctacagcagactgtgcttcagcggcgccagagagggccacctgcccagcctgctggccatgatccacgtgagacactgcacccccatccccgccctgctggtgtgctgcggcgccaccgccgtgatcatgctggtgggcgacacctacaccctgatcaactacgtgagcttcatcaactacctgtgctacggcgtgaccatcctgggcctgctgctgctgagatggagaagacccgccctgcacagacccatcaaggtgaacctgctgatccccgtggcctacctggtgttctgggccttcctgctggtgttcagcttcatcagcgagcccatggtgtgcggcgtgggcgtgatcatcatcctgaccggcgtgcccatcttcttcctgggcgtgttctggagaagcaagcccaagtgcgtgcacagactgaccgagagcatgacccactggggccaggagctgtgcttcgtggtgtacccccaggacgcccccgaggaggaggagaacggcccctgcccccccagcctgctgcccgccaccgacaagcccagcaagccccagtag

SEQ ID NO: 202155 - DNA, 1572 bp, Artificial Sequence
  derived and/or modified sequence
atggcaggacacactcaacagccatcaggacgcggcaacccgcgacctgctccgagtccatcccctgtacctggcacggtaccaggagcaagtgaacgggttgcccttaaaaaggagatcgggcttttaagcgcctgcactattataatcggtaacatcatcgggtctgggatttttattagcccaaaaggcgtgctcgaacactcaggctccgttggcttggccttgttcgtctgggttttgggtggaggcgttaccgccctgggctccctctgctacgcagaactgggggttgccattcctaagtctggaggcgactacgcttatgtaacagagatctttggcgggttggccgggtttctcctgctttggagtgctgtcctgataatgtatcccacatcactggccgtaatatcaatgacattttccaattacgtcctgcagcctgttttcccaaattgcatccccccaacaaccgcaagccgtgtcttgtcaatggcctgtcttatgttattaacatgggtgaacagcagctccgtcagatgggctaccagaatccaggacatgttcactggcggtaagttgctggccctgtccctgattatcggagtcggcctcctacagatctttcaagggcactttgaggaactgcgtccctctaatgctttcgccttctggatgacgccttccgtcggtcacctcgctctcgcgttcctacagggatctttcgccttttctggctggaacttcctgaactatgtgaccgaggagatggtcgatgctcgtaagaacttgcctagggccatattcatctctatcccgctcgtgaccttcgtgtacacctttaccaatattgcctactttacggcaatgagcccccaagagctgctctcaagtaatgccgtagccgttacctttggcgagaagttattaggctatttcagttgggtgatgccagtctccgtggccttgtcaacctttgggggaataaatggttacctgttcacgtactcaagattatgcttcagcggagccagagagggacacctaccttcccttttggcaatgatccacgtccgacattgtacccctattccagcgcttctggtttgttgcggcgctactgctgttatcatgcttgtgggcgacacctatactttgattaactacgtgtcatttatcaactacctgtgttacggggtgacaattcttggactcctcctgctgcgttggcggagacccgcgctccatcggcccattaaagtgaatctgcttattccggtagcttatctggtgttttgggcattcctactggtgttttcgtttatctcggaacccatggtctgcggggtgggtgttattattattctcacgggagtgcctattttttttcttggcgtgttctggaggagcaaaccaaaatgtgtgcaccgactgactgaatccatgacccattggggacaggaattgtgcttcgtcgtgtacccacaggacgctccagaggaagaagaaaacggcccgtgccctccctctctgctacctgctaccgataagcccagtaaacctcagtag

SEQ ID NO: 202156 - DNA, 1572 bp, Artificial Sequence
  derived and/or modified sequence
atggccggccacacccagcagcccagcggccggggcaaccccaggcctgcccccagccccagccctgtgcccggcaccgtgcctggggccagcgagcgggtggccctgaagaaggagatcggcctgctgagcgcctgcaccatcatcatcggcaacatcatcggcagcggcatcttcatcagccccaagggcgtgctggagcacagcggctctgtgggcctggccctgtttgtgtgggtgctgggcggcggcgtgacagccctgggcagcctgtgctacgccgagctgggcgtggccatccccaagtctggaggagactatgcctacgtgacagagatctttggaggcctggccggcttcctgctgctgtggagcgctgtgctgatcatgtaccccaccagcctggccgtcatctccatgaccttcagcaactacgtgctgcagcctgtgttccccaactgcatcccccccaccacagccagccgggtgctgtccatggcctgcctgatgctgctgacctgggtgaacagcagctctgtgcgctgggccacccgcatccaggacatgttcaccggcggcaagctgctggccctgagcctcatcatcggcgtgggcctgctgcagatcttccagggccactttgaggagctgcggcccagcaatgcctttgccttctggatgacccccagcgtgggccacctggccctggccttcctgcagggcagctttgccttcagcggctggaacttcctgaactacgtgacagaggagatggtggatgccaggaagaacctgccccgggccatcttcatcagcatccccctggtgacctttgtgtacaccttcaccaacatcgcctacttcaccgccatgagcccccaggagctgctgagcagcaatgctgtggccgtgaccttcggggagaagctgctgggctacttctcctgggtgatgcctgtgtctgtggccctgagcacctttggaggcatcaatggctacctgttcacctacagccggctgtgcttcagcggggcccgggagggccacctgcccagcctgctggccatgatccacgtgcgccactgcacccccatcccagccctgctggtgtgctgcggggccacagctgtgatcatgctggtgggggacacctacaccctcatcaactacgtgtccttcatcaactacctgtgctatggagtgaccatcctgggcctgctgctgctgcgctggaggaggcctgccctgcaccggcccatcaaggtgaacctgctgatccctgtggcctacctggtgttctgggccttcctgctggtgttctccttcatcagcgagcccatggtgtgtggggtgggcgtcatcatcatcctgactggagtgcccatcttcttcctgggcgtcttctggaggagcaagcccaagtgtgtgcaccggctgacagagagcatgacccactggggccaggagctgtgctttgtggtgtacccccaggatgcccctgaggaggaggagaatggcccctgcccccccagcctgctgcctgccacagacaagcccagcaagccccagtag

SEQ ID NO: 202157 - DNA, 1572 bp, Artificial Sequence
  derived and/or modified sequence
atggccggccacacccagcagcccagcggccggggcaacccccggccagccccctcaccgtctcctgtgccgggtacggttccgggcgctagcgaaagagttgcactgaagaaggaaataggactgttgagtgcatgcacaattatcatcggcaacatcattggctcgggtatcttcatttcccccaaaggtgttctggagcattctggctcagtagggctggctctttttgtatgggtgctcggcggaggagtgacagccttggggagcctctgttatgctgaactaggtgtagcaatccctaaaagcggaggcgattacgcttacgtgaccgagattttcggtgggttggcaggctttctcctactctggtctgcagtgttgattatgtatccaacatcactggcagtgatctctatgacattctcgaattacgtgctgcagccagtgtttcccaattgcattcctccaacaaccgccagccgggtactgtctatggcctgtcttatgctgctcacctgggtcaattcctccagcgttagatgggccacccggatccaggacatgttcaccgggggcaaattgctcgctttaagccttatcattggcgttggtctattacagatttttcaaggccacttcgaagagctcagaccatccaacgcattcgcattctggatgaccccctccgtcgggcacctggccctcgcgtttctgcagggcagctttgccttctccggttggaattttctgaactacgtgaccgaggagatggtggatgcccgcaagaatctaccaagggctatctttatatccataccacttgtgacctttgtgtatacgtttaccaatatcgcctatttcacagctatgtctccacaggaactgctgtctagtaatgccgttgccgtgaccttcggagagaagctgctgggttatttctcatgggttatgcccgtttccgtcgccttaagtaccttcgggggaatcaatgggtacctttttacttatagccgactgtgtttcagcggagctagagaggggcacctgcctagtctcttggccatgatacacgtacggcattgtacacccatccctgctctattggtgtgttgcggcgccaccgcagtgattatgttagtcggagacacttatacactgatcaattatgtcagcttcatcaattacctgtgctatggcgtgacgatcctggggcttctgttgttgcgatggaggcgccccgcgctccacagacctatcaaggtgaaccttcttatcccggtagcctatctggtgttttgggccttcctcctggtgtttagttttatctccgagcctatggtttgcggtgttggcgtaataatcatcctcactggggtccccatctttttcctgggcgtgttctggaggtccaaaccaaagtgcgtgcacagactcaccgaatccatgacacactggggccaagaactctgtttcgtcgtctacccacaagacgctcctgaggaagaggaaaacggcccatgtccgcccagtctgttgcctgcaactgacaagccttccaaacctcagtag

SEQ ID NO: 202158 - DNA, 1572 bp, Artificial Sequence
  derived and/or modified sequence
atggcaggtcacactcaacagccatccgggaggggaaacccacgtcctgccccaagcccttctcctgtcccgggtacagtgcctggtgcttccgagcgggttgcactgaagaaggagataggcctgctgagcgcctgtacaattataattggcaatatcatcgggagtgggatctttattagccccaaaggagtgctggagcactctggaagtgtagggttggccctgtttgtatgggttctgggcggtggggtcaccgcacttggttccttgtgctacgccgaactgggggtcgcaattcccaagtccggcggtgactatgcttatgtgacagaaatttttggcggtctggcaggctttttgctcttgtggtctgctgttctgattatgtacccgacaagcctggctgtgatctctatgaccttctctaactatgtccttcaaccagttttccccaattgcattcctccaactactgcctcccgggtgctctcaatggcttgtctgatgctcctgacgtgggttaattccagctctgtccgctgggcaacccgcatacaggacatgtttaccggaggaaaactgcttgcactgagtctcattatcggagtgggactgctccagatattccagggccatttcgaagagttgcgccctagtaacgccttcgccttttggatgacaccatctgtgggccatttagccctggctttcctacaagggagcttcgcgttctcgggctggaacttcctgaactatgtgacagaggaaatggttgatgctcggaaaaacctgccgcgtgcgatcttcatctcaattccactggtcacatttgtgtatacctttacaaacattgcatacttcacagcaatgtcgccccaggagctccttagctccaatgccgtcgccgtgacttttggcgaaaaattactgggatacttcagctgggttatgccagtgtcagtggcactctcgaccttcggagggataaatggctatttgtttacatactccagactttgcttctctggtgccagagagggccatctgccttcacttctcgccatgatccacgtgaggcactgtacccctataccagcgctcctggtttgctgcggagcaacggccgttattatgctagtcggggacacttatactctcatcaactacgtctcctttatcaattacctttgttacggtgtaactatattgggtctgctgctgttgcggtggagacgccctgcactgcatcgccctatcaaggtgaacctcctcattccagtcgcatatttggtcttctgggcctttctgcttgttttctctttcatcagtgagccaatggtctgtggcgtgggcgttatcataatactgaccggagtgcctattttctttctcggagtgttctggcgtagtaaaccaaagtgcgtgcatcgactcaccgaaagcatgacccattgggggcaagaactatgttttgtggtctatccacaggatgcacctgaagaagaggagaacggaccatgtcctccaagtcttttgcccgctactgataagcctagcaaaccccagtag

SEQ ID NO: 202159 - DNA, 1946 bp, Artificial Sequence
  derived and/or modified sequence
agtcccgggcccggagccagcgcatgcgcccgcctgtgggcgctgtcccggctgcgagggccgtgagctcacggaccgacggaccgacgggcggccggccggacagacggggcagcgcagggagcggggacgcggcgggacagcgacatggccggccacacgcagcagccgagcgggcgcgggaaccccaggcctgcgccctcgccctccccagtcccagggaccgtccccggcgcctcggagcgggtggcgctcaagaaggagatcgggctgctgagcgcctgcaccatcatcatcgggaacatcatcggctcgggcatcttcatctcgcccaagggggtcctggagcactcaggctccgtgggtctggccctgttcgtctgggtcctgggtgggggcgtgacggctctgggctccctctgctatgcagagctgggagtcgccatccccaagtctggcggggactacgcctacgtcacagagatcttcgggggcctggctggctttctgctgctctggagcgccgtcctcatcatgtaccccaccagccttgctgtcatctccatgaccttctccaactacgtgctgcagcccgtgttccccaactgcatcccccccaccacagcctcccgggtgctgtccatggcctgcctgatgctcctgacatgggtgaacagctccagtgtgcgctgggccacgcgcatccaggacatgttcacaggcgggaagctgctggccttgtccctcatcatcggcgtgggccttctccagatcttccaaggacacttcgaggagctgaggcccagcaatgcctttgctttctggatgacgccctccgtgggacacctggccctggccttcctccagggctccttcgccttcagtggctggaacttcctcaactatgtcaccgaggagatggttgacgcccgaaagaacctacctcgcgccatcttcatctccatcccactggtgaccttcgtgtacacgttcaccaacattgcctacttcacggccatgtccccccaggagctgctctcctccaatgcggtggctgtgaccttcggggagaagctgctgggctacttttcttgggtcatgcctgtctccgtggctctgtcaaccttcggagggatcaatggttacctgttcacctactccaggctgtgcttctctggagcccgcgaggggcacctgcccagcctgctggccatgatccacgtcagacactgcacccccatccccgccctcctcgtctgttgcggggccacagccgtcatcatgctcgtgggcgacacgtacacgctcatcaactatgtgtccttcatcaactacctctgctacggcgtcaccatcctgggcctgctgctgctgcgctggaggcggcctgcactccacaggcccatcaaggtgaaccttctcatccccgtggcgtacttggtcttctgggccttcctgctggtcttcagcttcatctcagagcctatggtctgtggggtcggcgtcatcatcatccttacgggggtgcccattttctttctgggagtgttctggagaagcaaaccaaagtgtgtgcacagactcacagagtccatgacacactggggccaggagctgtgtttcgtggtctacccccaggacgcccccgaagaggaggagaatggcccctgcccaccctccctgctgcctgccacagacaagccctcgaagccacaatgagatttttgtagagactgaagcagttgtttctgtttacatgttgtttattgaggaggtgttttggcaaaaaagttttgttttgtttttttctggaaaaaaaagaaaaaagatacgactctcagaagcctgtttaaggaagccctaaaatgtggactgggtttcctgtcttagcactgccctgctagctcttcctgaaaaggcctataaataaacagggctggctgttc

SEQ ID NO: 202160 - protein, 211 aa, Artificial Sequence
  derived and/or modified sequence
MAPLAEVGGFLGGLEGLGQQVGSHFLLPPAGERPPLLGERRSAAERSARGGPGAAQLAHLHGILRRRQLYCRTGFHLQILPDGSVQGTRQDHSLFGILEFISVAVGLVSIRGVDSGLYLGMNDKGELYGSEKLTSECIFREQFEENWYNTYSSNIYKHGDTGRRYFVALNKDGTPRDGARSKRHQKFTHFLPRPVDPERVPELYKDLLMYT

SEQ ID NO: 202161 - protein, 78 aa, Artificial Sequence
  derived and/or modified sequence
MAPLAEVGGFLGGLEGLGQQVGSHFLLPPAGERPPAALLPHRLPPADPARRQRAGHPAGPQPLRYLGIHQCGSGTGQY

SEQ ID NO: 202162 - DNA, 636 bp, Artificial Sequence
  derived and/or modified sequence
atggcccccctggccgaggtgggcggcttcctgggcggcctggagggcctgggccagcaggtgggcagccacttcctgctgccccccgccggcgagagaccccccctgctgggcgagagaagaagcgccgccgagagaagcgccagaggcggccccggcgccgcccagctggcccacctgcacggcatcctgagaagaagacagctgtactgcagaaccggcttccacctgcagatcctgcccgacggcagcgtgcagggcaccagacaggaccacagcctgttcggcatcctggagttcatcagcgtggccgtgggcctggtgagcatcagaggcgtggacagcggcctgtacctgggcatgaacgacaagggcgagctgtacggcagcgagaagctgaccagcgagtgcatcttcagagagcagttcgaggagaactggtacaacacctacagcagcaacatctacaagcacggcgacaccggcagaagatacttcgtggccctgaacaaggacggcacccccagagacggcgccagaagcaagagacaccagaagttcacccacttcctgcccagacccgtggaccccgagagagtgcccgagctgtacaaggacctgctgatgtacacctag

SEQ ID NO: 202163 - DNA, 237 bp, Artificial Sequence
  derived and/or modified sequence
atggcccccctggccgaggtgggcggcttcctgggcggcctggagggcctgggccagcaggtgggcagccacttcctgctgccccccgccggcgagagaccccccgccgccctgctgccccacagactgccccccgccgaccccgccagaagacagagagccggccaccccgccggcccccagcccctgagatacctgggcatccaccagtgcggcagcggcaccggccagtactag

SEQ ID NO: 202164 - DNA, 636 bp, Artificial Sequence
  derived and/or modified sequence
atggccccgcttgccgaagtgggcggctttctcggcgggctcgagggattaggccaacaggtgggatctcactttcttctcccaccggccggtgaaagaccacctctgctgggggagcgtaggagtgcggccgaacggtcagctagagggggcccaggcgcggcgcagctggcccacctgcatggcattttaaggcgccgccagttatactgtcgaacgggtttccacctgcagatcctgcccgatggctctgtccagggtaccagacaggaccatagtctcttcggaatcttagagttcatatcagtggcggtaggactcgtatctattcgaggagtggatagtgggctgtacctggggatgaatgataaaggggaactgtacggctctgaaaaactgacatctgagtgcatcttcagagaacagttcgaagaaaactggtacaacacttacagtagcaatatctataaacacggagacacaggcagaaggtacttcgtcgcgctaaacaaagatggaacgccacgcgacggcgccaggagtaaacggcaccagaagtttacgcacttcctgccacgccctgttgatccagaacgcgtgcctgagctgtacaaagatctcctcatgtatacgtag

SEQ ID NO: 202165 - DNA, 636 bp, Artificial Sequence
  derived and/or modified sequence
atggcccccctggccgaggtgggcggcttcctgggcggcctggagggcctgggccagcaggtgggcagccacttcctgctgcccccagctggggagcggccccccctgctgggggagcggcgctctgctgctgagaggtctgcccggggcggccctggggccgcccagctggcccacctgcacggcatcctgcggcggcggcagctgtactgcaggacaggcttccacctgcagatcctgcctgatggctctgtgcagggcacccggcaggaccacagcctgtttggcatcctggagttcatctctgtggccgtgggcctggtgtccatccggggcgtggacagcggcctgtacctgggcatgaatgacaagggggagctgtatggcagcgagaagctgaccagcgagtgcatcttccgggagcagtttgaggagaactggtacaacacctacagcagcaacatctacaagcacggggacacaggaagacgctactttgtggccctgaacaaggatggcaccccaagagatggagcccggagcaagaggcaccagaagttcacccacttcctgcccaggcctgtggaccctgagcgggtgcctgagctgtacaaggacctgctgatgtacacctag

SEQ ID NO: 202166 - DNA, 636 bp, Artificial Sequence
  derived and/or modified sequence
atggcccccctggccgaggtgggcggcttcctgggcggcctggaggggctgggccagcaggttggctcacatttcctgcttcctcctgcgggggaaaggccacctttgcttggcgaacgtcgtagtgccgcagaacgaagtgctaggggcggcccgggcgctgctcaacttgctcacttacacggtatactgcggcgcagacagctctactgcagaaccggctttcatctgcagatcctacccgatggctctgtgcagggcacccgacaggaccactcgctgttcggcatcttggaatttatctccgtagcagttggactcgtgagcatacgcggcgtggattctggcctgtatctgggcatgaacgacaaaggcgagctttatgggtcagagaagctgacgtcagagtgtatcttccgggaacagttcgaggaaaactggtataatacgtattcttctaacatttacaagcacggcgatacagggaggcgctactttgtggcactgaacaaggatggcacaccgagagatggagcccgatctaaaaggcaccagaagtttacccactttctgccacgtccagtggatcccgagcgcgtgccagagctgtataaagacctgctaatgtacacatag

SEQ ID NO: 202167 - DNA, 636 bp, Artificial Sequence
  derived and/or modified sequence
atggcccctctggcagaggtgggtgggttcttggggggtcttgaggggttaggccagcaggttggttcccactttctgttgcccccagccggagagcggccaccgctactgggcgagaggcggagcgctgccgagagatccgctcgaggagggccaggcgcagcccagctggcacacctgcacggaatcctccgcagaaggcagctgtactgcaggacaggctttcacctacagatactcccagacggaagtgtgcaagggacaagacaggatcattctttgttcgggattcttgagtttatctctgttgctgtgggtctcgtgagcataaggggcgtcgacagtgggctgtacctgggaatgaacgataaaggcgagctgtatggctctgagaagcttacctctgaatgtattttcagagagcagttcgaggaaaactggtacaacacctacagctctaacatttacaagcatggggacacagggagacgctactttgtggcactcaacaaggacggcactcctcgggatggtgccaggtccaagcgccaccaaaaattcacccacttcctcccacgccctgtggacccggagcgcgtgccagagctttataaggacttactcatgtacacatag

SEQ ID NO: 202168 - DNA, 237 bp, Artificial Sequence
  derived and/or modified sequence
atggctcccctggcggaggtgggcggatttctgggtgggctcgaagggctgggccagcaggtggggagtcatttcctgttaccccctgcaggcgagcgcccacctgccgctcttttgccccatcggttaccaccggcagatcccgctcgcaggcagcgggcagggcacccagcaggccctcagccgcttagatacctcggcatacatcaatgcggctccggtacaggccagtattag

SEQ ID NO: 202169 - DNA, 1688 bp, Artificial Sequence
  derived and/or modified sequence
tgcaaagtccctccggagcgacctcagaggagtaaccgggccttaactttttgcgctcgttttgctataatttttctctatccacctccatcccacccccacaacactctttactgggggggtcttttgtgttccggatctccccctccatggctcccttagccgaagtcgggggctttctgggcggcctggagggcttgggccagcaggtgggttcgcatttcctgttgcctcctgccggggagcggccgccgctgctgggcgagcgcaggagcgcggcggagcggagcgcgcgcggcgggccgggggctgcgcagctggcgcacctgcacggcatcctgcgccgccggcagctctattgccgcaccggcttccacctgcagatcctgcccgacggcagcgtgcagggcacccggcaggaccacagcctcttcggtatcttggaattcatcagtgtggcagtgggactggtcagtattagaggtgtggacagtggtctctatcttggaatgaatgacaaaggagaactctatggatcagagaaacttacttccgaatgcatctttagggagcagtttgaagagaactggtataacacctattcatctaacatatataaacatggagacactggccgcaggtattttgtggcacttaacaaagacggaactccaagagatggcgccaggtccaagaggcatcagaaatttacacatttcttacctagaccagtggatccagaaagagttccagaattgtacaaggacctactgatgtacacttgaagtgcgatagtgacattatggaagagtcaaaccacaaccattctttcttgtcatagttcccatcataaaataatgacccaaggagacgttcaaaatattaaagtctattttctactgagagactggatttggaaagaatattgagaaaaaaaaccaaaaaaaattttgactagaaatagatcatgatcactctttatatgtggattaagttcccttagatacattggattagtccttaccagtagactgaagccaaaaatctgttaaactgtggataatgggaaccctcacatggttgctgctggtgcctcacctctctggattatgtttactttaaaatttatgttaaaaatagagacttcatgttgaagaaatggattgacttagccaagagcattgctacataaattctgaggaccttgtagaattcacaggttatggcattatatgttttaagaaaaaaaaaaactaaacaacacctgggtgaaacatgaactatgaaacatgccacaccaagacagaacactttttaaaagaatggacctatttatacactttcaatttgaaaatatttattatatatatttatttattaaagagtttattttttactgggatatgaagataatacaaagagtaaaaaacaacaaaacttccgttattgtgccattactttattgtggtgtcttgctctgtaaagaggacattattataccaccttaaccatagaatcagattttgaatttctttttaaaatatagtatagattatattttttatgcagtcaattgccttctaaatgtaacgttggtttcttttggcctagaaaaatgcctcattgatttgtattaaattcaacacacattcaaaagggaattaaacattttcatgcagtgttttggc

SEQ ID NO: 202170 - DNA, 658 bp, Artificial Sequence
  derived and/or modified sequence
ttgtgttccggatctccccctccatggctcccttagccgaagtcgggggctttctgggcggcctggagggcttgggccagcaggtgggttcgcatttcctgttgcctcctgccggggagcggccgccggcagctctattgccgcaccggcttccacctgcagatcctgcccgacggcagcgtgcagggcacccggcaggaccacagcctcttcggtatcttggaattcatcagtgtggcagtgggactggtcagtattagaggtgtggacagtggtctctatcttggaatgaatgacaaaggagaactctatggatcagagaaacttacttccgaatgcatctttagggagcagtttgaagagaactggtataacacctattcatctaacatatataaacatggagacactggccgcaggtattttgtggcacttaacaaagacggaactccaagagatggcgccaggtccaagaggcatcagaaatttacacatttcttacctagaccagtggatccagaaagagttccagaattgtacaaggacctactgatgtacacttgaagtgcgatagtgacattatggaagagtcaaaccacaaccattctttcttgtcatagttcccatcataaaataatgacccaaggagacgttcaaa

SEQ ID NO: 202171 - DNA, 1016 bp, Artificial Sequence
  derived and/or modified sequence
agcgacctcagaggagtaaccgggccttaactttttgcgctcgttttgctataatttttctctatccacctccatcccacccccacaacactctttactgggggggtcttttgtgttccggatctccccctccatggctcccttagccgaagtcgggggctttctgggcggcctggagggcttgggccagcaggtgggttcgcatttcctgttgcctcctgccggggagcggccgccgctgctgggcgagcgcaggagcgcggcggagcggagcgcgcgcggcgggccgggggctgcgcagctggcgcacctgcacggcatcctgcgccgccggcagctctattgccgcaccggcttccacctgcagatcctgcccgacggcagcgtgcagggcacccggcaggaccacagcctcttcggtatcttggaattcatcagtgtggcagtgggactggtcagtattagaggtgtggacagtggtctctatcttggaatgaatgacaaaggagaactctatggatcagagaaacttacttccgaatgcatctttagggagcagtttgaagagaactggtataacacctattcatctaacatatataaacatggagacactggccgcaggtattttgtggcacttaacaaagacggaactccaagagatggcgccaggtccaagaggcatcagaaatttacacatttcttacctagaccagtggatccagaaagagttccagaattgtacaaggacctactgatgtacacttgaagtgcgatagtgacattatggaagagtcaaaccacaaccattctttcttgtcatagttcccatcataaaataatgacccaaggagacgttcaaaatattaaagtctattttctactgagagactggatttggaaagaatattgagaaaaaaaaccaaaaaaaattttgactagaaatagatcatgatcactctttatatgtggattaagttcccttagatacattggattagtccttaccagtagac

SEQ ID NO: 202172 - protein, 394 aa, Artificial Sequence
  derived and/or modified sequence
MGMKHSSRCLLLRRKMAENAAESTEVNSPPSQPPQPVVPAKPVQCVHHVSTQPSCPGRGKMSKLLNPEEMTSRDYYFDSYAHFGIHEEMLKDEVRTLTYRNSMYHNKHVFKDKVVLDVGSGTGILSMFAAKAGAKKVFGIECSSISDYSEKIIKANHLDNIITIFKGKVEEVELPVEKVDIIISEWMGYCLFYESMLNTVIFARDKWLKPGGLMFPDRAALYVVAIEDRQYKDFKIHWWENVYGFDMTCIRDVAMKEPLVDIVDPKQVVTNACLIKEVDIYTVKTEELSFTSAFCLQIQRNDYVHALVTYFNIEFTKCHKKMGFSTAPDAPYTHWKQTVFYLEDYLTVRRGEEIYGTISMKPNAKNVRDLDFTVDLDFKGQLCETSVSNDYKMR

SEQ ID NO: 202173 - DNA, 1185 bp, Artificial Sequence
  derived and/or modified sequence
atgggcatgaagcacagcagcagatgcctgctgctgagaagaaagatggccgagaacgccgccgagagcaccgaggtgaacagcccccccagccagcccccccagcccgtggtgcccgccaagcccgtgcagtgcgtgcaccacgtgagcacccagcccagctgccccggcagaggcaagatgagcaagctgctgaaccccgaggagatgaccagcagagactactacttcgacagctacgcccacttcggcatccacgaggagatgctgaaggacgaggtgagaaccctgacctacagaaacagcatgtaccacaacaagcacgtgttcaaggacaaggtggtgctggacgtgggcagcggcaccggcatcctgagcatgttcgccgccaaggccggcgccaagaaggtgttcggcatcgagtgcagcagcatcagcgactacagcgagaagatcatcaaggccaaccacctggacaacatcatcaccatcttcaagggcaaggtggaggaggtggagctgcccgtggagaaggtggacatcatcatcagcgagtggatgggctactgcctgttctacgagagcatgctgaacaccgtgatcttcgccagagacaagtggctgaagcccggcggcctgatgttccccgacagagccgccctgtacgtggtggccatcgaggacagacagtacaaggacttcaagatccactggtgggagaacgtgtacggcttcgacatgacctgcatcagagacgtggccatgaaggagcccctggtggacatcgtggaccccaagcaggtggtgaccaacgcctgcctgatcaaggaggtggacatctacaccgtgaagaccgaggagctgagcttcaccagcgccttctgcctgcagatccagagaaacgactacgtgcacgccctggtgacctacttcaacatcgagttcaccaagtgccacaagaagatgggcttcagcaccgcccccgacgccccctacacccactggaagcagaccgtgttctacctggaggactacctgaccgtgagaagaggcgaggagatctacggcaccatcagcatgaagcccaacgccaagaacgtgagagacctggacttcaccgtggacctggacttcaagggccagctgtgcgagaccagcgtgagcaacgactacaagatgagatag

SEQ ID NO: 202174 - DNA, 1185 bp, Artificial Sequence
  derived and/or modified sequence
atgggtatgaagcatagtagcaggtgcttgctgctccgtagaaagatggcggaaaacgcggcagagagcactgaggtcaatagtcccccctctcagcctccacaacccgtggtgcccgctaagccggtgcagtgcgtacaccacgtctctactcagcctagctgccctggccgagggaagatgtccaaactgctcaatccagaggagatgacgtctcgcgactactatttcgattcttacgctcacttcgggatccacgaggagatgctcaaagacgaggttaggactctcacatatcgaaatagcatgtatcacaataaacatgtgttcaaagacaaagtggttctcgatgttggttccggaacaggaatcctgtcaatgttcgccgccaaggccggggctaaaaaggtctttgggatcgagtgttcgtctatctctgactattcagaaaagattattaaagcaaatcacttggataatattattaccatttttaaggggaaagttgaagaagtggaattgccagtggaaaaggtagatatcatcatatccgagtggatgggctactgcctgttctatgagagcatgttgaacaccgtgattttcgcaagggacaagtggctaaagcctggcggactgatgttcccggatagggccgccctgtacgtggtggccatcgaagatagacagtataaggacttcaagatacactggtgggaaaacgtctacggattcgacatgacttgcattagggatgtggccatgaaagaacccctcgtcgatatcgtcgacccaaaacaggttgtgacgaatgcgtgcctcattaaggaagttgacatctacactgtgaaaacggaggagctgagctttacgtccgccttctgtctgcagatccagagaaacgattatgtacacgccttggttacctactttaacattgagttcacaaaatgtcataagaaaatggggtttagcacggcacccgatgcaccctacactcactggaagcagacagtgttctacttggaggactacctgaccgtcaggagaggagaggagatatacggcaccatatccatgaagccaaatgcaaaaaacgtccgggatctggattttacagttgatttagactttaaggggcagctgtgcgagacgagcgtgtccaatgattataaaatgcgttag

SEQ ID NO: 202175 - DNA, 1185 bp, Artificial Sequence
  derived and/or modified sequence
atgggcatgaagcacagcagccgctgcctgctgctgcggaggaagatggccgagaatgctgctgagagcacagaggtgaacagcccccccagccagcccccccagcctgtggtgcctgccaagcctgtgcagtgtgtgcaccacgtgtccacccagcccagctgccccggccggggcaagatgagcaagctgctgaaccctgaggagatgaccagccgggactactactttgacagctatgcccacttcggcatccacgaggagatgctgaaggatgaggtgaggaccctgacctacagaaacagcatgtaccacaacaagcacgtgttcaaggacaaggtggtgctggatgtgggcagcggcaccggcatcctgtccatgtttgctgccaaggccggggccaagaaggtgtttggaattgaatgtagcagcatcagtgactacagcgagaagatcatcaaggccaaccacctggacaacatcatcaccatcttcaagggcaaggtggaggaggtggagctgcctgtggagaaggtggacatcatcatcagcgagtggatgggctactgcctcttctatgaatccatgctgaacacagtcatctttgcccgggacaagtggctgaagccaggcggcctgatgtttcctgacagagctgccctgtatgtggtggccattgaagatcggcagtacaaggacttcaagatccactggtgggagaatgtgtatggctttgacatgacctgcatcagagatgtggccatgaaggagcccctggtggacatcgtggaccccaagcaggtggtgaccaatgcctgcctgatcaaggaggtggacatctacacagtgaagacagaggagctgtccttcaccagcgccttctgcctgcagatccagagaaatgactatgtgcacgccctggtgacctacttcaacatcgagttcaccaagtgccacaagaagatgggcttcagcacagccccagatgccccctacacccactggaagcagaccgtcttctacctggaggactacctgactgtgagaagaggagaggagatctacggcaccatctccatgaagcccaatgccaagaatgtgcgggacctggacttcaccgtggacctggacttcaagggccagctgtgtgagacctctgtgtccaatgactacaagatgaggtag

SEQ ID NO: 202176 - DNA, 1185 bp, Artificial Sequence
  derived and/or modified sequence
atgggcatgaagcacagcagccggtgcctgctgctgcggcggaagatggctgagaacgcagccgaaagcacagaagtgaatagccctccatctcagccgcctcagccagtagtgccagctaaaccagtacagtgcgtgcaccacgttagtacccagccctcttgtcccgggaggggaaaaatgtctaaactcctcaacccagaggagatgacatccagggactactacttcgacagctacgcacactttggtattcatgaagagatgctcaaggatgaagtccggacactgacataccggaattcaatgtaccataacaaacacgtgtttaaggacaaagtagtgctcgacgtcggaagcggcacgggaatcctgtccatgtttgcagccaaagcgggggcaaagaaagttttcgggatcgagtgtagtagtatttctgattattcagaaaaaatcattaaggcaaaccatttggataacattataaccattttcaaaggtaaagtagaggaggtggaattacccgtggagaaggtagacattatcatttctgagtggatgggttattgtctcttttacgagagcatgttgaacacagtgatctttgcaagggataagtggctgaaaccggggggtctcatgtttcctgatagggcagctctgtatgtggtggctatcgaagatcgccagtataaagactttaagatccactggtgggagaatgtgtacgggtttgatatgacatgcatacgcgacgtggcgatgaaggaacctctggtggacatcgtggaccccaagcaggtggtaactaacgcttgtctcatcaaagaggtggacatttacaccgttaagactgaggagttgagtttcactagtgctttttgcctacagatccagcggaatgactacgtgcacgctcttgtcacttattttaatatcgagtttacaaaatgtcataaaaaaatgggcttctcaactgctccagatgcgccctatacccattggaagcagacagtcttctacttagaggactacctgacggtgagaaggggtgaggagatctatggtacaatctctatgaagcctaacgcaaagaatgtcagagaccttgacttcacggtggacttagatttcaagggccagttgtgtgagacgtctgtaagcaatgactacaagatgagatag

SEQ ID NO: 202177 - DNA, 2366 bp, Artificial Sequence
  derived and/or modified sequence
agttggcggctgcctccggccggccggactttgcgagcagcctggagaggatccgcgaccgccgccgccgccgccgcggaggcttcggggctgcttccctcgagcttagcccgcagcgcgggtggagaggggcggggagggggtcgggggcacgagaagaacttgaaaccgtgtgaaggaatccggagcagatgagaagggaggaaaataaaagaaagtggagactgcagaacagactccgctgtggctgactgtgccggccgacgctccagctgaggggctgggttggatttttttttttctcccatcctctcgctctctcttttaaagcgacaccagctctctctcctcctctactatctcggtatcaccaaacccttgccggctcttatgggcatgaaacactcctcccgctgcctgctcctgaggaggaaaatggcggagaacgcggccgagagcaccgaggtgaacagccccccctcccagcccccccagcccgtcgtccctgctaagcccgtgcaatgcgtccatcatgtgtccactcaacccagctgcccaggacggggcaagatgtccaagctgctgaacccagaggagatgacctcgagagattattacttcgactcctatgcccactttgggatccacgaggaaatgctgaaggatgaggtgcggactctcacttaccggaactccatgtaccacaacaagcacgtgttcaaggacaaagtggtactggatgtggggagtggtactgggatcctttccatgttcgctgccaaggcaggggccaagaaggtgtttgggatcgaatgctccagtatttctgactactcagagaagatcattaaggccaaccacttggacaacatcatcaccatatttaagggtaaagtggaagaggtggagctgcctgtggagaaggtggacatcatcatcagcgagtggatgggctactgtctgttctatgagtccatgctcaacacggtgatctttgccagggacaagtggctgaaacctggagggcttatgtttccagaccgggcagctttgtacgtggtagcgattgaagacagacagtacaaggacttcaaaatccactggtgggagaatgtctatggctttgacatgacctgcatccgggacgtggccatgaaggagcctctagtggacatcgtggatccaaagcaagtggtgaccaatgcctgtttgataaaggaggtggacatttacacagtgaagacggaagagctatcgttcacatctgcattctgcctgcagatacagcgcaacgactacgtccacgccctggtcacctattttaatattgaatttaccaagtgccacaagaaaatggggttttccacagcccctgatgctccctacacccactggaagcagaccgtcttctacttggaagattacctcactgtccggaggggggaggaaatctacgggaccatatccatgaagccaaatgccaaaaatgtgcgagacctcgatttcacagtagacttggattttaagggacagctgtgtgaaacatctgtatctaatgactacaaaatgcgttagcacacgtgggaagctgcagagagcaacgagaaaaggaactctcacctcgatctgccgtgccgtcccaaagaataccgtttgcaggactacacacttgaaaaccagagttttcaactctgccttgaagattggtgaactccccagggctcccgtgggctctgccactggacagaaggcctccagctcctccgctctgccctggtagcccttcacgaaggctttgtgttgccaacaaagagcgacctggcgtgctgtggctgggccccgagggtggaaacgtattcgcgtctccccgtctcctccttaactgtgactctccgggtcttctgagttttgcatgctgcgggtgtctaggacagattgcttccactagaacctggagacatagcatctttgatagcataagccagattatctgtgtgtgcggtggtgtgcgtgtgcgtgcatgtgtgaatgtgagcagcatagttgatatttacccacaaacacctgtatatgcgtgcatatacaaccaagtgggtagacctaggtgttctctcagaggggtgtgtgtgtgtgtgcgtgcgcgtgtgcctagaatatatattactctcagaggagattctgttgcttttgaataggaatttgttttgtgattagttcgccccttccccaccccttaccagatgttaagcagctatgaaacattctctgtactagttctggtctccttttgactggactgtggctctgaaccttgagcatagtaccacggactccgtgggcgctcaataaacacacatgagaacaaa

SEQ ID NO: 202178 - DNA, 1185 bp, Artificial Sequence
  derived and/or modified sequence
atgggtatgaaacactcttcaaggtgtctgttgctacggaggaagatggccgaaaatgcagcggagtcaacagaagtaaattccccaccatctcagcctccccaaccggtggtcccggctaagccagtgcagtgcgttcatcatgttagtactcagccatcttgtcccggtcgcggaaagatgtcgaagctgctgaacccagaggaaatgactagccgggattactatttcgatagctacgctcacttcggcattcatgaagagatgcttaaagatgaagtgaggacacttacttatagaaatagcatgtaccataataaacatgtgtttaaggacaaggtggtgcttgatgtgggcagtggtaccggcattctatcaatgttcgcagcgaaggccggagcgaagaaagtgtttgggattgaatgcagtagcattagcgattattcagagaagataattaaagcaaatcacctggataatatcattaccatttttaaagggaaggtggaagaggtggagttgcccgtcgagaaggtggatatcatcatctcggagtggatgggatactgcttgttttacgaaagtatgctgaacacagtcatctttgcacgcgataaatggctgaaacctggaggcctgatgttccctgatagagcggctctctacgttgtggcgatcgaagaccgacaatacaaagatttcaagatccactggtgggagaatgtttatggattcgatatgacatgcattagggacgttgcgatgaaagagcccctggtcgacatcgtggaccccaagcaggttgtgactaatgcgtgtctgatcaaggaggtggacatctatacagtaaagaccgaagagctctctttcacctctgctttttgcttgcagatccaaaggaacgattacgtccatgcgctggtcacttatttcaacatagagttcaccaagtgtcacaagaaaatgggcttttctacagctcccgacgcgccttatacgcattggaagcaaactgtcttctatcttgaggattatctgaccgtcaggcgcggtgaagagatttacggtacaatctccatgaagcccaacgcaaaaaacgtgcgcgacctcgactttacagtggatctcgacttcaagggccagctgtgcgaaacttctgtatccaatgattacaagatgaggtag

SEQ ID NO: 202179 - protein, 1589 aa, Artificial Sequence
  derived and/or modified sequence
MSLPFYQRCHQHYDLSYRNKDVRSTVSHYQREKKRSAVYTQGSTAYSSRSSAAHRRESEAFRRASASSSQQQASQHALSSEVSRKAASAYDYGSSHGLTDSSLLLDDYSSKLSPKPKRAKHSLLSGEEKENLPSDYMVPIFSGRQKHVSGITDTEEERIKEAAAYIAQRNLLASEEGITTSKQSTASKQTTASKQSTASKQSTASKQSTASRQSTASRQSVVSKQATSALQQEETSEKKSRKVVIREKAERLSLRKTLEETETYHAKLNEDHLLHAPEFIIKPRSHTVWEKENVKLHCSIAGWPEPRVTWYKNQVPINVHANPGKYIIESRYGMHTLEINGCDFEDTAQYRASAMNVKGELSAYASVVVKRYKGEFDETRFHAGASTMPLSFGVTPYGYASRFEIHFDDKFDVSFGREGETMSLGCRVVITPEIKHFQPEIQWYRNGVPLSPSKWVQTLWSGERATLTFSHLNKEDEGLYTIRVRMGEYYEQYSAYVFVRDADAEIEGAPAAPLDVKCLEANKDYIIISWKQPAVDGGSPILGYFIDKCEVGTDSWSQCNDTPVKFARFPVTGLIEGRSYIFRVRAVNKMGIGFPSRVSEPVAALDPAEKARLKSRPSAPWTGQIIVTEEEPSEGIVPGPPTDLSVTEATRSYVVLSWKPPGQRGHEGIMYFVEKCEAGTENWQRVNTELPVKSPRFALFDLAEGKSYCFRVRCSNSAGVGEPSEATEVTVVGDKLDIPKAPGKIIPSRNTDTSVVVSWEESKDAKELVGYYIEASVAGSGKWEPCNNNPVKGSRFTCHGLVTGQSYIFRVRAVNAAGLSEYSQDSEAIEVKAAIAPPSPPCDITCLESFRDSMVLGWKQPDKIGGAEITGYYVNYREVIDGVPGKWREANVKAVSEEAYKISNLKENMVYQFQVAAMNMAGLGAPSAVSECFKCEEWTIAVPGPPHSLKCSEVRKDSLVLQWKPPVHSGRTPVTGYFVDLKEAKAKEDQWRGLNEAAIKNVYLKVRGLKEGVSYVFRVRAINQAGVGKPSDLAGPVVAETRPGTKEVVVNVDDDGVISLNFECDKMTPKSEFSWSKDYVSTEDSPRLEVESKGNKTKMTFKDLGMDDLGIYSCDVTDTDGIASSYLIDEEELKRLLALSHEHKFPTVPVKSELAVEILEKGQVRFWMQAEKLSGNAKVNYIFNEKEIFEGPKYKMHIDRNTGIIEMFMEKLQDEDEGTYTFQLQDGKATNHSTVVLVGDVFKKLQKEAEFQRQEWIRKQGPHFVEYLSWEVTGECNVLLKCKVANIKKETHIVWYKDEREISVDEKHDFKDGICTLLITEFSKKDAGIYEVILKDDRGKDKSRLKLVDEAFKELMMEVCKKIALSATDLKIQSTAEGIQLYSFVTYYVEDLKVNWSHNGSAIRYSDRVKTGVTGEQIWLQINEPTPNDKGKYVMELFDGKTGHQKTVDLSGQAYDEAYAEFQRLKQAAIAEKNRARVLGGLPDVVTIQEGKALNLTCNVWGDPPPEVSWLKNEKALASDDHCNLKFEAGRTAYFTINGVSTADSGKYGLVVKNKYGSETSDFTVSVFIPEEEARMAALESLKGGKKAK

SEQ ID NO: 202180 - DNA, 4770 bp, Artificial Sequence
  derived and/or modified sequence
atgtcacttccgttttaccaaaggtgccatcagcattacgatctgtcttaccgcaataaggacgtgcgcagcaccgtgagtcactaccagagagagaagaagcggtccgcggtgtatacacaaggaagcactgcatactcatccaggtccagcgccgcacaccgcagagaaagcgaggccttccggcgggcaagcgcatccagttcacagcagcaagctagccagcacgcccttagcagtgaagtctcacggaaggctgcttcagcctatgattatggatcgtcccatggcttaaccgattcttccctcttgttggacgactattctagcaaactgagcccaaaaccaaaaagggccaaacacagcctgctgtctggagaggaaaaagagaacctgccgtccgactacatggtgccgatcttttccggacgtcagaaacacgtgtcaggaatcactgataccgaagaggagcgaatcaaggaggcagctgcctacatagcccagaggaacctgctcgcttctgaggaggggattacaacgtctaaacagtcaacggctagtaaacagaccacagccagcaagcagtcgactgcatccaaacaaagtaccgcgtccaaacagagcaccgcctcacggcagtccaccgcttctcggcagtctgtcgtgtctaagcaggccacctccgccctgcagcaagaggaaacgtccgaaaagaagagtaggaaagttgtgatccgcgagaaggctgagaggctttccctgcgcaaaaccctggaagaaactgagacttaccacgcaaaattaaacgaagaccatctcctccacgcccctgagtttattatcaaaccacgctctcacacagtctgggagaaggagaacgtgaaactccactgttctatcgcagggtggccggaacccagggtgacttggtataaaaaccaggtgcccatcaacgttcacgctaatcccgggaagtacataatcgagagccgctacggaatgcataccttggagattaatggatgtgatttcgaggacaccgcccagtaccgagcttcggctatgaacgtcaagggcgagctgtctgcctacgccagcgttgttgtaaagaggtataagggggagttcgatgaaactcgttttcacgccggcgcttctactatgccgctgagtttcggagtgaccccatatgggtacgcttcccggtttgagatacattttgatgacaaatttgacgtgagcttcgggagggagggtgaaactatgagtcttgggtgccgggtcgtcatcacacctgagatcaagcacttccaacctgaaattcagtggtacagaaatggtgtgcccctctcaccaagtaagtgggtgcaaacgctctggtccggagagcgtgctacactgacctttagccacttaaacaaggaggatgaagggctgtacaccattcgcgtcagaatgggagaatattacgagcagtatagcgcctacgttttcgttcgcgacgctgatgctgagatcgagggcgctccggcagcacccctggatgtcaaatgcctggaggctaacaaagactacatcatcatttcctggaagcagcctgccgttgatggcggatctcctatcttggggtatttcatcgataagtgtgaggtgggcacagacagttggtcccagtgcaatgacacccctgttaagtttgcccggttccccgtcactgggctcatcgagggccgcagctatatatttagagtcagggccgtgaacaaaatgggcattgggtttccatcccgcgtgtcagagcccgtggccgccctggaccctgcagagaaggcaaggctgaagtcccgtccctcggctccctggaccggccagatcattgtgaccgaagaggaaccttccgaaggcattgtcccaggcccacctaccgatctctcggtcacagaggctactcggtcatatgtagtactgagttggaagcccccaggccagagggggcatgaaggcataatgtatttcgtcgaaaagtgcgaagcagggacagaaaattggcaacgcgtcaacaccgagctgccggtgaagtcacctcgattcgctctgtttgacctggccgagggaaagtcttattgtttcagggttcgctgttcaaattctgcgggggtaggagagcctagtgaagcaacagaagttaccgtggtcggagacaaactggacatccccaaggctcctggcaaaatcattccttcaaggaacacagatacgtccgtggtcgtctcatgggaagaaagtaaagatgctaaggagttggttggctattacattgaggcctctgttgcggggtctggaaagtgggaaccgtgtaacaacaatccggtcaaaggttccagattcacctgccacggacttgttactggccagtcctacatttttagggtacgcgcagtgaatgcggccggcctgagcgaatatagccaggactccgaagcaatcgaggttaaagcagcaatcgcacctccctcccccccctgcgacattacatgcctggaatccttccgagactctatggtgttaggctggaagcagccagacaaaattggtggggctgagattaccgggtactacgttaattacagagaagttattgacggcgttccaggtaaatggagggaggcaaatgtcaaagccgtgagtgaggaggcatataagatcagtaacctgaaagaaaatatggtttaccagtttcaggtggcggccatgaatatggcgggtttgggcgcaccatccgccgtgtctgaatgcttcaagtgcgaggagtggacgatcgctgtgcccgggcctccacatagtctcaagtgctcggaagtgcgcaaagatagcctggtgctccagtggaagccccccgtccacagtggacgtaccccggtgaccgggtactttgtggatctgaaagaagccaaggccaaggaagaccagtggagagggctgaacgaggccgccatcaaaaacgtgtaccttaaagtacggggactgaaggagggggtgagctacgtgtttagggtgcgggcgattaatcaggccggtgtcggcaagcccagcgatctcgccggaccagtggtcgcagagactcgccccggcacaaaggaagtcgtggtgaacgtggacgatgacggggtgatcagccttaatttcgagtgcgacaagatgacaccaaagtctgagtttagttggagcaaagattacgtgtccacagaggattctcctcgcttggaggtagaaagtaaaggcaacaagaccaaaatgacgttcaaagacctgggcatggatgacctagggatctactcgtgtgatgttaccgatactgacggcattgcaagctcatatttaatcgatgaagaggagctgaaacgacttctggccctgtcacatgaacacaagtttcctacagttcccgtcaagtctgaactcgcagtggagatactggaaaagggtcaagtgcgcttttggatgcaggcagagaaactgagtggcaacgcaaaagtgaattacatttttaacgagaaggaaattttcgagggtcctaaatacaagatgcatatcgatagaaatacaggaattattgaaatgtttatggagaagctgcaagatgaggacgagggaacctatacattccaactgcaagatgggaaagctacgaaccactcaaccgtggtgcttgtgggcgacgtctttaagaaactgcagaaagaggccgagtttcagcggcaggaatggatcagaaaacaggggccacactttgttgagtacctcagctgggaggttacaggagagtgcaacgtgctcctcaagtgtaaggtcgctaacattaagaaagaaacacatattgtttggtataaggatgaacgcgaaataagcgttgacgagaaacacgactttaaagacggcatctgtaccctgctcataaccgagttttccaaaaaggacgcaggtatatacgaggtgatcctgaaggacgacaggggaaaggacaagtcaagactgaaactagtggacgaggccttcaaggaactgatgatggaggtgtgcaagaaaatagctctatccgctactgatttaaagatccaatctacggccgagggaatccagttatattcattcgttacttattatgtggaagacttgaaggtgaactggtcacataatggttccgccattcgctacagtgaccgtgtgaagacaggtgtcactggagagcagatctggcttcagattaatgagccgaccccaaacgacaaagggaagtatgtgatggaactctttgatggtaagacaggacaccagaagaccgttgatttaagcggtcaggcctatgatgaagcctatgcagagtttcagcgcctgaaacaggccgccatcgcagagaagaacagggcacgggttctgggcggtttacccgacgttgtgacgattcaggagggaaaggccctaaacctcacctgtaacgtttggggggacccaccccccgaggtttcttggctgaagaatgagaaggcactagctagcgacgaccattgtaaccttaaatttgaagcagggcgcaccgcatattttacaattaatggtgtgtccacagcggacagcggcaaatacggattggtcgtgaagaataagtatggctccgagacatcagactttaccgtgagtgttttcattcctgaagaagaagccaggatggccgcattagagtccctgaagggtggcaaaaaggctaagtag

SEQ ID NO: 202181 - DNA, 4770 bp, Artificial Sequence
  derived and/or modified sequence
atgagcctgcccttctaccagcgctgccaccagcactatgacctgagctacagaaacaaggatgtgcgcagcacagtgagccactaccagcgggagaagaagaggtctgctgtgtacacccagggcagcacagcctacagcagccgcagcagcgctgcccacagaagagagagcgaggccttccggcgggccagcgccagcagcagccagcagcaggccagccagcacgccctgagcagcgaggtgtccaggaaggccgccagcgcctatgactatggcagcagccacggcctgacagacagcagcctgctgctggatgactacagcagcaagctgagccccaagcccaagagggccaagcacagcctgctgtctggagaggagaaggagaacctgcccagcgactacatggtgcccatcttcagcggccggcagaagcacgtgtctggcatcacagacacagaggaggagcgcatcaaggaggccgccgcctacatcgcccagaggaacctgctggccagcgaggagggcatcaccaccagcaagcagagcacagccagcaagcagaccacagccagcaagcagagcacagccagcaagcagagcacagccagcaagcagagcacagccagccggcagagcacagccagccggcagagcgtggtgtccaagcaggccaccagcgccctgcagcaggaggagaccagcgagaagaagagcaggaaggtggtgatccgggagaaggccgagcggctgagcctgaggaagaccctggaggagacagagacctaccacgccaagctgaatgaagaccacctgctgcacgcccctgagttcatcatcaagcccaggagccacacagtgtgggagaaggaaaatgtgaagctgcactgcagcattgctggctggccagagccccgggtgacctggtacaagaaccaggtgcccatcaacgtgcacgccaaccctgggaagtacatcatcgagagccgctatggcatgcacaccctggagatcaatggctgtgactttgaggacacagcccagtaccgggccagcgccatgaatgtgaagggggagctgagcgcctatgcctctgtggtggtgaagcgctacaagggggagtttgatgagacccgcttccacgccggggccagcaccatgcccctgagctttggagtgaccccctacggctacgccagcagatttgagatccactttgatgacaagtttgatgtgtcctttggccgggagggggagaccatgagcctgggctgccgggtggtgatcaccccagagatcaagcacttccagcctgagatccagtggtacagaaatggagtgcccctgagccccagcaagtgggtgcagaccctgtggagcggggagcgggccaccctgaccttcagccacctgaacaaggaggatgagggcctgtacaccatccgggtgaggatgggagagtactatgagcagtacagcgcctacgtgtttgtgagagatgctgatgctgagattgagggcgccccagctgcccccctggatgtgaagtgcctggaggccaacaaggactacatcatcatctcctggaagcagcctgctgtggatggcggcagccccatcctgggctacttcatcgacaagtgtgaggtgggcacagacagctggagccagtgcaatgacacccctgtgaagtttgcccgcttccctgtgacaggcctgattgagggccgcagctacatcttccgggtgcgggctgtgaacaagatgggcatcggcttccccagccgggtgtctgagcctgtggccgccctggaccctgctgagaaggcccggctgaagagccggcccagcgccccctggacaggccagatcatcgtgacagaggaggagcccagcgagggcatcgtgcccggccccccaacagacctgtctgtgacagaggccaccaggagctatgtggtgctgtcctggaagcccccaggccagaggggccacgagggcatcatgtactttgtggagaagtgtgaggccggcacagagaactggcagagggtgaacacagagctgcctgtgaagagccccaggtttgccctgtttgacctggccgagggcaagagctactgcttccgggtgcgctgcagcaacagcgctggggtgggggagcccagcgaggccacagaggtgacagtggtgggggacaagctggacatccccaaggcccctgggaagatcatccccagcaggaacacagacacctctgtggtggtgtcctgggaggagagcaaggatgccaaggagctggtgggctactacatcgaggcctctgtggccggcagcggcaagtgggagccctgcaacaacaaccctgtgaagggcagccgcttcacctgccacggcctggtgacaggccagagctacatcttccgggtgcgggctgtgaatgctgctggcctgtctgagtacagccaggacagcgaggccatcgaggtgaaggccgccatcgccccacccagccccccctgtgacatcacctgcctggagagcttccgggacagcatggtgctgggctggaagcagcctgacaagattggaggagctgagatcaccggctactacgtgaactaccgggaggtgattgatggagtgcctgggaagtggagggaggccaacgtgaaggctgtgtctgaggaggcctacaagatcagcaacctgaaggagaacatggtgtaccagttccaggtggccgccatgaacatggccggcctgggcgcccccagcgctgtgtctgagtgcttcaagtgtgaggagtggaccatcgctgtgcccggccccccccacagcctgaagtgcagcgaggtgaggaaggacagcctggtgctgcagtggaagccccctgtgcacagcggccgcacccctgtgacaggctactttgtggacctgaaggaggccaaggccaaggaggaccagtggaggggcctgaatgaagctgccatcaagaatgtgtacctgaaggtgcggggcctgaaggagggcgtgtcctatgtgttccgggtgcgggccatcaaccaggccggcgtgggcaagcccagcgacctggccggccctgtggtggccgagaccaggcctggcaccaaggaggtggtggtgaatgtggatgatgatggagtcatcagcctgaactttgaatgtgacaagatgacccccaagtctgagttctcctggagcaaggactatgtgtccacagaggacagcccccggctggaggtggagagcaaaggaaacaagaccaagatgaccttcaaggacctgggcatggatgacctgggcatctacagctgtgatgtgacagacacagatggcatcgccagcagctacctgattgatgaggaggagctgaagaggctgctggccctgagccatgagcacaagttccccaccgtgcctgtgaagtctgagctggccgtggagatcctggagaagggccaggtgcgcttctggatgcaggccgagaagctgtctggaaatgccaaggtgaactacatcttcaatgagaaggagatctttgagggccccaagtacaagatgcacatcgacaggaacacaggcatcatcgagatgttcatggagaagctgcaggatgaagatgagggcacctacaccttccagctgcaggacggcaaggccaccaaccacagcacagtggtgctggtgggagatgtgttcaagaagctgcagaaggaggccgagttccagaggcaggagtggatcaggaagcagggcccccactttgtggagtacctgtcctgggaggtgactggagaatgtaatgtgctgctgaagtgcaaggtggccaacatcaagaaggagacccacatcgtgtggtacaaggatgagcgggagatctctgtggatgagaagcatgacttcaaggatggcatctgcaccctgctgatcacagagttcagcaagaaggatgctggcatctatgaggtgatcctgaaggatgaccggggcaaggacaagagccggctgaagctggtggatgaggccttcaaggagctgatgatggaggtgtgcaagaagatcgccctgagcgccacagacctgaagatccagagcacagctgagggcatccagctgtacagctttgtgacctactacgtggaggacctgaaggtgaactggagccacaatggaagtgccatccgctacagcgacagagtgaagacaggagtgactggagagcagatctggctgcagatcaatgagcccaccccaaatgacaagggcaagtatgtgatggagctgtttgatggcaagacaggccaccagaagacagtggacctgagcggccaggcctatgatgaggcctatgcagagttccagaggctgaagcaggccgccatcgccgagaagaacagagcccgggtgctgggcggcctgcctgatgtggtgaccatccaggagggcaaggccctgaacctgacctgcaatgtgtggggagaccccccacctgaggtgtcctggctgaagaatgagaaggccctggccagtgatgaccactgcaacctgaagtttgaagctggccgcacagcctacttcaccatcaacggggtgtccacagctgacagcggcaagtatggcctggtggtgaagaacaagtatggcagcgagaccagtgacttcaccgtgtctgtgttcatccctgaggaggaggccaggatggccgccctggagagcctgaagggcggcaagaaggccaagtag

SEQ ID NO: 202182 - DNA, 4770 bp, Artificial Sequence
  derived and/or modified sequence
atgagcctgcccttctaccagcggtgccaccagcactacgacctgagctaccggaataaagatgtgaggagcacggtcagtcactaccaaagggagaaaaaacgatctgctgtttacacccaaggctccactgcctacagcagcagaagtagtgcagcccatagacgtgagtccgaggcgtttagacgtgctagtgcctcctctagccagcaacaggctagccagcacgcactcagcagtgaagtgagcagaaaagctgccagtgcctacgactacggctcctcccatggtttgaccgacagctcactgctgctagatgactatagcagtaagttgtcccctaagcccaaaagggcaaagcactctctcctgtctggggaggagaaggaaaacctcccgtccgactacatggtcccaatcttctcaggccgccaaaaacacgtctccggcatcaccgacaccgaggaagagcgtatcaaagaggccgctgcttacatcgcgcagcgcaatctgttagcaagtgaggaaggaattacgactagcaagcagagcactgcatcaaaacagacaacagcttcgaagcagtctaccgccagtaagcagtccacagcctccaaacaatccaccgcctccagacagtcgactgctagccgtcagagtgtagtgtctaaacaagctacttctgcactgcaacaagaggagacaagcgagaagaagagtagaaaagttgtcatccgcgaaaaagccgagaggttgtccctccgcaaaactttggaagaaaccgagacctaccacgcgaagctgaacgaagaccacctgctacatgcaccggagttcataataaagcccagaagccatacagtgtgggaaaaggagaacgtcaagctgcactgctccattgcaggttggcctgagcctcgggtgacctggtataaaaatcaggtgccaattaatgtacacgccaacccgggaaagtacatcattgaaagcagatatgggatgcacacgcttgagattaacggctgtgacttcgaggatactgctcagtatcgggccagtgcaatgaacgtcaaaggcgaactgtcagcctacgctagtgtcgttgtcaagcgctacaaaggcgagtttgatgaaaccaggtttcatgccggcgcaagtactatgcccctttcgttcggagtgacaccctatggatacgcttcacgatttgagatccactttgacgacaagttcgatgtctctttcggtagggaaggcgagacgatgagcttaggctgccgagtggtcatcacccctgagatcaagcacttccaaccggaaatccaatggtacaggaacggcgtccccctcagcccttctaaatgggttcagacactctggagtggcgagcgagctaccctgacgttttcccatctgaataaggaggacgaaggactgtataccattagagttaggatgggagagtactatgagcagtactcggcctatgtcttcgtgagagatgccgacgccgagattgagggtgccccagctgcccctctggacgtcaagtgccttgaggccaacaaggactacatcatcatcagctggaagcagccagccgtggatggcggctcaccaattctgggatacttcatagataaatgcgaggtgggtacagactcctggtcccagtgcaacgatacccctgtgaagttcgctcgctttccagtcacgggcttgatcgaaggcaggagttatatctttcgagtgcgggctgtcaacaagatggggattggttttccctccagggtgtcagaaccggtcgccgccctggaccctgccgaaaaagcgagactgaaatcacggccatctgctccctggacaggacaaataatagtaacagaagaagaaccatccgaagggatagtgcctggaccccctacagatttgtccgtcacggaggcaactagaagctacgttgtgctaagttggaaacctcccggacagcgcggtcatgagggaatcatgtacttcgtggaaaagtgcgaagcaggtactgaaaattggcagagagtcaacacggaacttccggtcaagtcacctagatttgcgctctttgatctcgcggaaggaaaatcttattgcttcagagtgaggtgctctaatagcgccggcgtgggtgagccttccgaggccacagaagttacagtggtgggagataaactggatatccctaaggcaccagggaaaatcataccttctaggaatactgatacctctgtggttgtgtcatgggaggagagtaaagacgcaaaggagttggtggggtattacatagaagcaagtgtcgccgggtctggcaaatgggaaccttgtaataataacccagtgaagggctctcggttcacatgccatggcctagtgactggccaaagctatatcttcagagtaagggccgttaacgctgccgggctttccgagtattcgcaggattctgaagcaatcgaggttaaggccgctattgcaccccctagcccaccatgcgatataacatgtcttgagagtttcagggactcaatggtcttgggatggaagcaaccagataaaatcggaggcgctgaaatcaccggatactacgttaactaccgggaggtgatcgacggagtacctggaaagtggcgggaagccaatgtgaaggccgtgtctgaggaagcttacaaaatttcaaatctcaaggaaaacatggtgtatcagtttcaggtggccgccatgaacatggcgggtctcggtgccccatctgctgtctctgaatgtttcaaatgtgaagagtggacaatcgctgtgcctggtcctccccactcacttaaatgttccgaagttcgcaaagatagcctggtcctccaatggaagcccccggtccactccggacggacacccgtcacaggatacttcgtcgatttgaaggaggcaaaagcaaaggaagaccaatggcgcgggctgaatgaggctgctatcaagaacgtctacttaaaggttaggggccttaaggagggtgtgtcttatgtgtttagggtaagggcaatcaaccaggccggcgtggggaaaccctccgacctggctggtccagtcgtggcagagaccagacctggcacaaaagaagtggttgtgaatgtggacgatgacggggtgatttccctaaattttgagtgtgacaaaatgacgcccaagtccgaattcagctggagcaaggactatgtatcgactgaagactcgcctcgcctagaggtcgagtcaaaaggtaataagactaaaatgactttcaaagaccttggtatggatgacctggggatctatagttgtgatgttacagacaccgacggcattgccagttcatacctgattgacgaggaagagttgaagaggttgctggccttaagtcacgaacataaattcccgaccgtcccagttaagagcgaacttgcggtggagattcttgagaagggccaggtgaggttctggatgcaagctgagaagctgagtgggaatgccaaggtcaactacatttttaatgagaaagaaattttcgaagggccgaaatacaaaatgcacatcgaccggaacaccggcattatcgagatgtttatggaaaagttgcaagatgaagacgagggaacttatacattccagcttcaggacggaaaagcgaccaaccactctacagtggtgctggttggggacgttttcaagaaacttcagaaagaagccgaattccagcgacaagagtggatacggaagcagggaccacacttcgtggaatacctcagttgggaagtgactggggagtgtaacgttcttttaaaatgcaaggttgccaacatcaagaaggagacgcacattgtttggtacaaggatgagcgggagatctccgtcgatgaaaagcacgacttcaaagacggaatctgcaccctcctgataactgagttttcaaagaaagacgctggcatctacgaggtgattctgaaggatgacagagggaaagataagtcacgtctgaaactagttgacgaggccttcaaagagctaatgatggaggtttgcaagaaaatcgcactgagcgccactgatctgaaaatccagagtactgcagaaggcattcagctgtactcattcgtgacatattacgtggaagacctgaaggtcaattggagccataacggatccgctattaggtactctgaccgcgtgaaaaccggggtgacaggcgagcaaatttggttgcaaatcaatgagccaactccaaatgacaaaggcaaatacgtgatggagttgtttgatggtaagacaggccaccagaaaactgtggacctttccggccaggcctacgatgaagcatatgccgagttccaaagactgaaacaggctgccattgctgagaagaaccgggcgagagtgttgggtggacttccagatgtggttacgatacaggagggaaaggccctcaatctgacctgcaacgtgtggggtgacccaccacctgaagtctcttggcttaagaatgagaaggctctggccagcgacgatcactgtaatctgaagttcgaggctggacggacagcgtacttcaccattaacggtgtctccacggctgattccgggaagtatggcctcgtcgtgaaaaataagtacggtagcgaaacatccgacttcaccgtttctgtcttcatccctgaggaagaggcccgaatggccgccttggagtctctgaaaggtggaaaaaaagcaaagtag

SEQ ID NO: 202183 - DNA, 4770 bp, Artificial Sequence
  derived and/or modified sequence
atgagccttccattctaccagaggtgccatcaacactacgatctttcatacaggaacaaagatgtccgatctaccgtgtctcattaccaacgagagaaaaaacggtccgctgtgtacacccagggatccacagcttatagctcccgttcctccgctgctcaccggagggagtccgaggcatttaggagagccagtgcctccagttcacagcagcaggcatcccagcacgcgttgagtagcgaagtttcccggaaggccgcatccgcatatgattatgggagctctcacgggctcacagattcatctctgttgctcgacgactacagctccaaactgagcccgaaacccaaacgcgcaaagcatagtctcctgtccggtgaggaaaaggagaacctcccaagcgattacatggtgcccattttcagcggccgacaaaagcacgtttctgggatcactgatacggaggaagagaggatcaaggaagctgccgcttacatcgcacagcgcaatcttcttgcatcagaggaaggcatcactacctccaaacagtcgacggcatccaaacaaaccactgctagcaagcagtctactgcgagtaaacagagcaccgcatccaaacaatccaccgcttcgcgtcagtctaccgcatctcggcaatctgttgtatctaagcaggcgacatcagccttgcaacaggaagagactagcgagaaaaagtcccgcaaagtcgtgattcgtgaaaaagccgaaaggctgagtttgcggaaaaccttggaggagaccgagacctatcacgcaaagctgaatgaggatcatctcctgcatgcccctgagtttatcattaagccgcgttcgcacaccgtgtgggagaaagagaacgtgaagctgcattgttccatcgcgggatggccagaacctagggtgacctggtataagaaccaggtacctatcaatgtgcacgcaaaccccggtaaatatataatcgaaagtaggtacggcatgcacactctcgaaataaatggatgtgattttgaggatacagcccaataccgggctagtgctatgaacgtaaagggtgaactgagtgcttatgcttctgtggtggtgaaacgatataagggcgagtttgatgagaccaggtttcacgcgggtgcttcgaccatgccgctctcgtttggcgtgacaccatacggctatgcttcacggttcgagatccatttcgacgataagtttgatgtatctttcggcagagagggcgaaaccatgtcactcggctgcagggtggtgattacgccggagatcaaacactttcagcccgagatccagtggtacaggaatggggtcccattgtctccgtccaagtgggtgcagactctctggagcggagagagagcaaccctgacgtttagccacctgaataaggaggacgagggtctctacacaatcagggttagaatgggcgagtattacgagcagtacagcgcttacgtgtttgtgcgggacgccgatgctgagatcgagggggctcctgcagccccattggacgtcaagtgtttggaggccaacaaagactatattatcatttcctggaagcagccggcagtggacggcggaagcccgatccttggctattttatcgacaaatgtgaggtcgggactgacagctggtcccagtgtaatgacacccctgttaaattcgccagattccctgtgaccggcctgattgagggccgatcctatatctttagagtaagagccgtaaataagatgggcatcggattcccatctagagtctcagaaccagtcgccgcactggatcctgccgagaaggctcgtctcaaatcaaggcctagcgctccttggacagggcagatcatcgtgacagaggaggaaccaagcgaaggaattgtgcctgggcctccaactgacttgtctgtgacagaagccactcgttcttacgtggtgctgagctggaagcctcccggacagaggggtcacgaaggaatcatgtatttcgtggagaagtgcgaggcagggaccgagaactggcaacgagtgaatactgagttgccagtcaagtcccctcgattcgctctgtttgacctcgcagaaggcaaaagttattgctttcgcgttcggtgttccaactccgctggcgtaggcgaacctagcgaagcaactgaggtgacagtcgtgggtgacaaattggacataccaaaagcgccagggaaaatcatcccgtctcgcaataccgataccagtgtcgtggtctcatgggaagagtccaaggacgctaaggaactggtgggatactacatagaagcttctgtggccggatccggcaaatgggagccgtgtaataataacccagtcaagggcagtcgttttacctgccacggcttggtgacgggccagtcatatatattccgagtgcgggctgtgaatgccgcaggattaagcgagtattcccaggactccgaagccatagaagtcaaagccgctatcgctcctccgagtcctccttgtgatatcacgtgcctggagtctttccgggactctatggtccttggctggaaacagcctgataagatcggcggagcagagattactggctattacgtgaactaccgggaggtcattgacggagtacctggtaagtggagggaggcgaatgtgaaggctgtcagcgaggaggcctataaaatcagtaacctgaaggagaatatggtctatcagtttcaagttgccgctatgaacatggctggtttgggtgcccctagcgctgtgagcgagtgtttcaaatgcgaggagtggactatagccgtacccggacccccacactccttaaaatgttccgaggtgagaaaagattcgctcgtcttgcagtggaaaccaccagtgcactcaggcagaactcctgtgacaggatactttgttgatttaaaagaagccaaagctaaggaagaccagtggcgaggactgaacgaagcagcaatcaaaaatgtctacctgaaggtcagaggcctaaaagaaggtgtctcatatgtctttcgtgtgagagccataaaccaggctggagtaggaaaaccgagcgatttggcaggccctgtagttgccgagacccggcctggaactaaggaggtcgttgtgaacgtcgatgacgacggagtgatctcactcaactttgaatgtgacaaaatgactcctaaatctgagttttcctggtcaaaagactacgtctctaccgaggactctccacggctggaagtggagtctaagggtaataagaccaagatgacttttaaagacctcggcatggacgatttgggcatttactcctgtgacgtaactgataccgatgggatcgcctcatcctatctcatcgatgaggaggagctgaagagattgctggccttgagccatgagcataaatttccgacagttccagtaaagtcagaattagctgtggagattttagagaaaggtcaagtgaggttctggatgcaggccgaaaagttgagtggcaacgcgaaggtgaattacatattcaatgagaaggaaattttcgaggggcctaagtataagatgcacatagatcgcaatactggaatcatcgaaatgttcatggaaaaattacaggacgaggacgaaggaacctatacttttcagctgcaggacggaaaggctacgaaccactctaccgtagttttagttggggacgtctttaagaaacttcagaaagaggccgagttccagcgccaggaatggatccgtaagcagggtccgcattttgtagaatacctatcctgggaagttacgggagagtgtaatgtgctgctcaaatgcaaagtcgccaatataaaaaaggagacccatatagtctggtacaaggatgagcgggaaattagcgtggacgagaagcatgacttcaaagacgggatctgcacgcttttaataactgagtttagcaaaaaggatgccggaatctatgaagtgattctgaaagatgaccgaggaaaggacaagtctcggctgaagctggtggacgaggcctttaaggaactgatgatggaggtgtgcaagaagattgccttgagcgccaccgatctgaagatccaatctaccgctgagggcattcagttatacagctttgtaacctactatgtggaggacttaaaggtgaattggtcacacaatgggtcagctatccggtacagcgatcgcgtgaaaacaggagtcaccggcgagcagatctggctgcaaataaacgaacccacaccaaatgacaagggtaaatacgtgatggagctgttcgacggtaaaacgggtcatcaaaagactgtagatcttagcggccaagcatacgacgaggcttatgctgagtttcagaggttgaaacaggcggctatcgccgaaaagaacagggccagagtcctgggaggactccccgatgtggtgacgatccaagaagggaaagctctgaatctcacatgcaatgtttggggcgatccccctcctgaagtatcatggttgaagaatgagaaagctctggcgtctgacgaccactgtaacctgaaattcgaggccggtagaaccgcctactttactatcaatggggtgtctaccgcagacagcgggaagtacgggttggtcgttaaaaataaatacgggtcagagacctcggactttacagtctctgttttcatccctgaagaagaggcaaggatggcggctcttgaaagtctgaaggggggaaagaaggctaagtag

SEQ ID NO: 202184 - DNA, 5559 bp, Artificial Sequence
  derived and/or modified sequence
ggcattatgcaattatattactaaggctgctacctgcccatgcccctctcctcctcctggtttggaactaccctccccatctgctgctatatttatctgccttcttggccataaaaggctggttgtgtggcctgacattcgactgcctgaccacatgcattatttttgaactggcccccagggtcctgtctttagccctgcctcttaacattgtcttggattcaacctaggtggagtcttcattctctcatccagctcctcggcctcatcggaacatttccaccaccattactcctttggaaactggtggcccggttccttcaaggggcacaggatgtctttgcctttttatcagaggtgccaccagcactatgatctcagctaccgcaacaaggacgtgcgcagcaccgtgagtcactaccagcgggagaagaaacgctccgccgtctacacccagggctccacggcctacagcagccgctcctccgccgcgcaccgccgggagtccgaggccttccgtcgggcgtccgcctcctcctcccagcagcaggcctcgcagcacgccctgagctctgaagtcagtcggaaggcagcctcagcctacgattatggctcctcccatggacttacagattccagtctgctgttagatgattattcatccaagttgagccccaaaccaaagagagccaagcacagcctactgtctggagaagagaaagaaaatttgcccagtgactacatggtacccattttctcaggacgtcaaaagcatgtcagtggaattactgatacggaagaagaaagaattaaagaagctgctgcttatatagcccagaggaatcttcttgctagtgaggaaggaatcacaacatctaaacagtccacggcatccaagcagaccacggcatctaagcagtccacggcatccaagcagtccacagcatccaagcagtccacggcatccaggcagtccacggcatccaggcagtctgtggtttccaaacaggccacatccgctcttcaacaggaagaaacttctgaaaagaagtcaaggaaagttgtgattcgagaaaaggcagaacgcctgtccctgaggaaaacattagaagaaaccgagacatatcatgccaagctgaatgaagaccatcttctccatgctcctgagtttatcattaaacctcgctcccacacggtttgggagaaggagaatgtaaaattgcattgctccatagcaggctggccagaacctcgtgtcacgtggtataaaaaccaggtgccaataaatgtccatgcaaaccctggaaagtatattattgagagtcgatatgggatgcacactctggagattaatggatgtgattttgaagatacagctcagtaccgggcctcggcgatgaatgttaaaggagagctttcggcatatgcttcagttgtggtaaaaaggtataagggagagtttgatgagactcgcttccacgctggggcttccaccatgcccctcagctttggtgtgaccccatatggttatgcatcccggtttgagatccactttgatgacaaatttgatgtgtcttttgggagagagggagagacaatgagtctaggctgtcgtgttgtcatcactcctgaaattaaacatttccagccagagatccagtggtacagaaacggagtacctctttctccatcaaaatgggtgcaaacactttggagtggagagcgggcaacgctgacattttcccatctcaacaaagaagatgaaggcctctatacaatccgtgtacggatgggagaatattatgaacaatatagtgcttatgtctttgttcgagatgctgatgcagagattgaaggagccccagctgctcccttggatgtgaagtgcttggaggccaacaaagattatatcatcatctcctggaaacagccagctgtcgatggagggagtcctattctcggatattttattgataagtgtgaggtgggcacagatagctggtcgcagtgcaatgacacacctgtgaagtttgctcgttttcctgtcactggattgatcgaaggtcgttcctatatcttccgagttcgagctgtgaataaaatgggaataggtttcccatctcgagtttccgagcccgtggctgctctggatccggctgagaaagctagacttaaaagtcgcccctcagcaccctggactggacagatcattgttactgaagaggaaccttcagagggtattgtgcctggccccccgacagacctctctgtcactgaggccacccggagctatgtggtgctcagctggaagccccctggccagcgtggtcatgagggcattatgtactttgtggaaaagtgtgaggcaggaacagaaaactggcagcgagtgaacacggagctccctgtgaagtctccccgctttgctctgtttgacttggccgaggggaaatcctactgtttccgtgtccgctgttctaattctgcaggagttggtgagccctcagaggcaacggaggtgactgtggtaggggacaaacttgatatccccaaggctcctggcaaaatcatcccaagcagaaacacagacacctcagtggtagtttcgtgggaggagtccaaagatgccaaagagctggtcgggtactacatagaggcgagcgttgctggctctggcaagtgggagccctgtaacaacaaccccgtgaagggctcacgattcacttgtcatggattagtgactggtcagagttatattttccgggtcagagcagtcaatgcagctggacttagtgaatattcccaggattcagaagctattgaagtcaaagctgctattgcaccaccatctccaccctgtgatatcacctgtcttgaaagttttcgtgactcaatggttcttggatggaagcaaccagataagattggaggggcagaaattactggctattatgtgaactatcgcgaggtcattgatggggtaccaggaaaatggagagaagccaatgtcaaggctgtcagtgaggaggcatacaagattagcaacttgaaggaaaacatggtgtatcagttccaagtggcagccatgaacatggctgggctgggcgcgccctccgcagtaagcgaatgcttcaaatgtgaagagtggaccatcgccgtcccaggaccaccgcacagtctcaagtgtagtgaagtcaggaaagactcactggttctccagtggaagccgccagtccactccgggcggactccggtcactggttacttcgtggacttgaaggaggccaaggccaaagaagaccagtggcgagggctcaatgaggcggctattaaaaacgtatacctgaaggttcgaggcctcaaggagggcgtcagctacgtgttccgtgttcgagccataaaccaggcgggagttgggaagccatctgaccttgctggccctgttgtggcagagacccgtccaggaaccaaagaggttgttgtaaatgtggatgatgatggagtcatttcattgaacttcgagtgtgataagatgactccaaagtccgagttctcctggtccaaagattatgtatccactgaggactctccacgattggaagtcgaaagcaagggcaacaagacgaaaatgaccttcaaagaccttgggatggatgacttgggtatttactcttgcgatgtaacagacactgatggaatagcatcaagctacttaatagatgaggaagaattgaaacgtttacttgctctcagccatgaacacaagttcccaactgtcccagttaaatcagagttggcagttgaaattttggagaaaggccaggtccggttttggatgcaggctgagaaactgtctggcaatgccaaagtcaactacatatttaacgagaaggaaatttttgaaggcccgaaatataaaatgcatattgaccgaaacactggcatcatcgaaatgttcatggaaaagctacaggatgaggatgagggaacgtacactttccagcttcaagatggaaaagcaactaaccattctactgttgttctcgttggagatgttttcaaaaagctccagaaagaagctgaattccagcggcaagaatggatcaggaaacaaggtcctcactttgttgagtatttgagctgggaagtgactggtgaatgtaatgtactattgaaatgcaaggtggcaaatattaagaaggagactcatattgtgtggtacaaagatgagagggagatatcagtggatgaaaagcatgactttaaggatggtatatgtaccctgcttataacagagttttccaagaaagatgctgggatttatgaagttatcctgaaagatgaccgaggaaaagataagagcagactgaagcttgtggatgaagcctttaaggaactgatgatggaagtatgcaaaaaaatagctttgtctgctacagacctgaaaatccagagcacagccgagggcatccaactgtactcttttgtaacttactatgtggaggatttgaaagttaactggtcccacaatgggtccgccattaggtactcagacagagttaagaccggggtcactggagagcagatctggctacaaatcaacgagcccaccccgaatgacaaagggaagtatgtcatggagctctttgatggcaaaactggacatcagaagacagtggatctctctggacaagcatacgatgaggcctatgctgaattccagaggttgaaacaagctgccattgccgagaaaaatcgtgcccgggtgttgggaggtctcccagacgtggtcaccatccaggaggggaaggcccttaatctcacttgcaacgtgtggggagacccgcctccggaggtgtcgtggttgaagaacgagaaggccctggcctcagacgaccactgcaacctcaagttcgaggctgggaggaccgcgtacttcaccatcaacggcgtgagcaccgctgactcgggcaaatacgggctggttgtgaagaacaagtatggctcggagaccagcgacttcaccgtcagcgtgttcatcccagaggaggaggcgaggatggccgccttggagtccctgaaaggtggcaagaaggccaagtgaccggaggtgcgaggagagccagccggcctgtgtgacttgggtgtgaatggtttgggttaaggatgagacgtcttcatgctttctcctccctattattttctggcttgaggggaaaataatgtcaggtctttcactcatataaaaaagcaccaactaatgacactttaattgtttttctttatctacaaaattatgtgttaagaaaataccattcatagcatgaagattaggaaacagttttaaggagaagacttgaatgaagttggagggacattgaatgatggtcagagggcagacgaatgtgtcgtggggcgaattgggatttgctgcagctgtgaagccatggccgtgtctcgtgtgttgttacagaggtgatgtgcttttcgacgggcgcctcgtggcttggaacctcctctgtatgaataaacagttttcacgtctgtcctcttccccga

SEQ ID NO: 202185 - DNA, 4770 bp, Artificial Sequence
  derived and/or modified sequence
atgagcctgcccttctaccagagatgccaccagcactacgacctgagctacagaaacaaggacgtgagaagcaccgtgagccactaccagagagagaagaagagaagcgccgtgtacacccagggcagcaccgcctacagcagcagaagcagcgccgcccacagaagagagagcgaggccttcagaagagccagcgccagcagcagccagcagcaggccagccagcacgccctgagcagcgaggtgagcagaaaggccgccagcgcctacgactacggcagcagccacggcctgaccgacagcagcctgctgctggacgactacagcagcaagctgagccccaagcccaagagagccaagcacagcctgctgagcggcgaggagaaggagaacctgcccagcgactacatggtgcccatcttcagcggcagacagaagcacgtgagcggcatcaccgacaccgaggaggagagaatcaaggaggccgccgcctacatcgcccagagaaacctgctggccagcgaggagggcatcaccaccagcaagcagagcaccgccagcaagcagaccaccgccagcaagcagagcaccgccagcaagcagagcaccgccagcaagcagagcaccgccagcagacagagcaccgccagcagacagagcgtggtgagcaagcaggccaccagcgccctgcagcaggaggagaccagcgagaagaagagcagaaaggtggtgatcagagagaaggccgagagactgagcctgagaaagaccctggaggagaccgagacctaccacgccaagctgaacgaggaccacctgctgcacgcccccgagttcatcatcaagcccagaagccacaccgtgtgggagaaggagaacgtgaagctgcactgcagcatcgccggctggcccgagcccagagtgacctggtacaagaaccaggtgcccatcaacgtgcacgccaaccccggcaagtacatcatcgagagcagatacggcatgcacaccctggagatcaacggctgcgacttcgaggacaccgcccagtacagagccagcgccatgaacgtgaagggcgagctgagcgcctacgccagcgtggtggtgaagagatacaagggcgagttcgacgagaccagattccacgccggcgccagcaccatgcccctgagcttcggcgtgaccccctacggctacgccagcagattcgagatccacttcgacgacaagttcgacgtgagcttcggcagagagggcgagaccatgagcctgggctgcagagtggtgatcacccccgagatcaagcacttccagcccgagatccagtggtacagaaacggcgtgcccctgagccccagcaagtgggtgcagaccctgtggagcggcgagagagccaccctgaccttcagccacctgaacaaggaggacgagggcctgtacaccatcagagtgagaatgggcgagtactacgagcagtacagcgcctacgtgttcgtgagagacgccgacgccgagatcgagggcgcccccgccgcccccctggacgtgaagtgcctggaggccaacaaggactacatcatcatcagctggaagcagcccgccgtggacggcggcagccccatcctgggctacttcatcgacaagtgcgaggtgggcaccgacagctggagccagtgcaacgacacccccgtgaagttcgccagattccccgtgaccggcctgatcgagggcagaagctacatcttcagagtgagagccgtgaacaagatgggcatcggcttccccagcagagtgagcgagcccgtggccgccctggaccccgccgagaaggccagactgaagagcagacccagcgccccctggaccggccagatcatcgtgaccgaggaggagcccagcgagggcatcgtgcccggcccccccaccgacctgagcgtgaccgaggccaccagaagctacgtggtgctgagctggaagccccccggccagagaggccacgagggcatcatgtacttcgtggagaagtgcgaggccggcaccgagaactggcagagagtgaacaccgagctgcccgtgaagagccccagattcgccctgttcgacctggccgagggcaagagctactgcttcagagtgagatgcagcaacagcgccggcgtgggcgagcccagcgaggccaccgaggtgaccgtggtgggcgacaagctggacatccccaaggcccccggcaagatcatccccagcagaaacaccgacaccagcgtggtggtgagctgggaggagagcaaggacgccaaggagctggtgggctactacatcgaggccagcgtggccggcagcggcaagtgggagccctgcaacaacaaccccgtgaagggcagcagattcacctgccacggcctggtgaccggccagagctacatcttcagagtgagagccgtgaacgccgccggcctgagcgagtacagccaggacagcgaggccatcgaggtgaaggccgccatcgccccccccagccccccctgcgacatcacctgcctggagagcttcagagacagcatggtgctgggctggaagcagcccgacaagatcggcggcgccgagatcaccggctactacgtgaactacagagaggtgatcgacggcgtgcccggcaagtggagagaggccaacgtgaaggccgtgagcgaggaggcctacaagatcagcaacctgaaggagaacatggtgtaccagttccaggtggccgccatgaacatggccggcctgggcgcccccagcgccgtgagcgagtgcttcaagtgcgaggagtggaccatcgccgtgcccggccccccccacagcctgaagtgcagcgaggtgagaaaggacagcctggtgctgcagtggaagccccccgtgcacagcggcagaacccccgtgaccggctacttcgtggacctgaaggaggccaaggccaaggaggaccagtggagaggcctgaacgaggccgccatcaagaacgtgtacctgaaggtgagaggcctgaaggagggcgtgagctacgtgttcagagtgagagccatcaaccaggccggcgtgggcaagcccagcgacctggccggccccgtggtggccgagaccagacccggcaccaaggaggtggtggtgaacgtggacgacgacggcgtgatcagcctgaacttcgagtgcgacaagatgacccccaagagcgagttcagctggagcaaggactacgtgagcaccgaggacagccccagactggaggtggagagcaagggcaacaagaccaagatgaccttcaaggacctgggcatggacgacctgggcatctacagctgcgacgtgaccgacaccgacggcatcgccagcagctacctgatcgacgaggaggagctgaagagactgctggccctgagccacgagcacaagttccccaccgtgcccgtgaagagcgagctggccgtggagatcctggagaagggccaggtgagattctggatgcaggccgagaagctgagcggcaacgccaaggtgaactacatcttcaacgagaaggagatcttcgagggccccaagtacaagatgcacatcgacagaaacaccggcatcatcgagatgttcatggagaagctgcaggacgaggacgagggcacctacaccttccagctgcaggacggcaaggccaccaaccacagcaccgtggtgctggtgggcgacgtgttcaagaagctgcagaaggaggccgagttccagagacaggagtggatcagaaagcagggcccccacttcgtggagtacctgagctgggaggtgaccggcgagtgcaacgtgctgctgaagtgcaaggtggccaacatcaagaaggagacccacatcgtgtggtacaaggacgagagagagatcagcgtggacgagaagcacgacttcaaggacggcatctgcaccctgctgatcaccgagttcagcaagaaggacgccggcatctacgaggtgatcctgaaggacgacagaggcaaggacaagagcagactgaagctggtggacgaggccttcaaggagctgatgatggaggtgtgcaagaagatcgccctgagcgccaccgacctgaagatccagagcaccgccgagggcatccagctgtacagcttcgtgacctactacgtggaggacctgaaggtgaactggagccacaacggcagcgccatcagatacagcgacagagtgaagaccggcgtgaccggcgagcagatctggctgcagatcaacgagcccacccccaacgacaagggcaagtacgtgatggagctgttcgacggcaagaccggccaccagaagaccgtggacctgagcggccaggcctacgacgaggcctacgccgagttccagagactgaagcaggccgccatcgccgagaagaacagagccagagtgctgggcggcctgcccgacgtggtgaccatccaggagggcaaggccctgaacctgacctgcaacgtgtggggcgaccccccccccgaggtgagctggctgaagaacgagaaggccctggccagcgacgaccactgcaacctgaagttcgaggccggcagaaccgcctacttcaccatcaacggcgtgagcaccgccgacagcggcaagtacggcctggtggtgaagaacaagtacggcagcgagaccagcgacttcaccgtgagcgtgttcatccccgaggaggaggccagaatggccgccctggagagcctgaagggcggcaagaaggccaagtag

SEQ ID NO: 202186 - protein, 588 aa, Artificial Sequence
  derived and/or modified sequence
MARGGAGAEEASLRSNALSWLACGLLALLANAWIILSISAKQQKHKPLELLLCFLAGTHILMAAVPLTTFAVVQLRRQASSDYDWNESICKVFVSTYYTLALATCFTVASLSYHRMWMVRWPVNYRLSNAKKQALHAVMGIWMVSFILSTLPSIGWHNNGERYYARGCQFIVSKIGLGFGVCFSLLLLGGIVMGLVCVAITFYQTLWARPRRARQARRVGGGGGTKAGGPGALGTRPAFEVPAIVVEDARGKRRSSLDGSESAKTSLQVTNLVSAIVFLYDSLTGVPILVVSFFSLKSDSAPPWMVLAVLWCSMAQTLLLPSFIWSCERYRADVRTVWEQCVAIMSEEDGDDDGGCDDYAEGRVCKVRFDANGATGPGSRDPAQVKLLPGRHMLFPPLERVHYLQVPLSRRLSHDETNIFSTPREPGSFLHKWSSSDDIRVLPAQSRALGGPPEYLGQRHRLEDEEDEEEAEGGGLASLRQFLESGVLGSGGGPPRGPGFFREEITTFIDETPLPSPTASPGHSPRRPRPLGLSPRRLSLGSPESRAVGLPLGLSAGRRCSLTGGEESARAWGGSWGPGNPIFPQLTL

SEQ ID NO: 202187 - protein, 304 aa, Artificial Sequence
  derived and/or modified sequence
MLSTGVVSFFSLKSDSAPPWMVLAVLWCSMAQTLLLPSFIWSCERYRADVRTVWEQCVAIMSEEDGDDDGGCDDYAEGRVCKVRFDANGATGPGSRDPAQVKLLPGRHMLFPPLERVHYLQVPLSRRLSHDETNIFSTPREPGSFLHKWSSSDDIRVLPAQSRALGGPPEYLGQRHRLEDEEDEEEAEGGGLASLRQFLESGVLGSGGGPPRGPGFFREEITTFIDETPLPSPTASPGHSPRRPRPLGLSPRRLSLGSPESRAVGLPLGLSAGRRCSLTGGEESARAWGGSWGPGNPIFPQLTL

SEQ ID NO: 202188 - DNA, 1767 bp, Artificial Sequence
  derived and/or modified sequence
atggccagaggcggcgccggcgccgaggaggccagcctgagaagcaacgccctgagctggctggcctgcggcctgctggccctgctggccaacgcctggatcatcctgagcatcagcgccaagcagcagaagcacaagcccctggagctgctgctgtgcttcctggccggcacccacatcctgatggccgccgtgcccctgaccaccttcgccgtggtgcagctgagaagacaggccagcagcgactacgactggaacgagagcatctgcaaggtgttcgtgagcacctactacaccctggccctggccacctgcttcaccgtggccagcctgagctaccacagaatgtggatggtgagatggcccgtgaactacagactgagcaacgccaagaagcaggccctgcacgccgtgatgggcatctggatggtgagcttcatcctgagcaccctgcccagcatcggctggcacaacaacggcgagagatactacgccagaggctgccagttcatcgtgagcaagatcggcctgggcttcggcgtgtgcttcagcctgctgctgctgggcggcatcgtgatgggcctggtgtgcgtggccatcaccttctaccagaccctgtgggccagacccagaagagccagacaggccagaagagtgggcggcggcggcggcaccaaggccggcggccccggcgccctgggcaccagacccgccttcgaggtgcccgccatcgtggtggaggacgccagaggcaagagaagaagcagcctggacggcagcgagagcgccaagaccagcctgcaggtgaccaacctggtgagcgccatcgtgttcctgtacgacagcctgaccggcgtgcccatcctggtggtgagcttcttcagcctgaagagcgacagcgcccccccctggatggtgctggccgtgctgtggtgcagcatggcccagaccctgctgctgcccagcttcatctggagctgcgagagatacagagccgacgtgagaaccgtgtgggagcagtgcgtggccatcatgagcgaggaggacggcgacgacgacggcggctgcgacgactacgccgagggcagagtgtgcaaggtgagattcgacgccaacggcgccaccggccccggcagcagagaccccgcccaggtgaagctgctgcccggcagacacatgctgttcccccccctggagagagtgcactacctgcaggtgcccctgagcagaagactgagccacgacgagaccaacatcttcagcacccccagagagcccggcagcttcctgcacaagtggagcagcagcgacgacatcagagtgctgcccgcccagagcagagccctgggcggcccccccgagtacctgggccagagacacagactggaggacgaggaggacgaggaggaggccgagggcggcggcctggccagcctgagacagttcctggagagcggcgtgctgggcagcggcggcggcccccccagaggccccggcttcttcagagaggagatcaccaccttcatcgacgagacccccctgcccagccccaccgccagccccggccacagccccagaagacccagacccctgggcctgagccccagaagactgagcctgggcagccccgagagcagagccgtgggcctgcccctgggcctgagcgccggcagaagatgcagcctgaccggcggcgaggagagcgccagagcctggggcggcagctggggccccggcaaccccatcttcccccagctgaccctgtag

SEQ ID NO: 202189 - DNA, 2768 bp, Artificial Sequence
  derived and/or modified sequence
ttccttgcccctcctccccgagtcaccaccgtccagttccccaccctgcactcgtttcccgcccccccccgccccccacaaagctgtcctgccttccctctggcctgggctcactggcaggacgaccccgggagagagggtcctggagagtgagaggggcagagaccgagtgagccgtgggctgagcctgggaggccgggactgagggggaggagggaggcccgggggaagggagggagggagagagggaaggagggaggagggcgggcgagctggagccggcaggcagcgggagcccgagagagccgcgtcgggagtgcggtctccatggcagtgctgggcgcagccggagagagcctgtccagggggctgagccccacccccaaatccctggggcatccagaagattcctgactggtcaagaaccagaggcaaaagagacctggaagtcccagcatggggaccagaaccccccagccagcctcatagttgggaaagtagccagcttgcctgccccatcaattgcagggatgcttaaggaaggccccgcccagtatgaaagctgaggattgcctctgctgaccctcagtctcctcccctgccctctacatctgccctcagctgggtccatcatgcaatgctgagcactggggtgagcctgggggcagcctgcctgctgacagggcgaggattgtggggatcatgggagtgtttgtgagtggggctcctgggtgagacctagcccccacccccacagagctcaagggggtggggggctgaggataggatggctcggggcggggcgggggcagaggaggcctccctgcgctccaacgcattgtcctggctggcctgtgggctcctggcgctgctggccaatgcctggatcatcctcagcatctcggccaagcagcagaagcacaagccactggagctgctgctctgcttcctagcgggcacacacatactcatggcagctgtgcccctcaccacctttgccgtggtgcagctgcgtcgtcaggcttcctccgactatgactggaacgagagtatctgcaaggtcttcgtgtccacctactacaccctggcgctggccacctgcttcacggtcgcctccctctcctaccatcgcatgtggatggtgcgctggcccgtcaactaccgcctcagcaacgccaagaagcaggcactgcatgccgtcatgggcatctggatggtcagcttcatcctctccacactgccctccattggctggcacaacaacggcgagcgctactatgcccgcggctgccagttcatagtctccaagatcggcctcggctttggcgtttgcttcagcctcttgctacttgggggaattgtcatgggtctggtctgtgtggccatcaccttctaccagacactgtgggcccggccccggagggctcggcaggcccggagagtggggggtggtggggggaccaaagcgggtgggccaggggccttgggtacccggccagcttttgaggtaccagccattgtggtggaggatgcccgagggaagcggcggtcctcgctggatggctcggagtctgccaagacatccctgcaggtcaccaacttggtcagcgccatcgtctttctctatgactcactcacaggggtgcccatcttggtggtgagcttcttctccctcaagtcggactcggcgcccccctggatggtgctggctgtgctgtggtgctccatggcacagacgctgctgctgccctccttcatctggtcctgcgagcgctaccgcgccgacgtgcgcacagtgtgggagcaatgcgtggccatcatgtctgaggaggatggagatgacgatgggggctgtgacgactatgcagagggccgagtttgcaaagttcgctttgatgctaacggagccacaggaccagggagccgggaccccgcccaggtgaagctgctgcctggaaggcacatgctcttccctcctcttgagagagtccactacttacaggtccccctatcccggcgtctgtcccatgatgagacaaacatcttctctacccctcgggaaccaggctccttcctgcacaagtggtcatcctctgatgacatccgggtcctcccagcccagagccgggccctcgggggtcctcctgagtacctgggacaaagacacaggttggaggacgaggaggacgaggaagaggctgaaggtggggggctggccagccttcgccaattcttggagagtggggttctggggtcaggtgggggacccccacggggtcctggcttcttccgggaggagatcaccaccttcatcgatgagacacctctgccttctccgactgcctcaccagggcactctcctcgtcggccccggccactgggcctctcaccccgccgactctcccttgggtcccctgagagcagagccgttggacttcctttgggactaagcgcagggagacgctgctccctgacggggggtgaagaaagtgcaagggcttggggaggatcctggggcccaggcaaccccatctttccccagctgaccctgtgagcccaagcaggcctgctgaactcagaggagaaagcctgagtgagtaacacctcattctggccgagagtagggcagctgcctccagactctggggagacgggcgctagatttggggctcagaaggccctgctctctcccatccaagtgaccagatgccctactcagcttccatcacccctagcaatatgtattaaagtctgaagtgttgccatgg

SEQ ID NO: 202190 - DNA, 1767 bp, Artificial Sequence
  derived and/or modified sequence
atggccaggggcggcgcaggcgccgaggaagcatcactgcgctcaaacgctctgtcgtggcttgcctgtggtctgctagctctgcttgctaacgcatggattatcttgtccattagcgccaagcagcagaagcataagccactggaactgcttctctgctttcttgctgggacccacatactgatggctgccgtgcctctgactacgtttgcagtggtgcagcttcgcaggcaggctagcagtgactacgactggaatgagtcaatctgcaaagtatttgttagcacctattacacgctagccctggcaacctgttttacagtcgccagcctcagctaccatcgaatgtggatggtccgatggcccgtgaattatagactgagcaacgctaaaaaacaggcgttacacgctgtgatggggatctggatggttagcttcatattgagcacacttccttccattgggtggcataataacggcgagaggtattatgctaggggatgtcaattcatcgtgagcaaaatcgggcttggctttggggtgtgtttcagccttttgctgcttgggggaattgttatggggctagtgtgcgtggccataaccttctatcaaacactttgggcacggcctaggagagcccgccaggcccggcgcgttggtgggggcggaggaacaaaggctggggggccgggagccctcggaacccggcctgctttcgaagtccccgcaatagtcgttgaggatgcccgcgggaagcggcggtccagcttagatgggagtgagtcggccaagacctcacttcaagttacaaacttagtgtcggcgatcgtcttcttgtacgactccctcactggagtgccgattctggtcgtaagcttcttttcattgaagagcgattcggctccgccctggatggtgctggctgtgctctggtgttccatggcacagactctacttctcccatcattcatctggagttgtgaaaggtaccgagccgacgtgcgtacagtgtgggaacagtgtgtcgccattatgtctgaggaggacggcgacgacgacggaggctgcgatgactacgcagagggacgagtgtgtaaggtccggttcgacgcaaacggcgctacaggtcccgggtcacgcgaccctgcccaggtcaagctgctccccggccgacacatgttatttccaccattggagcgggtgcactacctccaggtccctctctccaggagattatctcatgacgaaactaatatttttagtacaccacgggaacctgggagtttcttacacaagtggagctcctcagacgacattcgcgttctgcctgcgcagtccagagccctgggaggccctcctgagtacctaggtcagcggcatcggctggaggacgaagaggacgaagaagaagctgaggggggtgggctcgccagcctccgccagttcctggaatccggtgtcctgggctctggaggcggacccccaagggggcctgggttctttcgggaggagatcaccactttcatcgacgagaccccgctgccttctcctactgcatcccctggccactcgccgagacgaccaagaccactgggcctcagccctagaagactttccctgggcagccctgaatccagggctgtgggactcccactgggactatccgccggacgacgctgcagccttactggaggagaggaaagcgccagagcttggggtgggagctggggcccagggaatcccatcttcccacagctcaccctgtag

SEQ ID NO: 202191 - DNA, 1767 bp, Artificial Sequence
  derived and/or modified sequence
atggcccggggcggggccggggctgaggaggccagcctgcggagcaatgccctgtcctggctggcctgtggcctgctggccctgctggccaatgcctggatcatcctgagcatcagcgccaagcagcagaagcacaagcccctggagctgctgctgtgcttcctggccggcacccacatcctgatggctgctgtgcccctgaccacctttgctgtggtgcagctgcggcggcaggccagcagtgactatgactggaatgaaagcatctgcaaggtgtttgtgtccacctactacaccctggccctggccacctgcttcaccgtggccagcctgagctaccacaggatgtggatggtgcgctggcctgtgaactaccgcctgagcaatgccaagaagcaggccctgcatgctgtgatgggcatctggatggtgtccttcatcctgagcaccctgcccagcatcggctggcacaacaatggagagcgctactatgcccggggctgccagttcatcgtgtccaagattggcctgggctttggagtgtgcttcagcctgctgctgctgggcggcatcgtgatgggcctggtgtgtgtggccatcaccttctaccagaccctgtgggcccggccccggcgggcccggcaggccaggagagtgggcggcggcggcggcaccaaggccggcggccctggggccctgggcaccaggcctgcctttgaggtgcctgccatcgtggtggaggatgcccggggcaagagaagaagcagcctggatggcagcgagagcgccaagaccagcctgcaggtgaccaacctggtgtctgccatcgtgttcctgtatgacagcctgactggagtgcccatcctggtggtgtccttcttcagcctgaagagtgacagcgccccaccctggatggtgctggccgtgctgtggtgcagcatggcccagaccctgctgctgcccagcttcatctggagctgtgagcgctacagagcagatgtgaggacagtgtgggagcagtgtgtggccatcatgtctgaggaggatggagatgatgatggcggctgtgatgattatgcagagggccgggtgtgcaaggtgcgctttgatgccaacggggccactggacctggcagccgggaccctgcccaggtgaagctgctgcccggccgccacatgctgttcccccccctggagcgggtgcactacctgcaggtgcccctgagccggcggctgagccatgatgagaccaacatcttcagcaccccccgggagcccggcagcttcctgcacaagtggagcagcagtgatgacatccgggtgctgcctgcccagagccgggccctgggcggccccccagagtacctgggccagaggcaccggctggaggatgaggaggatgaggaggaggccgagggcggcggcctggccagcctgcggcagttcctggagagcggcgtgctgggcagcggcggcggccccccccggggccctggcttcttccgggaggagatcaccaccttcattgatgagacccccctgcccagccccacagccagccctggccacagcccccggcggccccggcccctgggcctgagcccccggcggctgagcctgggcagccctgagagcagagctgtgggcctgcccctgggcctgtctgctggccgccgctgcagcctgactggaggagaggagagcgcccgggcctggggcggctcctggggccctggcaaccccatcttcccccagctgaccctgtag

SEQ ID NO: 202192 - DNA, 1767 bp, Artificial Sequence
  derived and/or modified sequence
atggcccggggcggcgccggcgccgaggaggccagcctgcggagcaatgctctgagttggctcgcctgcggtctcttagccctgctggcgaatgcctggattatattatccatcagcgccaaacagcagaaacacaaaccattagagctgctcctctgttttctcgccgggactcacatactgatggccgccgtgccactgactaccttcgccgtggtgcaactgagacggcaggcgagctctgactacgactggaatgagtccatctgtaaagtcttcgtatcaacctactacacacttgccttggcgacgtgcttcacggtggcttcactgtcataccatcgcatgtggatggtcagatggccggtaaattatcggttgtctaatgccaagaagcaggccctgcatgctgtgatgggcatctggatggtttccttcatactgtctacattgccctccattggatggcataacaacggagagcgatactacgcccgcggttgccagttcatcgtgagcaagatcggactggggttcggtgtgtgtttttcgttacttctgctcggtggtattgtcatgggacttgtgtgcgttgcaattactttctaccagacactttgggcaaggccaagacgcgcccgccaggcacgccgggtgggcggcggtggaggcactaaggctggcgggcccggggccttggggactagaccagccttcgaggtccccgcaatcgtggtggaggatgcccgcggtaaacgtaggagcagcctggatggctccgaaagtgctaaaacatctctgcaggtaaccaacctggtgtctgcaatcgtattcctttacgactcactgactggagtgccaatccttgtcgttagcttcttttcattaaaatccgactctgctcctccctggatggtgcttgcggttctgtggtgctcaatggcccagaccctactcctgcctagttttatttggtcatgcgaacgctaccgagcagatgtgaggactgtttgggagcaatgtgtagctatcatgagcgaggaggacggcgatgacgacggaggctgtgacgattatgccgaagggcgcgtgtgcaaagtgcggttcgacgccaacggtgccactgggcccggatcccgggatccagcccaggttaaactcctgcctggccgccacatgctgttcccgcccctcgaacgtgtccattatctccaggtccccctgtccagacgcctgtcacatgacgaaactaatatcttttcaaccccgcgggagcctggcagttttctgcacaaatggtccagctccgacgacattcgggtccttccggcccaatcaagagctttggggggccctccagaatatcttgggcagcggcacaggctggaggatgaagaagatgaggaggaggcggaaggtggcgggcttgcctcacttagacagtttctagagagcggagtgctgggatctggtggcggcccacccagaggaccaggcttcttccgcgaggaaataacaacattcatagatgagacacccttgccgtctcccactgcctctccagggcattcaccccgaagaccccgaccactgggtctgagcccccggcgactgtccctaggttcccctgagtctcgtgctgtgggattacctctgggccttagcgccggccgccgatgtagtttgaccgggggggaggagtctgccagggcatggggtgggtcttggggaccaggaaatcctatatttcctcaactgacactctag

SEQ ID NO: 202193 - DNA, 1767 bp, Artificial Sequence
  derived and/or modified sequence
atggcgaggggaggtgctggggcagaagaagcctccttgcgcagcaacgcgttgagctggctggcatgtggccttctcgctctgttggccaacgcctggattattctaagcatttcagctaaacagcagaaacacaagccacttgagttgctcctctgcttcctggcaggtacgcacatcctgatggcagccgtcccactgactaccttcgccgttgtgcagttacgaaggcaagcctcaagcgactatgattggaatgaatccatctgcaaagtgttcgtatcaacctactacacgctagccttagccacctgcttcacagtggcttctctaagctatcatagaatgtggatggtcagatggcccgtaaattacaggctcagtaatgctaaaaaacaggccctgcacgctgtgatgggtatttggatggtgtcttttatacttagcacactgccctccatcggttggcataacaatggggagcggtactacgctagaggatgtcagtttattgtctcaaagattggtctcggctttggcgtgtgtttttcactgcttctgctgggcggtatcgttatgggtctggtctgtgtggccattaccttctaccagaccctctgggctcgcccaagaagggccagacaggcacgcagagttggtggagggggaggaacaaaggccggaggcccaggagcactggggacaagaccagccttcgaggtgcctgcaattgtcgtcgaggatgcaaggggcaagcgccgttcgtctttggatggcagcgagagcgcgaaaacttcgctgcaggtgacaaacctagtaagtgccatcgtgttcctatatgatagcttaaccggtgtgcccatcctcgtggtgtcattctttagtctcaagtctgactctgcccctccctggatggttttggccgtgttgtggtgctcaatggcccagactctgctgttgcccagttttatttggagctgcgagcgatatagagcagacgttcgtacagtgtgggagcaatgtgtcgcaattatgagcgaggaagatggcgatgacgatggtggctgtgatgattacgcagagggcagggtatgcaaagtgcgcttcgacgctaatggcgcaactggccctggtagccgggacccagctcaggtgaagctgcttccaggcaggcacatgctcttccccccattggaacgcgtgcactatctccaagtccccctctccagaaggttgagtcacgacgaaactaacattttctcaactccacgggagcccggttcgttcttacacaaatggagcagctcagatgatatcagagtactcccagcacagagcagagctttgggaggcccacctgaataccttggtcagcgccacagactagaagacgaagaggatgaggaggaggctgaaggcggtggcttggctagccttcgacaattcctggagtctggtgttctcggctcaggtggaggcccacctcgtgggcctgggttcttcagggaagagattaccacttttatcgacgagacaccactgccttctcctacagctagtcctggccacagccccaggaggccacgtccactgggtctctcccctcgcaggctcagtctcggctcacccgagagtcgcgctgtgggactgcctctgggcctcagcgctggccgacgttgtagcctgactggcggagaggagagcgcacgagcctgggggggatcttggggccctgggaatcccatatttccccagctgactttatag

SEQ ID NO: 202194 - protein, 479 aa, Artificial Sequence
  derived and/or modified sequence
MMDVNSSGRPDLYGHLRSFLLPEVGRGLPDLSPDGGADPVAGSWAPHLLSEVTASPAPTWDAPPDNASGCGEQINYGRVEKVVIGSILTLITLLTIAGNCLVVISVCFVKKLRQPSNYLIVSLALADLSVAVAVMPFVSVTDLIGGKWIFGHFFCNVFIAMDVMCCTASIMTLCVISIDRYLGITRPLTYPVRQNGKCMAKMILSVWLLSASITLPPLFGWAQNVNDDKVCLISQDFGYTIYSTAVAFYIPMSVMLFMYYQIYKAARKSAAKHKFPGFPRVEPDSVIALNGIVKLQKEVEECANLSRLLKHERKNISIFKREQKAATTLGIIVGAFTVCWLPFFLLSTARPFICGTSCSCIPLWVERTFLWLGYANSLINPFIYAFFNRDLRTTYRSLLQCQYRNINRKLSAAGMHEALKLAERPERPEFVLRACTRRVLLRPEKRPPVSVWVLQSPDHHNWLADKMLTTVEKKVMIHD

SEQ ID NO: 202195 - protein, 479 aa, Artificial Sequence
  derived and/or modified sequence
MMDVNSSGRPDLYGHLRSFLLPEVGRGLPDLSPDGGADPVAGSWAPHLLSEVTASPAPTWDAPPDNASGCGEQINYGRVEKVVIGSILTLITLLTIAGNCLVVISVCFVKKLRQPSNYLIVSLALADLSVAVAVMPFVSVTDLIGGKWIFGHFFCNVFIAMDVMCCTASIMTLCVISIDRYLGITRPLTYPVRQNGKCMAKMILSVWLLSASITLPPLFGWAQNVNDDKVCLISQDFGYTIYSTAVAFYIPMSVMLFMYYQIYKAARKSAAKHKFPGFPRVEPDSVIALNGIVKLQKEVEECANLSRLLKHERKNISIFKREQKAATTLGIIVGAFTVCWLPFFLLSTARPFICGTSCSCIPLWVERTFLWLGYANSLINPFIYAFFNRDLRTTYRSLLQCQYRNINRKLSAAGMHEALKLAERPERPEFVLITRTSGVHQALENFPWGNEVNRWRKSCEYFCTDKMLTTVEKKVMIHD

SEQ ID NO: 202196 - DNA, 1440 bp, Artificial Sequence
  derived and/or modified sequence
atgatggacgtcaactcctctggccggcccgatctctatggccacctgaggtcatttctgctgcctgaagtggggaggggattgccagacctttcacctgatggaggggccgatccagtcgccggaagctgggcaccccacctcctgagcgaagttactgcctcaccagcacccacttgggatgccccgcctgacaatgcctccggttgtggggaacaaattaactacggtcgggtcgaaaaggtggtgattgggagtatcttgaccttgatcacactgctcactattgcgggcaattgtcttgtggtaatctcagtctgcttcgtgaaaaaactgagacagcccagtaactacctcatcgttagcctggcacttgccgacctttctgtagctgtcgcagtcatgccgtttgtatctgtgaccgaccttatcggtggcaagtggattttcgggcactttttctgcaatgtattcattgcaatggatgtcatgtgctgtacagcatcaattatgaccctctgtgtgatcagcatcgatcggtacctgggaattactaggcccctgacctacccagtgcgtcaaaacgggaaatgcatggctaagatgattctgtccgtgtggctgctatcagccagtattaccctgcccccattgttcgggtgggctcaaaacgtcaacgacgataaggtgtgccttatctcacaggatttcggctacaccatttattcaaccgccgtcgcgttttacattcccatgtctgttatgctgtttatgtattaccagatttacaaggccgctcgcaagtccgctgcaaagcacaaattccctgggttcccgagagtagagcctgatagtgtgattgcactgaatgggattgtgaagctgcaaaaggaagtggaggagtgcgcaaacctctcacgtctgctgaagcacgagcgtaagaatattagcatttttaagcgagaacagaaggcggcgaccactcttggcattatcgtgggcgcctttactgtctgttggctgcctttcttcctgctttctacagcccggcccttcatttgcggaacgagctgttcttgtatacccttatgggtggagcgaacattcctgtggctaggctacgccaactccctcatcaatccttttatatacgcatttttcaatagggacctgcggacaacgtacaggtctctattgcagtgccagtaccgaaacattaatcgcaaactcagcgcagcgggcatgcacgaagcgcttaaactggcggagcggccggaacgcccggagtttgttctgcgagcctgcaccagacgggttcttttaagacctgagaaacgacctccagtgtccgtgtgggtcctccaaagccccgaccaccacaactggttagccgacaagatgttgacaacagtcgagaagaaagtcatgatccatgattag

SEQ ID NO: 202197 - DNA, 1440 bp, Artificial Sequence
  derived and/or modified sequence
atgatggacgtgaacagtagcgggagacctgacctgtacggacatctccgctctttcttgctccctgaagtgggccgaggactgccagatctgtcccccgacggcggggcagaccccgtggccgggtcttgggccccccacctgcttagcgaagttacagcctcaccggcccctacttgggatgcccctcccgataatgcaagcggatgcggggagcagatcaactatggcagggtcgagaaggtggtgatcggcagcatcctaaccctgataacactgctcaccatcgctggaaactgtctggtggttattagcgtctgtttcgttaagaaactgcggcagccctcgaactatcttattgtctccctggctctggctgatctgagcgtggccgttgcagtgatgcccttcgtgtctgtcaccgacttaattgggggcaaatggattttcggtcattttttttgtaatgtgtttatcgcgatggatgtgatgtgttgcacagcaagtatcatgacactgtgcgtaatttctattgacaggtatctgggaattacccgtcctctgacttacccggtgcgacagaatgggaaatgcatggcaaaaatgatcttgtcagtgtggctgctgagcgcctcaatcaccttgcctccactcttcggttgggcacagaatgtgaatgacgacaaagtgtgcctgatcagtcaagactttgggtatacaatctatagtaccgcagtggcattttacatcccaatgtcagtgatgctgttcatgtattatcagatttacaaagccgcccggaagtcagcagccaaacataagtttcccgggttccctcgggttgagcctgacagtgtgatcgcactgaacggaatcgtgaaactccagaaagaagttgaggaatgcgccaatttatccaggctgctaaaacatgagcggaagaatattagtattttcaagcgggaacagaaggccgctaccacgttgggaatcatagttggtgccttcaccgtgtgttggctgccctttttcctgctctcaactgccaggcccttcatctgcggtactagctgctcgtgcatcccgctgtgggtcgagcgtacatttctttggttagggtatgcaaattcattgatcaacccctttatttacgcatttttcaatagagatctcaggactacatataggtccttactgcagtgccagtatcgcaacattaatcggaaactgtccgccgctggcatgcacgaggcgctgaagttagccgagcggccagagcggccagagtttgtactgatcacccggacttctggcgtccatcaggccctggaaaactttccctggggaaatgaagtgaatagatggcgtaaatcttgcgaatacttctgcacagataaaatgctgacgaccgtcgagaaaaaggtgatgattcacgattag

SEQ ID NO: 202198 - DNA, 1440 bp, Artificial Sequence
  derived and/or modified sequence
atgatggatgtgaacagcagcggccgcccagacctgtatggccacctgcggagcttcctgctgcctgaggtgggccggggcctgcctgacctgagcccagatggcggcgctgaccctgtggccggctcctgggccccccacctgctgtctgaggtgacagccagccctgcccccacctgggatgcccccccagacaatgccagcggctgtggggagcagatcaactacggccgggtggagaaggtggtgattggcagcatcctgaccctcatcaccctgctgaccatcgccggcaactgcctggtggtgatctctgtgtgctttgtgaagaagctgcggcagcccagcaactacctgattgtgtccctggccctggccgacctgtctgtggccgtggccgtgatgccctttgtgtctgtgacagacctgattggaggcaagtggatcttcggccacttcttctgcaatgtgttcatcgccatggatgtgatgtgctgcacagccagcatcatgaccctgtgtgtgatcagcattgaccgctacctgggcatcacccggcccctgacctaccctgtgcggcagaatggcaagtgcatggccaagatgatcctgtctgtgtggctgctgagcgccagcatcaccctgccccccctgtttggctgggcccagaatgtgaatgatgacaaggtgtgcctgatcagccaggactttggctacaccatctacagcacagctgtggccttctacatccccatgtctgtgatgctgttcatgtactaccagatctacaaggccgccaggaagtctgctgccaagcacaagtttcctggcttcccccgggtggagccagattctgtgattgccctgaatggcatcgtgaagctgcagaaggaggtggaggagtgtgccaacctgagccggctgctgaagcatgagaggaagaacatcagcatcttcaagcgggagcagaaggccgccaccaccctgggcatcatcgtgggcgccttcaccgtgtgctggctgcccttcttcctgctgagcacagcccggcccttcatctgtggcaccagctgcagctgcatccccctgtgggtggagaggaccttcctgtggctgggctacgccaacagcctcatcaaccccttcatctatgccttcttcaacagagacctgcggaccacctaccgcagcctgctgcagtgccagtacagaaacatcaacaggaagctgtctgctgctggcatgcatgaggccctgaagctggccgagaggcctgagaggcctgagtttgtgctgcgggcctgcaccaggagagtgctgctgcggcctgagaagaggcctcctgtgtctgtgtgggtgctgcagagcccagaccaccacaactggctggccgacaagatgctgaccaccgtggagaagaaggtgatgattcatgactag

SEQ ID NO: 202199 - DNA, 1440 bp, Artificial Sequence
  derived and/or modified sequence
atgatggatgtgaacagcagcggccgcccagacctgtatggccacctgcggagcttcctgctgcctgaggtgggccggggcctgcctgacctgagcccagatggcggcgctgaccctgtggccggctcctgggccccccacctgctgtctgaggtgacagccagccctgcccccacctgggatgcccccccagacaatgccagcggctgtggggagcagatcaactacggccgggtggagaaggtggtgattggcagcatcctgaccctcatcaccctgctgaccatcgccggcaactgcctggtggtgatctctgtgtgctttgtgaagaagctgcggcagcccagcaactacctgattgtgtccctggccctggccgacctgtctgtggccgtggccgtgatgccctttgtgtctgtgacagacctgattggaggcaagtggatcttcggccacttcttctgcaatgtgttcatcgccatggatgtgatgtgctgcacagccagcatcatgaccctgtgtgtgatcagcattgaccgctacctgggcatcacccggcccctgacctaccctgtgcggcagaatggcaagtgcatggccaagatgatcctgtctgtgtggctgctgagcgccagcatcaccctgccccccctgtttggctgggcccagaatgtgaatgatgacaaggtgtgcctgatcagccaggactttggctacaccatctacagcacagctgtggccttctacatccccatgtctgtgatgctgttcatgtactaccagatctacaaggccgccaggaagtctgctgccaagcacaagtttcctggcttcccccgggtggagccagattctgtgattgccctgaatggcatcgtgaagctgcagaaggaggtggaggagtgtgccaacctgagccggctgctgaagcatgagaggaagaacatcagcatcttcaagcgggagcagaaggccgccaccaccctgggcatcatcgtgggcgccttcaccgtgtgctggctgcccttcttcctgctgagcacagcccggcccttcatctgtggcaccagctgcagctgcatccccctgtgggtggagaggaccttcctgtggctgggctacgccaacagcctcatcaaccccttcatctatgccttcttcaacagagacctgcggaccacctaccgcagcctgctgcagtgccagtacagaaacatcaacaggaagctgtctgctgctggcatgcatgaggccctgaagctggccgagaggcctgagaggcctgagtttgtgctgatcaccaggaccagcggcgtgcaccaggccctggagaacttcccctggggcaatgaggtgaaccgctggaggaagagctgtgagtacttctgcacagacaagatgctgaccaccgtggagaagaaggtgatgattcatgactag

SEQ ID NO: 202200 - DNA, 1440 bp, Artificial Sequence
  derived and/or modified sequence
atgatggacgtgaacagcagcggccggcccgacctgtacggccaccttagatcgtttttgctcccagaggtgggtcgtggattgccagatctatctccagatgggggagctgacccagtggccgggtcttgggcaccccacctgttgagcgaggtgacagcttcccctgcacccacgtgggatgctccaccagataacgcatccggctgcggtgagcagatcaactacggcagggtggagaaagtggtgatcgggtcaatcttgactttaattacactgctcacaatcgcaggtaactgtctggtagtgataagcgtgtgctttgtaaagaagctgcgccagccaagcaattacctgatcgtcagcttggccctcgcagacctttcagtcgcggtcgctgtcatgcctttcgtgtccgttacagacctaataggcgggaagtggattttcgggcactttttttgtaacgtctttatcgctatggacgtgatgtgctgtaccgcctctatcatgaccctctgcgtgatttccattgacagatacctcggtatcactaggccactcacatatccagtgcgccaaaatgggaagtgtatggccaagatgatactctcggtttggctgctttcggcgagtatcacacttccgcccttattcgggtgggctcagaacgtgaacgacgacaaggtttgtctcattagccaggattttggatataccatctattctaccgcagttgcattctatatccctatgtctgtgatgctttttatgtattaccaaatttacaaagccgcgagaaagagcgcagcaaaacacaaattccctggtttcccgcgcgtggaaccagattccgtaatcgcgcttaatggcattgtcaagctgcagaaggaagtggaggagtgcgccaatctatcacgactgctgaagcatgaacgcaaaaatatttcgattttcaaacgtgaacagaaagctgctactaccttaggaattattgtgggcgccttcactgtgtgctggttgccattctttttactgtctacagcccggcctttcatctgcggtacctcttgtagctgtataccgctgtgggtcgagcgcactttcttatggcttggctatgcgaattctctcattaatcctttcatctatgccttctttaaccgggatctgaggaccacttatcgatctcttctccagtgccagtatcggaacataaatcgaaagctgtcagctgctggcatgcatgaggccctcaagctggcggagcgtcccgagagaccagagttcgtcttgcgagcatgtactagacgagtgctgctgagacctgagaaacgcccaccagtctcggtttgggtcctgcagtcacccgaccatcataattggctggccgataaaatgctcaccaccgtcgaaaaaaaggtcatgatccacgactag

SEQ ID NO: 202201 - DNA, 1440 bp, Artificial Sequence
  derived and/or modified sequence
atgatggacgtgaacagcagcggccggcccgacctgtacggccacttgcgctctttcctgctaccagaggtggggcgtgggctgcctgacttgtctccagacgggggcgctgatccagtggcgggaagctgggccccacacctgctgtccgaagtaactgcatcccctgcccccacctgggacgccccaccagacaacgcctccggctgtggagagcagatcaattatgggcgtgtggaaaaggtcgtgatcgggtccatcctgacactgatcacccttctgaccattgccggcaactgccttgtggtgatctctgtgtgttttgtcaaaaagttaaggcagccaagcaattaccttatcgtgtctctcgccttagcagacctttccgttgcagttgccgtgatgccttttgtcagcgttaccgacctgatcggaggaaagtggatctttgggcactttttttgcaatgtgtttattgcgatggatgtgatgtgttgtaccgcctccattatgacactgtgcgtgatttccattgaccggtacttaggtattactaggcccctaacttacccggttcgtcaaaatggcaagtgcatggccaaaatgatcctgtcggtctggctgcttagtgcgtcaataacgctgcccccactgttcgggtgggcccagaatgtgaacgacgataaggtttgtcttatctctcaggattttggttataccatctacagtaccgccgtggccttttacatccctatgtcagtaatgctattcatgtactaccagatttacaaggctgccaggaaatctgcagcaaaacataagtttcccggattccctcgagtcgagccagatagcgtgattgcattgaatggcatcgttaagttgcagaaggaagtggaagagtgtgccaatctgtcacgcctattgaaacacgagcgcaaaaatataagtatattcaagcgcgagcaaaaggccgccacaacgttggggattattgtgggcgcttttacggtgtgctggctccccttctttctattgagcaccgcccgcccattcatatgtggtactagttgttcgtgtatacctctctgggtagaaagaacctttctttggctcgggtatgctaacagtctcatcaatcctttcatatacgctttcttcaaccgcgacctgcgaaccacatatcggtccctcttgcaatgccagtacaggaacataaatcggaagctgagcgctgctggcatgcacgaggccctgaagctggccgaacgacctgagcgaccagagtttgtgctgattaccagaacttctggcgtccatcaggcattagagaatttcccatggggcaacgaggtaaatcggtggcgcaaatcatgcgagtatttctgtactgataaaatgctcaccaccgtggagaaaaaggtgatgatacatgattag

SEQ ID NO: 202202 - DNA, 1440 bp, Artificial Sequence
  derived and/or modified sequence
atgatggacgtgaattccagcggtcgacctgatttgtacggccaccttaggagtttcttactccctgaggtaggcagagggctccctgacctgagtcctgacggaggcgctgatccagtggctgggtcatgggctcctcatttgctgtcggaagtgacagcaagtccagcgcctacatgggacgccccaccggataacgccagcggatgcggggaacagatcaattatggacgcgtcgagaaagtggtgatagggtcaatactgacactcattactctgctgaccattgctgggaattgtctggtggttatttcagtttgttttgtgaagaaattgaggcagccttctaactatctaatcgtaagccttgctctggccgacctttctgttgctgtggcagtcatgccctttgtgagcgtgaccgacctgatcggcggtaagtggatctttggtcactttttctgtaacgtgttcattgctatggacgttatgtgctgtactgcctccattatgaccctctgcgtgatatcaatcgatagatacctcggcatcactagaccactcacataccccgtgcgacagaacggtaagtgcatggctaagatgatattaagtgtctggcttctgtccgcgtctataacgttgccacccctgtttgggtgggcacagaacgtaaacgatgacaaggtatgcctgatcagccaggacttcggttataccatttatagcaccgccgttgccttctatatcccgatgagcgtgatgctcttcatgtattatcaaatttacaaagccgctcgaaaatccgcggcaaagcataaatttccgggtttcccccgagtagaaccggactccgtaattgccctgaacggcatcgtgaagctgcaaaaggaagtggaggaatgcgcaaatctatcaaggcttctcaaacacgagagaaaaaatatctccatcttcaagagagaacagaaggcagcgacgacactgggcattatcgtgggcgctttcaccgtgtgctggctcccgttctttctgttatctactgcacgacctttcatctgcggtacaagctgcagctgcatacctctgtgggttgagcggacttttttgtggttaggttatgctaatagtttgatcaatccttttatctacgcattcttcaatagagacctcagaactacatacagaagcctgctccagtgccagtatcgaaatattaacagaaaactgtctgcggcaggtatgcatgaggccctgaaactggctgaacggcctgaacggcctgaattcgtgcttcgcgcatgcacgcggagagtgcttctgcgaccggaaaaaagaccacccgtgtctgtttgggtgttgcagagccctgaccaccacaactggctggccgataagatgctgacaacagttgaaaagaaggtcatgattcatgattag

SEQ ID NO: 202203 - DNA, 1440 bp, Artificial Sequence
  derived and/or modified sequence
atgatggacgttaatagcagcggaaggcctgatctgtacggccacctgagaagtttccttctgccagaagtcggacggggactgcccgacctctcccccgatggaggtgccgatccagtggccggatcatgggcacctcaccttctgtctgaagtgaccgcctcaccagcaccgacttgggacgctcctcctgataatgcctccggctgtggagaacagattaattacgggcgagtggaaaaggtcgtgatcggatctatactaacactgatcactctgctgaccattgcaggtaattgcctagtggtgattagtgtgtgttttgtgaaaaaactccggcagccaagtaactatctgatagtgtctcttgctctggccgacctttctgtggccgtggccgtgatgcctttcgtcagcgtgacggatttgataggcggaaaatggatcttcgggcacttcttttgcaacgtgttcatcgctatggatgttatgtgctgcacagcctccattatgacgctgtgcgtgatatccattgacagatacctggggataactcggcctctgacctaccccgtgcggcagaacggtaagtgcatggcgaagatgatcctgagcgtgtggctgctcagcgcatccatcaccttgccacccctgttcggttgggctcaaaacgtaaacgatgataaagtgtgtctgatttcacaggacttcggctacacaatttacagtacagccgtggctttttacattccgatgagcgtcatgctgtttatgtattatcagatctataaggccgctcgcaagtcagccgcaaagcacaagttccctggcttcccaagagtcgagcccgactctgtcatagccctcaacggcatagtgaagttgcagaaggaggttgaggagtgcgccaatctgtcgaggttgcttaagcatgagagaaagaacattagcatctttaagagagaacagaaggctgcgaccactctcggtatcattgtgggggcttttaccgtctgctggctcccattcttcctcttgagtacagctaggccctttatctgtggaaccagttgttcctgtatcccactgtgggtcgaacggaccttcctgtggttgggatatgcaaacagtctcataaatccatttatatatgcttttttcaatagggatcttcggaccacctaccgcagcctcctgcagtgccaatacaggaatattaaccggaaactcagtgcagcgggtatgcatgaagcgctaaagctcgctgaacgaccagagcggccagagttcgtactgatcacccgcacatcaggtgtccatcaggcgctggagaacttcccttgggggaacgaagttaatcgttggcggaagtcttgtgagtatttctgtaccgataaaatgctgaccaccgtggaaaagaaggtcatgatacacgactag

SEQ ID NO: 202204 - DNA, 3126 bp, Artificial Sequence
  derived and/or modified sequence
ccatgggcagcggcacacggcggcgcgatgatggacgttaacagcagcggccgcccggacctctacgggcacctccgctctttccttctgccagaagtggggcgcgggctgcccgacttgagccccgacggtggcgccgacccggtcgcgggctcctgggcgccgcacctgctgagcgaggtgacagccagcccggcgcccacctgggacgcgcccccggacaatgcctccggctgtggggaacagatcaactacggcagagtcgagaaagttgtgatcggctccatcctgacgctcatcacgctgctgacgatcgcgggcaactgcctggtggtgatctccgtgtgcttcgtcaagaagctccgccagccctccaactacctgatcgtgtccctggcgctggccgacctctcggtggctgtggcggtcatgcccttcgtcagcgtcaccgacctcatcgggggcaagtggatctttggacactttttctgtaatgtcttcatcgccatggacgtcatgtgctgcacggcctcgatcatgaccctgtgcgtgatcagcattgacaggtaccttgggatcacaaggcccctcacataccctgtgaggcagaatgggaaatgcatggcgaagatgattctctccgtctggcttctctccgcctccatcaccttacctccactctttggatgggctcagaatgtaaatgatgataaggtgtgcttgatcagccaggactttggctatacgatttactctaccgcagtggcattttatatccccatgtccgtcatgcttttcatgtactaccagatttacaaggctgccaggaagagtgctgccaaacacaagtttcctggcttccctcgagtggagccagacagcgtcatcgccctgaatggcatagtgaagctccagaaggaggtggaagagtgtgcaaacctttcgagactcctcaagcatgaaaggaaaaacatctccatctttaagcgagaacagaaagcagccaccaccctggggatcatcgtcggggcctttaccgtgtgctggctgccatttttcctcctctcgacagccagacccttcatctgtggcacttcctgcagctgcatcccactgtgggtggagaggacatttctgtggctaggctatgcaaactctctcattaacccttttatatatgccttcttcaaccgggacctgaggaccacctatcgcagcctgctccagtgccagtaccggaatatcaaccggaagctctcagctgcaggcatgcatgaagccctgaagcttgctgagaggccagagagacctgagtttgtgctgagggcctgcacaaggagggtgctgttgagaccagaaaagaggccaccggtatctgtgtgggtgctacaatctccagaccatcacaattggttagcagacaaaatgctgactactgtagaaaaaaaggtcatgattcatgattgaaagcagaacaatggagatgaaataaacaaggcaaaatagaggtggaaacagaaggaagtcatttgctgagtctgcagaatggaatgcagcttctgtcctttcttgggatgtctaaaacatgacaaacagggtgatctgttgtacacactatcttatgagggagatggtgacttctccttttttctgtggatcagtgctattgtgtgttctcagtttaagatagcagatcatctcagcagtaagcacaccaacagaactgagttccagaaaggaagcagtttctggtgctttgcatatgtccaaatccatgcaagtgggagaaagttccagtgcacacttcccatgcttctgagtctaggcgttgtggtgaatatgcaggaatcattcatgagacagaatgtattttgttgtatgacagaaggcttttccaagcaaactgcggtgagcgtagtgttgaatatgttgcatgtccatgttagaaaacagaatccagtcatcagctaatacaaatgatttcccagagcagtgtttgtttcaagcttctgtcaaatagtttggcttttctgcagggtctctgtgatttccccacctatgtacttttctgtgttaactcacttattatggtataactcaggaacaggtctcaggatggagagaagcatacaacatgagcaaagctttttctcgtgctctgaagggtcttgagaggggagtgggatgccttctgtgaggatttttatcgcagtgaagctcaagtggtacccaactgcgttgtaattaacatgattattggcatgtttttgactctcattttctacaaggctgcagtgggcccacccatgggctggcccataactgtatgttatgtggaagaagtgtgggaatgatgggttttccatgaaatgtgatgcttctggagatggggcataaacatgttcattcttgttgagctgcattgtgttaaaccaaattgtgtgaagcgaggtcacctggaccactcttgggaaatgcttcagaacaccagtctgttccttctagagaatttgtttttgtgttctatgtatcttaaatcaaatgtgtgcctaagcaattctgtcctctgattcccacccctacccaccaaaaaatggtagacatgaaaggcaggtgaggaaacagaaaaggtctctttgcagatatatattttttaaatggcactatgtagtaattaagagctaaggagacagaaagacagtagatgagaatagaagagtacctgtacctacaaggggaaaaatgaatgcaattctttatttgataagagtgaactgaaagagaatattattttcctacaataaagcaagctgtcctctcacaggataaagtggaattctgacatggattatggacttcttctaactcccattgacattgcttcttaccagacatggggaaaagctacctttcctgaaaggggaggagggcactgtcctttcagacaaagcttgtacaaattcctgaaccgcaaatttgctgaagtgaccgtatatattatattcataatttaaatgattatttatggtcagatacatattgttaaacttgaaaatgttttattacattacatcaaataaagtttatttgtagctgaaataaagcaacgtaagtaacaatttttaa

SEQ ID NO: 202205 - DNA, 3033 bp, Artificial Sequence
  derived and/or modified sequence
ccatgggcagcggcacacggcggcgcgatgatggacgttaacagcagcggccgcccggacctctacgggcacctccgctctttccttctgccagaagtggggcgcgggctgcccgacttgagccccgacggtggcgccgacccggtcgcgggctcctgggcgccgcacctgctgagcgaggtgacagccagcccggcgcccacctgggacgcgcccccggacaatgcctccggctgtggggaacagatcaactacggcagagtcgagaaagttgtgatcggctccatcctgacgctcatcacgctgctgacgatcgcgggcaactgcctggtggtgatctccgtgtgcttcgtcaagaagctccgccagccctccaactacctgatcgtgtccctggcgctggccgacctctcggtggctgtggcggtcatgcccttcgtcagcgtcaccgacctcatcgggggcaagtggatctttggacactttttctgtaatgtcttcatcgccatggacgtcatgtgctgcacggcctcgatcatgaccctgtgcgtgatcagcattgacaggtaccttgggatcacaaggcccctcacataccctgtgaggcagaatgggaaatgcatggcgaagatgattctctccgtctggcttctctccgcctccatcaccttacctccactctttggatgggctcagaatgtaaatgatgataaggtgtgcttgatcagccaggactttggctatacgatttactctaccgcagtggcattttatatccccatgtccgtcatgcttttcatgtactaccagatttacaaggctgccaggaagagtgctgccaaacacaagtttcctggcttccctcgagtggagccagacagcgtcatcgccctgaatggcatagtgaagctccagaaggaggtggaagagtgtgcaaacctttcgagactcctcaagcatgaaaggaaaaacatctccatctttaagcgagaacagaaagcagccaccaccctggggatcatcgtcggggcctttaccgtgtgctggctgccatttttcctcctctcgacagccagacccttcatctgtggcacttcctgcagctgcatcccactgtgggtggagaggacatttctgtggctaggctatgcaaactctctcattaacccttttatatatgccttcttcaaccgggacctgaggaccacctatcgcagcctgctccagtgccagtaccggaatatcaaccggaagctctcagctgcaggcatgcatgaagccctgaagcttgctgagaggccagagagacctgagtttgtgctgtaagacaaaatgctgactactgtagaaaaaaaggtcatgattcatgattgaaagcagaacaatggagatgaaataaacaaggcaaaatagaggtggaaacagaaggaagtcatttgctgagtctgcagaatggaatgcagcttctgtcctttcttgggatgtctaaaacatgacaaacagggtgatctgttgtacacactatcttatgagggagatggtgacttctccttttttctgtggatcagtgctattgtgtgttctcagtttaagatagcagatcatctcagcagtaagcacaccaacagaactgagttccagaaaggaagcagtttctggtgctttgcatatgtccaaatccatgcaagtgggagaaagttccagtgcacacttcccatgcttctgagtctaggcgttgtggtgaatatgcaggaatcattcatgagacagaatgtattttgttgtatgacagaaggcttttccaagcaaactgcggtgagcgtagtgttgaatatgttgcatgtccatgttagaaaacagaatccagtcatcagctaatacaaatgatttcccagagcagtgtttgtttcaagcttctgtcaaatagtttggcttttctgcagggtctctgtgatttccccacctatgtacttttctgtgttaactcacttattatggtataactcaggaacaggtctcaggatggagagaagcatacaacatgagcaaagctttttctcgtgctctgaagggtcttgagaggggagtgggatgccttctgtgaggatttttatcgcagtgaagctcaagtggtacccaactgcgttgtaattaacatgattattggcatgtttttgactctcattttctacaaggctgcagtgggcccacccatgggctggcccataactgtatgttatgtggaagaagtgtgggaatgatgggttttccatgaaatgtgatgcttctggagatggggcataaacatgttcattcttgttgagctgcattgtgttaaaccaaattgtgtgaagcgaggtcacctggaccactcttgggaaatgcttcagaacaccagtctgttccttctagagaatttgtttttgtgttctatgtatcttaaatcaaatgtgtgcctaagcaattctgtcctctgattcccacccctacccaccaaaaaatggtagacatgaaaggcaggtgaggaaacagaaaaggtctctttgcagatatatattttttaaatggcactatgtagtaattaagagctaaggagacagaaagacagtagatgagaatagaagagtacctgtacctacaaggggaaaaatgaatgcaattctttatttgataagagtgaactgaaagagaatattattttcctacaataaagcaagctgtcctctcacaggataaagtggaattctgacatggattatggacttcttctaactcccattgacattgcttcttaccagacatggggaaaagctacctttcctgaaaggggaggagggcactgtcctttcagacaaagcttgtacaaattcctgaaccgcaaatttgctgaagtgaccgtatatattatattcataatttaaatgattatttatggtcagatacatattgttaaacttgaaaatgttttattacattacatcaaataaagtttatttgtagctgaaataaagcaacgtaagtaacaatttttaa

SEQ ID NO: 202206 - DNA, 1455 bp, Artificial Sequence
  derived and/or modified sequence
atgatggacgttaacagcagcggccgcccggacctctacgggcacctccgctctttccttctgccagaagtggggcgcgggctgcccgacttgagccccgacggtggcgccgacccggtcgcgggctcctgggcgccgcacctgctgagcgaggtgacagccagcccggcgcccacctgggacgcgcccccggacaatgcctccggctgtggggaacagatcaactacggcagagtcgagaaagttgtgatcggctccatcctgacgctcatcacgctgctgacgatcgcgggcaactgcctggtggtgatctccgtgtgcttcgtcaagaagctccgccagccctccaactacctgatcgtgtccctggcgctggccgacctctcggtggctgtggcggtcatgcccttcgtcagcgtcaccgacctcatcgggggcaagtggatctttggacactttttctgtaatgtcttcatcgccatggacgtcatgtgctgcacggcctcgatcatgaccctgtgcgtgatcagcattgacaggtaccttgggatcacaaggcccctcacataccctgtgaggcagaatgggaaatgcatggcgaagatgattctctccgtctggcttctctccgcctccatcaccttacctccactctttggatgggctcagaatgtaaatgatgataaggtgtgcttgatcagccaggactttggctatacgatttactctaccgcagtggcattttatatccccatgtccgtcatgcttttcatgtactaccagatttacaaggctgccaggaagagtgctgccaaacacaagtttcctggcttccctcgagtggagccagacagcgtcatcgccctgaatggcatagtgaagctccagaaggaggtggaagagtgtgcaaacctttcgagactcctcaagcatgaaaggaaaaacatctccatctttaagcgagaacagaaagcagccaccaccctggggatcatcgtcggggcctttaccgtgtgctggctgccatttttcctcctctcgacagccagacccttcatctgtggcacttcctgcagctgcatcccactgtgggtggagaggacatttctgtggctaggctatgcaaactctctcattaacccttttatatatgccttcttcaaccgggacctgaggaccacctatcgcagcctgctccagtgccagtaccggaatatcaaccggaagctctcagctgcaggcatgcatgaagccctgaagcttgctgagaggccagagagacctgagtttgtgctcataaccagaacctcaggagttcatcaggcactcgaaaattttccctggggtaatgaagtgaatagatggaggaaaagctgtgaatacttttgcactgacaaaatgctgactactgtagaaaaaaaggtcatgattcatgattgaaagcagaacaatgga

SEQ ID NO: 202207 - DNA, 1440 bp, Artificial Sequence
  derived and/or modified sequence
atgatggacgtgaacagcagcggcagacccgacctgtacggccacctgagaagcttcctgctgcccgaggtgggcagaggcctgcccgacctgagccccgacggcggcgccgaccccgtggccggcagctgggccccccacctgctgagcgaggtgaccgccagccccgcccccacctgggacgccccccccgacaacgccagcggctgcggcgagcagatcaactacggcagagtggagaaggtggtgatcggcagcatcctgaccctgatcaccctgctgaccatcgccggcaactgcctggtggtgatcagcgtgtgcttcgtgaagaagctgagacagcccagcaactacctgatcgtgagcctggccctggccgacctgagcgtggccgtggccgtgatgcccttcgtgagcgtgaccgacctgatcggcggcaagtggatcttcggccacttcttctgcaacgtgttcatcgccatggacgtgatgtgctgcaccgccagcatcatgaccctgtgcgtgatcagcatcgacagatacctgggcatcaccagacccctgacctaccccgtgagacagaacggcaagtgcatggccaagatgatcctgagcgtgtggctgctgagcgccagcatcaccctgccccccctgttcggctgggcccagaacgtgaacgacgacaaggtgtgcctgatcagccaggacttcggctacaccatctacagcaccgccgtggccttctacatccccatgagcgtgatgctgttcatgtactaccagatctacaaggccgccagaaagagcgccgccaagcacaagttccccggcttccccagagtggagcccgacagcgtgatcgccctgaacggcatcgtgaagctgcagaaggaggtggaggagtgcgccaacctgagcagactgctgaagcacgagagaaagaacatcagcatcttcaagagagagcagaaggccgccaccaccctgggcatcatcgtgggcgccttcaccgtgtgctggctgcccttcttcctgctgagcaccgccagacccttcatctgcggcaccagctgcagctgcatccccctgtgggtggagagaaccttcctgtggctgggctacgccaacagcctgatcaaccccttcatctacgccttcttcaacagagacctgagaaccacctacagaagcctgctgcagtgccagtacagaaacatcaacagaaagctgagcgccgccggcatgcacgaggccctgaagctggccgagagacccgagagacccgagttcgtgctgagagcctgcaccagaagagtgctgctgagacccgagaagagaccccccgtgagcgtgtgggtgctgcagagccccgaccaccacaactggctggccgacaagatgctgaccaccgtggagaagaaggtgatgatccacgactag

SEQ ID NO: 202208 - DNA, 1440 bp, Artificial Sequence
  derived and/or modified sequence
atgatggacgtgaacagcagcggcagacccgacctgtacggccacctgagaagcttcctgctgcccgaggtgggcagaggcctgcccgacctgagccccgacggcggcgccgaccccgtggccggcagctgggccccccacctgctgagcgaggtgaccgccagccccgcccccacctgggacgccccccccgacaacgccagcggctgcggcgagcagatcaactacggcagagtggagaaggtggtgatcggcagcatcctgaccctgatcaccctgctgaccatcgccggcaactgcctggtggtgatcagcgtgtgcttcgtgaagaagctgagacagcccagcaactacctgatcgtgagcctggccctggccgacctgagcgtggccgtggccgtgatgcccttcgtgagcgtgaccgacctgatcggcggcaagtggatcttcggccacttcttctgcaacgtgttcatcgccatggacgtgatgtgctgcaccgccagcatcatgaccctgtgcgtgatcagcatcgacagatacctgggcatcaccagacccctgacctaccccgtgagacagaacggcaagtgcatggccaagatgatcctgagcgtgtggctgctgagcgccagcatcaccctgccccccctgttcggctgggcccagaacgtgaacgacgacaaggtgtgcctgatcagccaggacttcggctacaccatctacagcaccgccgtggccttctacatccccatgagcgtgatgctgttcatgtactaccagatctacaaggccgccagaaagagcgccgccaagcacaagttccccggcttccccagagtggagcccgacagcgtgatcgccctgaacggcatcgtgaagctgcagaaggaggtggaggagtgcgccaacctgagcagactgctgaagcacgagagaaagaacatcagcatcttcaagagagagcagaaggccgccaccaccctgggcatcatcgtgggcgccttcaccgtgtgctggctgcccttcttcctgctgagcaccgccagacccttcatctgcggcaccagctgcagctgcatccccctgtgggtggagagaaccttcctgtggctgggctacgccaacagcctgatcaaccccttcatctacgccttcttcaacagagacctgagaaccacctacagaagcctgctgcagtgccagtacagaaacatcaacagaaagctgagcgccgccggcatgcacgaggccctgaagctggccgagagacccgagagacccgagttcgtgctgatcaccagaaccagcggcgtgcaccaggccctggagaacttcccctggggcaacgaggtgaacagatggagaaagagctgcgagtacttctgcaccgacaagatgctgaccaccgtggagaagaaggtgatgatccacgactag

SEQ ID NO: 202209 - protein, 432 aa, Artificial Sequence
  derived and/or modified sequence
MMDVNSSGRPDLYGHLRSFLLPEVGRGLPDLSPDGGADPVAGSWAPHLLSEVTASPAPTWDAPPDNASGCGEQINYGRVEKVVIGSILTLITLLTIAGNCLVVISVCFVKKLRQPSNYLIVSLALADLSVAVAVMPFVSVTDLIGGKWIFGHFFCNVFIAMDVMCCTASIMTLCVISIDRYLGITRPLTYPVRQNGKCMAKMILSVWLLSASITLPPLFGWAQNVNDDKVCLISQDFGYTIYSTAVAFYIPMSVMLFMYYQIYKAARKSAAKHKFPGFPRVEPDSVIALNGIVKLQKEVEECANLSRLLKHERKNISIFKREQKAATTLGIIVGAFTVCWLPFFLLSTARPFICGTSCSCIPLWVERTFLWLGYANSLINPFIYAFFNRDLRTTYRSLLQCQYRNINRKLSAAGMHEALKLAERPERPEFVL

SEQ ID NO: 202210 - DNA, 1299 bp, Artificial Sequence
  derived and/or modified sequence
atgatggatgtcaacagttctgggagacctgatctgtatggccatctgagaagttttttgctgcccgaagtgggtcgggggctgcccgatctgtcgccagacggtggcgccgatcctgtggccgggagctgggccccccacttgctgtccgaagtcaccgctagtcctgctccaacatgggacgcccccccagacaatgcctctgggtgcggagagcagatcaattatggccgagttgaaaaggtagtgattggatctatattaactctcatcaccctgctgaccattgccgggaactgccttgtggtgatcagtgtgtgcttcgtaaaaaaactacggcaaccctcgaactatctcatcgtgtcactcgccctcgccgacctctctgtagccgtcgcggtcatgcccttcgtgtccgtcacagacctcataggaggcaagtggattttcggccacttcttttgcaacgtgttcatcgcgatggacgtaatgtgttgcacagcatctatcatgacattgtgtgtaatcagtattgacagatacctgggcatcaccagacccttgacataccctgttcgacaaaatggaaaatgcatggccaaaatgatcctgtccgtgtggctcctttccgcctctatcaccttacctcccctcttcggatgggcgcagaatgttaatgatgataaagtctgtttaatttcccaagacttcggctataccatttattccaccgcggttgctttctatatccctatgtctgtcatgcttttcatgtattatcagatttacaaagctgctcgcaaaagcgccgcaaaacataaatttccaggattcccaagggtggaacccgattccgtgattgccctgaatgggatcgtgaagctgcagaaggaggttgaggagtgcgccaacctttctcgcctgttgaaacacgagaggaagaacatcagcatcttcaagagggagcagaaagccgccaccacgcttgggattatcgtgggagcctttactgtctgctggctgcctttcttcctcctgagtactgcacggccttttatctgcggaacaagctgctcttgtatcccattatgggtggaacgtacattcctgtggctgggctacgcaaatagtctgatcaatcccttcatatatgcctttttcaatagagacctgcgcacgacttacaggtctctgttgcagtgtcagtatcgtaatatcaaccgaaagttatctgctgccgggatgcacgaagccttaaaattggccgaacgaccagaacgaccagagtttgtcctgtag

SEQ ID NO: 202211 - DNA, 1299 bp, Artificial Sequence
  derived and/or modified sequence
atgatggatgtgaacagcagcggccgcccagacctgtatggccacctgcggagcttcctgctgcctgaggtgggccggggcctgcctgacctgagcccagatggcggcgctgaccctgtggccggctcctgggccccccacctgctgtctgaggtgacagccagccctgcccccacctgggatgcccccccagacaatgccagcggctgtggggagcagatcaactacggccgggtggagaaggtggtgattggcagcatcctgaccctcatcaccctgctgaccatcgccggcaactgcctggtggtgatctctgtgtgctttgtgaagaagctgcggcagcccagcaactacctgattgtgtccctggccctggccgacctgtctgtggccgtggccgtgatgccctttgtgtctgtgacagacctgattggaggcaagtggatcttcggccacttcttctgcaatgtgttcatcgccatggatgtgatgtgctgcacagccagcatcatgaccctgtgtgtgatcagcattgaccgctacctgggcatcacccggcccctgacctaccctgtgcggcagaatggcaagtgcatggccaagatgatcctgtctgtgtggctgctgagcgccagcatcaccctgccccccctgtttggctgggcccagaatgtgaatgatgacaaggtgtgcctgatcagccaggactttggctacaccatctacagcacagctgtggccttctacatccccatgtctgtgatgctgttcatgtactaccagatctacaaggccgccaggaagtctgctgccaagcacaagtttcctggcttcccccgggtggagccagattctgtgattgccctgaatggcatcgtgaagctgcagaaggaggtggaggagtgtgccaacctgagccggctgctgaagcatgagaggaagaacatcagcatcttcaagcgggagcagaaggccgccaccaccctgggcatcatcgtgggcgccttcaccgtgtgctggctgcccttcttcctgctgagcacagcccggcccttcatctgtggcaccagctgcagctgcatccccctgtgggtggagaggaccttcctgtggctgggctacgccaacagcctcatcaaccccttcatctatgccttcttcaacagagacctgcggaccacctaccgcagcctgctgcagtgccagtacagaaacatcaacaggaagctgtctgctgctggcatgcatgaggccctgaagctggccgagaggcctgagaggcctgagtttgtgctgtag

SEQ ID NO: 202212 - DNA, 1299 bp, Artificial Sequence
  derived and/or modified sequence
atgatggacgtgaacagcagcggccggcccgacctgtacggccacctgaggtccttccttctacccgaggtaggccgcggactccctgatctaagtccagatgggggcgctgaccctgtggccgggagctgggcccctcatttgctgagcgaggtcactgcttcccccgctcctacttgggatgcaccaccagataatgcttctgggtgtggcgaacagatcaattatggccgcgtggagaaagtggtcatagggtccatcctcacccttattaccctcctcaccattgccggcaactgtctagtggtgatctcggtctgctttgtaaaaaagctgagacaaccctccaattacctgatcgtgagcctggcccttgcagacttatccgtggccgttgcagtgatgcctttcgtctcggtcacggacctcatcggcggcaagtggatcttcggtcacttcttttgcaacgtgtttatcgccatggacgtcatgtgttgtaccgcatccatcatgactctgtgcgtaatctcaatcgatcggtatttgggcattacccgaccacttacctaccccgtcagacagaatggcaagtgcatggccaaaatgatcctttcggtgtggctgctctcagcctcaattactctgcccccattgttcgggtgggcccagaacgtgaacgacgacaaggtctgtctaatcagccaggattttgggtatacaatttattcaaccgcagtcgcgttttacattccaatgtccgtgatgctctttatgtactaccagatctataaagctgcacgaaaaagcgcagccaagcataaatttccaggattccccagggtggagcccgactccgtgattgcccttaacggaattgttaaacttcagaaggaggtggaggagtgtgctaatctgtctcgccttctgaaacatgagagaaaaaacatttctatcttcaaacgggaacagaaagccgccacaaccctggggatcatagtgggcgcgtttactgtatgctggctgcctttcttccttttgtctactgcccgcccttttatatgtggcacctcctgcagctgcattccactgtgggttgagcggacttttttatggctcggctatgctaacagcctgattaatccttttatctatgccttcttcaacagggatctgcgcaccacttaccggagccttctgcagtgccagtaccggaatatcaaccgcaagctctctgccgccggaatgcatgaggcactcaagctggcggagcggcccgagagacctgaatttgtgctgtag

SEQ ID NO: 202213 - DNA, 1299 bp, Artificial Sequence
  derived and/or modified sequence
atgatggatgtgaattccagtgggagacctgatttatatggacacctgcgcagctttctacttcctgaagttggtcgtgggcttccagacttaagccctgatgggggagcagatcctgtcgcgggttcatgggccccacacctgttgtcggaggtgacagcaagtcctgctcccacttgggatgctcctcctgataatgccagcggatgcggggagcagatcaactatgggagagtagagaaggtggtcattggctccattcttacattaatcaccctcctgacaattgctggaaactgtttggtcgtcatctctgtctgtttcgtgaagaagttaagacaaccctccaattacctaattgtgagcctcgccctcgcggacctcagtgtcgctgttgccgtgatgccattcgtgtccgtgactgacttaataggtggtaagtggatcttcgggcattttttttgcaatgtgtttatcgcaatggatgtgatgtgctgtaccgcctccatcatgacactgtgtgtgattagcattgaccgctacttaggcattacacggccactgacgtaccctgtccgccagaatggcaaatgcatggccaaaatgatcctgtcagtctggctgctttccgcctccatcaccttacccccactgttcggttgggcacaaaatgttaatgacgacaaggtctgtctcatttcccaggattttggttatacgatctattcgacagcagttgccttctatattccaatgagtgttatgctgttcatgtattaccagatttataaggccgcaaggaagtccgctgctaaacacaagttccccggatttcctagggtcgaacccgattctgtgattgctcttaatggcatcgttaaactgcagaaagaggtggaggaatgtgccaacctatcgcgtcttctgaaacacgagcggaagaacatttccatctttaagcgtgagcaaaaagctgccactacactgggaatcatcgtgggcgctttcaccgtctgttggctgccattctttttgctgagcactgcacggcctttcatctgcggtacctcttgttcctgtataccactgtgggtagagaggacctttctgtggttggggtatgcaaactccctgatcaatcccttcatctacgctttcttcaatcgcgaccttaggacaacctacagatccctcctgcagtgccagtacagaaacatcaaccgaaagttgtcagccgcagggatgcatgaagcactgaaacttgccgaaagacccgagcgccctgagttcgtcctgtag

SEQ ID NO: 202214 - DNA, 1299 bp, Artificial Sequence
  derived and/or modified sequence
atgatggacgtgaacagcagcggcagacccgacctgtacggccacctgagaagcttcctgctgcccgaggtgggcagaggcctgcccgacctgagccccgacggcggcgccgaccccgtggccggcagctgggccccccacctgctgagcgaggtgaccgccagccccgcccccacctgggacgccccccccgacaacgccagcggctgcggcgagcagatcaactacggcagagtggagaaggtggtgatcggcagcatcctgaccctgatcaccctgctgaccatcgccggcaactgcctggtggtgatcagcgtgtgcttcgtgaagaagctgagacagcccagcaactacctgatcgtgagcctggccctggccgacctgagcgtggccgtggccgtgatgcccttcgtgagcgtgaccgacctgatcggcggcaagtggatcttcggccacttcttctgcaacgtgttcatcgccatggacgtgatgtgctgcaccgccagcatcatgaccctgtgcgtgatcagcatcgacagatacctgggcatcaccagacccctgacctaccccgtgagacagaacggcaagtgcatggccaagatgatcctgagcgtgtggctgctgagcgccagcatcaccctgccccccctgttcggctgggcccagaacgtgaacgacgacaaggtgtgcctgatcagccaggacttcggctacaccatctacagcaccgccgtggccttctacatccccatgagcgtgatgctgttcatgtactaccagatctacaaggccgccagaaagagcgccgccaagcacaagttccccggcttccccagagtggagcccgacagcgtgatcgccctgaacggcatcgtgaagctgcagaaggaggtggaggagtgcgccaacctgagcagactgctgaagcacgagagaaagaacatcagcatcttcaagagagagcagaaggccgccaccaccctgggcatcatcgtgggcgccttcaccgtgtgctggctgcccttcttcctgctgagcaccgccagacccttcatctgcggcaccagctgcagctgcatccccctgtgggtggagagaaccttcctgtggctgggctacgccaacagcctgatcaaccccttcatctacgccttcttcaacagagacctgagaaccacctacagaagcctgctgcagtgccagtacagaaacatcaacagaaagctgagcgccgccggcatgcacgaggccctgaagctggccgagagacccgagagacccgagttcgtgctgtag

SEQ ID NO: 202215 - protein, 216 aa, Artificial Sequence
  derived and/or modified sequence
MRIQDPGKVFFGNVDSSGIKHNIFNPPIIARYIRLHPTHYSIRSTLRMELMGCDLNSCSMPLGMESKAISDAQITASSYFTNMFATWSPSKARLHLQGRSNAWRPQVNNPKEWLQVDFQKTMKVTGVTTQGVKSLLTSMYVKEFLISSSQDGHQWTLFFQNGKVKVFQGNQDSFTPVVNSLDPPLLTRYLRIHPQSWVHQIALRMEVLGCEAQDLY

SEQ ID NO: 202216 - DNA, 651 bp, Artificial Sequence
  derived and/or modified sequence
atgagaatccaggaccccggcaaggtgttcttcggcaacgtggacagcagcggcatcaagcacaacatcttcaacccccccatcatcgccagatacatcagactgcaccccacccactacagcatcagaagcaccctgagaatggagctgatgggctgcgacctgaacagctgcagcatgcccctgggcatggagagcaaggccatcagcgacgcccagatcaccgccagcagctacttcaccaacatgttcgccacctggagccccagcaaggccagactgcacctgcagggcagaagcaacgcctggagaccccaggtgaacaaccccaaggagtggctgcaggtggacttccagaagaccatgaaggtgaccggcgtgaccacccagggcgtgaagagcctgctgaccagcatgtacgtgaaggagttcctgatcagcagcagccaggacggccaccagtggaccctgttcttccagaacggcaaggtgaaggtgttccagggcaaccaggacagcttcacccccgtggtgaacagcctggacccccccctgctgaccagatacctgagaatccacccccagagctgggtgcaccagatcgccctgagaatggaggtgctgggctgcgaggcccaggacctgtactag

SEQ ID NO: 202217 - DNA, 651 bp, Artificial Sequence
  derived and/or modified sequence
atgcggatccaggatcccggcaaggtcttcttcgggaacgtggatagttctgggatcaagcacaatatatttaacccacctataatcgcccgatatatcagactgcaccccacccactactctatccgctcaacactccgcatggaactgatggggtgtgacctaaactcctgctcgatgcccttagggatggaaagtaaagccatttctgatgcacaaattaccgcgtccagctacttcactaacatgtttgcaacgtggagtccatccaaggctcggttgcacctgcagggcagatcaaacgcttggaggcctcaggtgaacaatccaaaagagtggttacaggtggactttcagaagactatgaaggtgactggcgtgactacacaaggtgtgaaatctctgctcacatcaatgtatgtgaaggagtttctcatcagctcctctcaggatgggcaccagtggacactcttctttcagaacggtaaggtgaaggtcttccaggggaatcaggatagctttaccccggtagtcaattccctggatcccccgctcttgactcgttatttgagaatccaccctcagagctgggtccaccagatcgccctgagaatggaagtgctgggatgcgaggcccaggatctttactag

SEQ ID NO: 202218 - DNA, 2620 bp, Artificial Sequence
  derived and/or modified sequence
ggggcgacgtgccctgcgtccccctcggcgggctgccgccgtgcccgcgccggctccccagcccgagcctgccccttgccctgatgaggtgcaaagagcgggatcggaggcggggcctggccgggctgtgagcggcgtatgcaaatcgagggtctcggggatgcggatccaagaccctgggaaggtcttctttggcaatgtggattcatctgggataaaacacaatatttttaaccctccaattattgctcgatacatccgtttgcacccaactcattatagcattcgcagcactcttcgcatggagttgatgggctgtgatttaaatagttgcagcatgccattgggaatggagagtaaagcaatatcagatgcacagattactgcttcatcctactttaccaatatgtttgccacctggtctccttcaaaagctcgacttcacctccaagggaggagtaatgcctggagacctcaggtgaataatccaaaagagtggctgcaagtggacttccagaagacaatgaaagtcacaggagtaactactcagggagtaaaatctctgcttaccagcatgtatgtgaaggagttcctcatctccagcagtcaagatggccatcagtggactctcttttttcagaatggcaaagtaaaggtttttcagggaaatcaagactccttcacacctgtggtgaactctctagacccaccgttactgactcgctaccttcgaattcacccccagagttgggtgcaccagattgccctgaggatggaggttctgggctgcgaggcacaggacctctactgagggtggccactgcagcacctgccactgccgtcacctctccctcctcagctccagggcagtgtccctccctggcttgccttctacctttgtgctaaatcctagcagacactgccttgaagcctcctgaattaactatcatcagtcctgcatttctttggtggggggccaggagggtgcatccaatttaacttaactcttacctattttctgcagctgctcccagattactccttccttccaatataactaggcaaaaagaagtgaggagaaacctgcatgaaagcattcttccctgaaaagttaggcctctcagagtcaccacttcctctgttgtagaaaaactatgtgatgaaactttgaaaaagatatttatgatgttaacatttcaggttaagcctcatacgtttaaaataaaactctcagttgtttattatcctgatcaagcatggaacaaagcatgtttcaggatcagatcaatacaatcttggagtcaaaaggcaaatcatttggacaatctgcaaaatggagagaatacaataactactacagtaaagtctgtttctgcttccttacacatagatataattatgttatttagtcattatgaggggcacattcttatctccaaaactagcattcttaaactgagaattatagatggggttcaagaatccctaagtcccctgaaattatataaggcattctgtataaatgcaaatgtgcatttttctgacgagtgtccatagatataaagccatttggtcttaattctgaccaataaaaaaataagtcaggaggatgcaattgttgaaagctttgaaataaaataacaatgtcttcttgaaatttgtgatggccaagaaagaaaatgatgatgacattaggcttctaaaggacatacatttaatatttctgtggaaatatgaggaaaatccatggttatctgagataggagatacaaactttgtaattctaataatgcactcagtttactctctccctctactaatttcctgctgaaaataacacaacaaaaatgtaacaggggaaattatataccgtgactgaaaactagagtcctacttacatagttgaaatatcaaggaggtcagaagaaaattggactggtgaaaacagaaaaaacactccagtctgccatatcaccacacaataggatcccccttcttgccctccacccccataagattgtgaagggtttactgctccttccatctgcctgaccccttcactatgactacacagaatctcctgatagtaaagggggctggagacaaggataagttatagagcagttggaggaagcatccaaagattgcaacccagggcaaatggaaaacaggagatcctaatatgaaagaaaaatggatcccaatctgagaaaaggcaaaagaatggctacttttttctatgctggagtattttctaataatcctgcttgacccttatctgacctctttggaaactataacatagctgtcacagtatagtcacaatccacaaatgatgcaggtgcaaatggtttatagccctgtgaagttcttaaagtttagaggctaacttacagaaatgaataagttgttttgttttatagcccggtagaggagttaaccccaaaggtgatatggttttatttcctgttatgtttaacttgataatcttattttggcattcttttcccattgactatatacatctctatttctcaaatgttcatggaactagctcttttattttcctgctggtttcttcagtaatgagttaaataaaacattgacacatacaaacaaa

SEQ ID NO: 202219 - DNA, 651 bp, Artificial Sequence
  derived and/or modified sequence
atgaggatccaggaccccgggaaggtgttctttggaaatgtggacagcagcggcatcaagcacaacatcttcaacccccccatcatcgcccgctacatccggctgcaccccacccactacagcatccgcagcaccctgaggatggagctgatgggctgtgacctgaacagctgcagcatgcccctgggcatggagagcaaggccatcagtgatgcccagatcacagccagcagctacttcaccaacatgtttgccacctggagccccagcaaggcccggctgcacctgcagggccgcagcaatgcctggaggccccaggtgaacaaccccaaggagtggctgcaggtggacttccagaagaccatgaaggtgactggagtgaccacccagggcgtgaagagcctgctgacctccatgtatgtgaaggagttcctgatcagcagcagccaggacggccaccagtggaccctcttcttccagaatggcaaggtgaaggtgttccagggcaaccaggacagcttcacccctgtggtgaacagcctggacccccccctgctgacccgctacctgcgcatccacccccagagctgggtgcaccagatcgccctgaggatggaggtgctgggctgtgaggcccaggacctgtactag

SEQ ID NO: 202220 - DNA, 651 bp, Artificial Sequence
  derived and/or modified sequence
atgcggatccaggaccccggcaaggtgttcttcggcaacgtggactcatctggcataaaacacaatattttcaatccccctattatagcgcggtacatccgcttgcatcctacacattactctattaggagcaccctacggatggaactcatggggtgcgatctcaactcctgctccatgccactgggcatggagagcaaggctattagtgacgcacagatcactgcctctagttactttacaaacatgtttgctacctggagcccgagcaaagcacgcctgcacctgcaggggaggagcaacgcatggcgtcctcaagtgaacaatcctaaagagtggcttcaagtggatttccagaagacaatgaaggtgactggcgttaccacccagggggtgaagtccctcttgaccagtatgtatgttaaggagttccttatttccagctcacaagatgggcaccaatggaccctcttcttccagaacggtaaagtgaaagtgtttcaggggaatcaagactcttttacgcctgtggttaacagcttggatccccctcttctcactagatatctgaggattcacccccagtcgtgggtccaccaaattgctcttcggatggaagtcttgggctgcgaggcgcaggatctttattag

SEQ ID NO: 202221 - DNA, 651 bp, Artificial Sequence
  derived and/or modified sequence
atgagaatccaggatcccggaaaagtgtttttcggcaacgtcgattccagcggtataaaacacaacattttcaaccctcccatcattgccagatatatccgcctgcacccaacacactactcgattcggagcacacttaggatggagcttatgggctgtgatttgaacagctgttcgatgcctctggggatggaaagcaaagctattagtgacgcgcagatcacagccagcagctacttcactaatatgtttgccacatggtctccatccaaagcaagactgcacctccagggcagaagcaacgcctggagaccacaggtcaacaatccaaaagagtggctgcaggtagattttcaaaaaactatgaaggtcactggcgtcacgactcaaggggtaaagagtcttctgacaagtatgtacgtgaaggagttcttgatcagtagctcccaggatggtcatcagtggaccctctttttccaaaacggcaaagtgaaggtgtttcagggcaatcaagacagcttcacacccgtagtcaacagtctggatcccccactgttaacccgctaccttcgcatccacccacagtcctgggtccatcagatagccctgcggatggaagttcttggctgcgaagcccaggacttgtattag

SEQ ID NO: 202222 - DNA, 651 bp, Artificial Sequence
  derived and/or modified sequence
atgcggatccaggatcccggtaaagttttttttggtaatgtagattcaagcggcatcaaacacaatatctttaaccctccaatcatcgccagatatattcgccttcaccccactcactattcaattagatcgaccctccgcatggaactcatgggatgtgaccttaactcctgttcgatgcctctcggaatggagtccaaagcgatctcggatgcccagattactgccagctcctactttaccaacatgtttgctacatggtcgccgagtaaggccagactccacctgcagggccgcagtaacgcctggcgacctcaagtcaacaaccccaaagaatggctccaggtagacttccagaaaaccatgaaagtgactggtgtgacgacacagggagtaaagtccttacttacaagtatgtatgtgaaggagttcctgatcagcagtagtcaggatggacaccagtggacacttttctttcaaaacggaaaggtgaaagtatttcaagggaaccaagacagctttactcctgttgtgaactctctggacccaccacttttaacgcgataccttagaattcatcctcagtcctgggtccaccaaatcgcccttagaatggaagtgttaggttgtgaagcacaagatctttactag

SEQ ID NO: 202223 - DNA, 651 bp, Artificial Sequence
  derived and/or modified sequence
atgaggatccaggacccgggcaaagtcttttttggcaacgtggatagctcaggaattaaacacaacatattcaacccacctattattgcacgctatattcgtctccaccctacacactatagcataagatcaacattacgaatggaacttatgggatgcgacctaaattcatgttccatgcccttaggaatggaatccaaagccatatctgatgcccagattaccgccagctcttacttcacaaatatgtttgcaacctggtccccctccaaagcccgtttgcatctgcagggccggagcaacgcttggcgccctcaggtgaataatcctaaagagtggttgcaggtggacttccaaaaaaccatgaaagtcactggcgttacaacccaaggcgttaaatcactgctgaccagtatgtatgtgaaggaattcttgattagttcaagccaggacggccatcagtggaccctttttttccagaacggcaaagtaaaggttttccagggcaaccaggactctttcactccagtggtcaactcacttgatcctcctctcttaaccagatatttacgaatccacccacaaagctgggtccaccagatcgcccttagaatggaagtgttaggttgtgaagcacaagatctttactag

SEQ ID NO: 202224 - RNA, 651 nt, Artificial Sequence
  derived and/or modified sequence
augcggauccaggaucccgguaaaguuuuuuuugguaauguagauucaagcggcaucaaacacaauaucuuuaacccuccaaucaucgccagauauauucgccuucaccccacucacuauucaauuagaucgacccuccgcauggaacucaugggaugugaccuuaacuccuguucgaugccucucggaauggaguccaaagcgaucucggaugcccagauuacugccagcuccuacuuuaccaacauguuugcuacauggucgccgaguaaggccagacuccaccugcagggccgcaguaacgccuggcgaccucaagucaacaaccccaaagaauggcuccagguagacuuccagaaaaccaugaaagugacuggugugacgacacagggaguaaaguccuuacuuacaaguauguaugugaaggaguuccugaucagcaguagucaggauggacaccaguggacacuuuucuuucaaaacggaaaggugaaaguauuucaagggaaccaagacagcuuuacuccuguugugaacucucuggacccaccacuuuuaacgcgauaccuuagaauucauccucaguccuggguccaccaaaucgcccuuagaauggaaguguuagguugugaagcacaagaucuuuacuag

SEQ ID NO: 202225 - RNA, 651 nt, Artificial Sequence
  derived and/or modified sequence
augaggauccaggacccgggcaaagucuuuuuuggcaacguggauagcucaggaauuaaacacaacauauucaacccaccuauuauugcacgcuauauucgucuccacccuacacacuauagcauaagaucaacauuacgaauggaacuuaugggaugcgaccuaaauucauguuccaugcccuuaggaauggaauccaaagccauaucugaugcccagauuaccgccagcucuuacuucacaaauauguuugcaaccuggucccccuccaaagcccguuugcaucugcagggccggagcaacgcuuggcgcccucaggugaauaauccuaaagagugguugcagguggacuuccaaaaaaccaugaaagucacuggcguuacaacccaaggcguuaaaucacugcugaccaguauguaugugaaggaauucuugauuaguucaagccaggacggccaucaguggacccuuuuuuuccagaacggcaaaguaaagguuuuccagggcaaccaggacucuuucacuccaguggucaacucacuugauccuccucucuuaaccagauauuuacgaauccacccacaaagcuggguccaccagaucgcccuuagaauggaaguguuagguugugaagcacaagaucuuuacuag

SEQ ID NO: 202226 - protein, 483 aa, Artificial Sequence
  derived and/or modified sequence
MSGGGPSGGGPGGSGRARTSSFAEPGGGGGGGGGGPGGSASGPGGTGGGKASVGAMGGGVGASSSGGGPGGSGGGGSGGPGAGTSFPPPGVKLGRDSGKVTTVVATLGQGPERSQEVAYTDIKVIGNGSFGVVYQARLAETRELVAIKKVLQDKRFKNRELQIMRKLDHCNIVRLRYFFYSSGEKKDELYLNLVLEYVPETVYRVARHFTKAKLTIPILYVKVYMYQLFRSLAYIHSQGVCHRDIKPQNLLVDPDTAVLKLCDFGSAKQLVRGEPNVSYICSRYYRAPELIFGATDYTSSIDVWSAGCVLAELLLGQPIFPGDSGVDQLVEIIKVLGTPTREQIREMNPNYTEFKFPQIKAHPWTKVFKSRTPPEAIALCSSLLEYTPSSRLSPLEACAHSFFDELRCLGTQLPNNRPLPPLFNFSAGELSIQPSLNAILIPPHLRSPAGTTTLTPSSQALTETPTSSDWQSTDATPTLTNSS

SEQ ID NO: 202227 - protein, 428 aa, Artificial Sequence [sequence omitted]

SEQ ID NO: 202228 - DNA, 1452 bp, Artificial Sequence
  derived and/or modified sequence
atgagcggcggcggccccagcggcggcggccccggcggcagcggcagagccagaaccagcagcttcgccgagcccggcggcggcggcggcggcggcggcggcggccccggcggcagcgccagcggccccggcggcaccggcggcggcaaggccagcgtgggcgccatgggcggcggcgtgggcgccagcagcagcggcggcggccccggcggcagcggcggcggcggcagcggcggccccggcgccggcaccagcttccccccccccggcgtgaagctgggcagagacagcggcaaggtgaccaccgtggtggccaccctgggccagggccccgagagaagccaggaggtggcctacaccgacatcaaggtgatcggcaacggcagcttcggcgtggtgtaccaggccagactggccgagaccagagagctggtggccatcaagaaggtgctgcaggacaagagattcaagaacagagagctgcagatcatgagaaagctggaccactgcaacatcgtgagactgagatacttcttctacagcagcggcgagaagaaggacgagctgtacctgaacctggtgctggagtacgtgcccgagaccgtgtacagagtggccagacacttcaccaaggccaagctgaccatccccatcctgtacgtgaaggtgtacatgtaccagctgttcagaagcctggcctacatccacagccagggcgtgtgccacagagacatcaagccccagaacctgctggtggaccccgacaccgccgtgctgaagctgtgcgacttcggcagcgccaagcagctggtgagaggcgagcccaacgtgagctacatctgcagcagatactacagagcccccgagctgatcttcggcgccaccgactacaccagcagcatcgacgtgtggagcgccggctgcgtgctggccgagctgctgctgggccagcccatcttccccggcgacagcggcgtggaccagctggtggagatcatcaaggtgctgggcacccccaccagagagcagatcagagagatgaaccccaactacaccgagttcaagttcccccagatcaaggcccacccctggaccaaggtgttcaagagcagaaccccccccgaggccatcgccctgtgcagcagcctgctggagtacacccccagcagcagactgagccccctggaggcctgcgcccacagcttcttcgacgagctgagatgcctgggcacccagctgcccaacaacagacccctgccccccctgttcaacttcagcgccggcgagctgagcatccagcccagcctgaacgccatcctgatccccccccacctgagaagccccgccggcaccaccaccctgacccccagcagccaggccctgaccgagacccccaccagcagcgactggcagagcaccgacgccacccccaccctgaccaacagcagctag

SEQ ID NO: 202229 - DNA, 1287 bp, Artificial Sequence
  derived and/or modified sequence
atgggcggcggcgtgggcgccagcagcagcggcggcggccccggcggcagcggcggcggcggcagcggcggccccggcgccggcaccagcttccccccccccggcgtgaagctgggcagagacagcggcaaggtgaccaccgtggtggccaccctgggccagggccccgagagaagccaggaggtggcctacaccgacatcaaggtgatcggcaacggcagcttcggcgtggtgtaccaggccagactggccgagaccagagagctggtggccatcaagaaggtgctgcaggacaagagattcaagaacagagagctgcagatcatgagaaagctggaccactgcaacatcgtgagactgagatacttcttctacagcagcggcgagaagaaggacgagctgtacctgaacctggtgctggagtacgtgcccgagaccgtgtacagagtggccagacacttcaccaaggccaagctgaccatccccatcctgtacgtgaaggtgtacatgtaccagctgttcagaagcctggcctacatccacagccagggcgtgtgccacagagacatcaagccccagaacctgctggtggaccccgacaccgccgtgctgaagctgtgcgacttcggcagcgccaagcagctggtgagaggcgagcccaacgtgagctacatctgcagcagatactacagagcccccgagctgatcttcggcgccaccgactacaccagcagcatcgacgtgtggagcgccggctgcgtgctggccgagctgctgctgggccagcccatcttccccggcgacagcggcgtggaccagctggtggagatcatcaaggtgctgggcacccccaccagagagcagatcagagagatgaaccccaactacaccgagttcaagttcccccagatcaaggcccacccctggaccaaggtgttcaagagcagaaccccccccgaggccatcgccctgtgcagcagcctgctggagtacacccccagcagcagactgagccccctggaggcctgcgcccacagcttcttcgacgagctgagatgcctgggcacccagctgcccaacaacagacccctgccccccctgttcaacttcagcgccggcgagctgagcatccagcccagcctgaacgccatcctgatccccccccacctgagaagccccgccggcaccaccaccctgacccccagcagccaggccctgaccgagacccccaccagcagcgactggcagagcaccgacgccacccccaccctgaccaacagcagctag

SEQ ID NO: 202230 - DNA, 1452 bp, Artificial Sequence
  derived and/or modified sequence
atgtccggcggaggtcccagcggcggcggcccgggaggctccggacgggcaagaaccagtagttttgccgagcctggtgggggaggaggtggagggggaggaggccctgggggcagcgccagcggccccggaggcacagggggcgggaaagcctctgtaggcgctatgggaggaggagtaggggcatccagtagcggtggcggtcctggtggctccggcggtggtggctccggcggtcccggggccggtacatcctttcctccccctggtgtgaagctcggcagggactccggtaaagtcaccacggtggtggcgactctaggacagggcccagagcgatctcaggaggtggcctacactgacatcaaagtgataggcaacgggtctttcggtgtagtgtatcaggcgagattagctgagacgcgggagctcgtcgcaatcaaaaaggtgctgcaagacaaacggtttaaaaatagagaactccagattatgaggaagctggatcattgcaacatcgtacgcttgaggtactttttctatagcagtggcgagaaaaaggatgaactctatctaaacctcgtgttggaatacgtccccgaaacagtttaccgagtggcacgtcatttcacgaaagccaagttaactatacccattctctatgtgaaggtttacatgtaccagctattccgaagcctagcctacatccacagccagggagtgtgtcatagagacatcaaaccccagaatctactggtcgatcccgacaccgcagttctgaagctttgcgacttcggatctgcaaagcagctggtccggggagaaccaaatgtaagttatatttgcagccgttactacagagcacccgaactaatctttggggcgaccgactatacttctagtatcgatgtgtggtcggccggatgcgtgctggcggaactgttgctggggcagcctatctttccgggcgatagcggggtcgaccagctcgtcgaaattatcaaagtactgggaacacctacgagagaacagatcagggagatgaatcctaactacactgagtttaagtttcctcagatcaaagctcatccctggactaaagtcttcaagtcccgaaccccacctgaagccattgccttatgttcctccctgctggaatatacgccgtcaagcaggttgagccctttggaggcttgcgcccattccttctttgatgagttgcgctgtctgggaacgcagctccccaataacaggcccctgccacctctgttcaatttcagtgctggagaactgtccatccaacctagcctaaatgccatactcattccccctcacttgcgctcccctgccggcaccaccacactcaccccaagttcacaagccctcacagagacacccacaagcagcgattggcaatctaccgatgcaacacctactctaactaacagttcctag

SEQ ID NO: 202231 - DNA, 1287 bp, Artificial Sequence
  derived and/or modified sequence
atgggtgggggggttggtgcctcaagtagtggcgggggaccaggggggagcggaggtggaggaagcggcggaccaggcgccggtacctctttccctccgcctggtgtcaaactggggcgcgatagtggaaaggttacaacagttgtcgccactctcgggcagggcccagaacgctcccaggaggtcgcctacactgatattaaggtcatcggaaacgggagctttggcgttgtgtaccaggcgcgcctggccgaaacccgcgaattggtagccattaagaaagtgctgcaggataagcgtttcaagaaccgagagctgcagatcatgcgcaaactcgaccactgtaacattgtgcgcctccggtacttcttttactcttcaggtgaaaaaaaggatgagctttacctgaatcttgtccttgaatatgtacctgaaactgtctaccgagtggcgaggcatttcactaaggctaaactcactattcccatcttgtatgtcaaggtctatatgtaccagctgttcaggagcctggcgtatattcacagtcagggcgtctgccaccgcgacatcaagccacagaacttactcgtagacccagacaccgccgtcctcaaactgtgtgattttggcagtgctaagcagctagtgagaggtgagcccaacgtttcgtatatatgttctcggtattaccgggctcctgaattgatttttggggccactgactacacaagttctattgatgtgtggtctgcgggttgcgtgctggccgaactcctgctaggtcagcccatcttccctggagactccggggtggaccagttggtggagattatcaaggtgttgggaactccaacccgggagcagattagggagatgaacccaaattacacagagttcaaattccctcagattaaggcacacccctggacgaaggtctttaaatctagaacaccgcctgaggctatagcactttgtagtagtctcctagagtataccccttcttcacgcttgtcccccctggaagcctgcgcccacagctttttcgacgagctcaggtgtttagggacacagctgcccaataatagaccattgcctccccttttcaacttcagtgccggagagttatcaatacagcctagtttgaacgccattctgatcccaccacacctccgatccccagccggcactaccacgctgacaccctcttcccaggcactgaccgagactcccacgtcatccgactggcaaagcacagatgctaccccaacactgaccaatagcagctag

SEQ ID NO: 202232 - DNA, 2188 bp, Artificial Sequence
  derived and/or modified sequence
gagccggagcccaagccagagcggcgcggcctggaagaggccagggcccgggggaggcggcggcagcggcggcggctggggcagcccgggcagcccgagccccgcagcctgggcctgtgctcggcgccatgagcggcggcgggccttcgggaggcggccctgggggctcgggcagggcgcggactagctcgttcgcggagcccggcggcggaggcggaggaggcggcggcggccccggaggctcggcctccggcccaggcggcaccggcggcggaaaggcatctgtcggggccatgggtgggggcgtcggggcctcgagctccgggggtggacccggcggcagcggcggaggaggcagcggaggccccggcgcaggcactagcttcccgccgcccggggtgaagctgggccgtgacagcgggaaggtgaccacagtcgtagccactctaggccaaggcccagagcgctcccaagaagtggcttacacggacatcaaagtgattggcaatggctcatttggggtcgtgtaccaggcacggctggcagagaccagggaactagtcgccatcaagaaggttctccaggacaagaggttcaagaaccgagagctgcagatcatgcgtaagctggaccactgcaatattgtgaggctgagatactttttctactccagtggcgagaagaaagacgagctttacctaaatctggtgctggaatatgtgcccgagacagtgtaccgggtggcccgccacttcaccaaggccaagttgaccatccctatcctctatgtcaaggtgtacatgtaccagctcttccgcagcttggcctacatccactcccagggcgtgtgtcaccgcgacatcaagccccagaacctgctggtggaccctgacactgctgtcctcaagctctgcgattttggcagtgcaaagcagttggtccgaggggagcccaatgtctcctacatctgttctcgctactaccgggccccagagctcatctttggagccactgattacacctcatccatcgatgtttggtcagctggctgtgtactggcagagctcctcttgggccagcccatcttccctggggacagtggggtggaccagctggtggagatcatcaaggtgctgggaacaccaacccgggaacaaatccgagagatgaaccccaactacacggagttcaagttccctcagattaaagctcacccctggacaaaggtgttcaaatctcgaacgccgccagaggccatcgcgctctgctctagcctgctggagtacaccccatcctcaaggctctccccactagaggcctgtgcgcacagcttctttgatgaactgcgatgtctgggaacccagctgcctaacaaccgcccacttccccctctcttcaacttcagtgctggtgaactctccatccaaccgtctctcaacgccattcttatccctcctcacttgaggtccccagcgggcactaccaccctcaccccgtcctcacaagctttaactgagactccgaccagctcagactggcagtcgaccgatgccacacctaccctcactaactcctcctgagggccccaccaagcacccttccacttccatctgggagccccaagaggggctgggaaggggggccatagcccatcaagctcctgccctggctgggcccctagactagagggcagaggtaaatgagtccctgtccccacctccagtccctccctcaccagcctcacccctgtggtgggctttttaagaggattttaactggttgtggggagggaagagaaggacagggtgttggggggatgaggacctcctacccccttggccccctcccctcccccagacctccacctcctccagaccccctcccctcctgtgtcccttgtaaatagaaccagcccagcccgtctcctcttcccttccctggcccccgggtgtaaatagattgttataatttttttcttaaagaaaacgtcgattcgcaccgtccaacctggccccgcccctcctacagctgtaactcccctcctgtcctctgcccccaaggtctactccctcctcaccccaccctggagggccaggggagtggagagagctcctgatgtcttagtttccacagtaaggtttgcctgtgtacagacctccgttcaataaattattggcatgaaaacctg

SEQ ID NO: 202233 - DNA, 1452 bp, Artificial Sequence
  derived and/or modified sequence
atgtctgggggcggccccagcggcggcggccctgggggcagcggccgggcccggaccagcagctttgctgagcccggcggcggcggcggcggcggcggcggcggccctgggggcagcgccagcggccctgggggcaccggcggcggcaaggcctctgtgggcgccatgggcggcggcgtgggcgccagcagcagcggcggcggccctgggggcagcggcggcggcggcagcggcggccctggggccggcaccagcttccccccacctggggtgaagctgggccgggacagcggcaaggtgaccaccgtggtggccaccctgggccagggccctgagaggagccaggaggtggcctacacagacatcaaggtgattggaaatggcagctttggagtggtgtaccaggcccggctggccgagacccgggagctggtggccatcaagaaggtgctgcaggacaagcgcttcaagaaccgggagctgcagatcatgaggaagctggaccactgcaacatcgtgcggctgcgctacttcttctacagcagcggggagaagaaggatgagctgtacctgaacctggtgctggagtatgtgcctgagaccgtgtacagagtggcccggcacttcaccaaggccaagctgaccatccccatcctgtatgtgaaggtgtacatgtaccagctgttccgcagcctggcctacatccacagccagggcgtgtgccaccgggacatcaagccccagaacctgctggtggaccctgacacagctgtgctgaagctgtgtgactttggcagcgccaagcagctggtgcggggggagcccaacgtgtcctacatctgcagccgctactaccgggcccctgagctgatctttggagccacagactacaccagcagcattgatgtgtggagcgctggctgtgtgctggccgagctgctgctgggccagcccatcttccctggggacagcggcgtggaccagctggtggagatcatcaaggtgctgggcacccccacccgggagcagatccgggagatgaaccccaactacacagagttcaagttcccccagatcaaggcccacccctggaccaaggtgttcaagagcaggaccccacctgaggccatcgccctgtgcagcagcctgctggagtacacccccagcagccggctgagccccctggaggcctgtgcccacagcttctttgatgagctgcgctgcctgggcacccagctgcccaacaaccggcccctgcccccactcttcaacttctctgctggggagctgagcatccagcccagcctgaatgccatcctgatccccccccacctgcggagccctgctggcaccaccaccctgacccccagcagccaggccctgacagagacccccaccagcagtgactggcagagcacagatgccacccccaccctgaccaacagcagctag

SEQ ID NO: 202234 - DNA, 1287 bp, Artificial Sequence
  derived and/or modified sequence
atgggcggcggcgtgggcgccagcagcagcggcggcggccctgggggcagcggcggcggcggcagcggcggccctggagctggcaccagcttccccccacctggggtgaagctgggccgggacagcggcaaggtgaccaccgtggtggccaccctgggccagggccctgagaggagccaggaggtggcctacacagacatcaaggtgattggaaatggcagctttggagtggtgtaccaggcccggctggccgagacccgggagctggtggccatcaagaaggtgctgcaggacaagcgcttcaagaaccgggagctgcagatcatgaggaagctggaccactgcaacatcgtgcggctgcgctacttcttctacagcagtggagagaagaaggatgagctgtacctgaacctggtgctggagtatgtgcctgagaccgtgtacagagtggcccggcacttcaccaaggccaagctgaccatccccatcctgtatgtgaaggtgtacatgtaccagctgttccgcagcctggcctacatccacagccagggcgtgtgccaccgggacatcaagccccagaacctgctggtggaccctgacacagctgtgctgaagctgtgtgactttggaagtgccaagcagctggtgcggggggagcccaacgtgtcctacatctgcagccgctactaccgggcccctgagctgatctttggagccacagactacaccagcagcattgatgtgtggagcgctggctgtgtgctggccgagctgctgctgggccagcccatcttccctggggacagcggcgtggaccagctggtggagatcatcaaggtgctgggcacccccacccgggagcagatccgggagatgaaccccaactacacagagttcaagttcccccagatcaaggcccacccctggaccaaggtgttcaagagcaggaccccacctgaggccatcgccctgtgcagcagcctgctggagtacacccccagcagccggctgagccccctggaggcctgtgcccacagcttctttgatgagctgcgctgcctgggcacccagctgcccaacaaccggcccctgcccccactcttcaacttctctgctggggagctgagcatccagcccagcctgaatgccatcctgatccccccccacctgcggagccctgctggcaccaccaccctgacccccagcagccaggccctgacagagacccccaccagcagtgactggcagagcacagatgccacccccaccctgaccaacagcagctag

SEQ ID NO: 202235 - DNA, 1452 bp, Artificial Sequence
  derived and/or modified sequence
atgagcggcggcggccccagcggcggcggccccggcggcagcggccgggcacggaccagttctttcgcagagccaggcggtgggggagggggaggtggcgggggccctgggggttctgcttcgggacctggagggactgggggtgggaaagcttctgtgggagctatgggcgggggcgtgggggcctcgagttccggtggtggccccggcggctctggcggtggaggatccggtggacccggagcgggtacgagctttcctccacctggtgttaaactgggccgagactcggggaaagtcacgaccgttgtggccactctcggccaaggaccagaacgtagccaggaagtggcatatacagacatcaaggtgatcgggaacggctcatttggagtcgtgtaccaagcaagactggctgaaacaagagaacttgttgcaattaaaaaagtgttgcaagataaacgatttaagaaccgcgagctgcagatcatgcgaaaactagatcattgcaacatcgtccggctccgatattttttttattcttccggagaaaaaaaagatgagctgtaccttaacttagtacttgagtacgtgccggaaactgtgtatcgagtggcgagacacttcactaaagccaaattgactattccaattttgtatgtgaaagtgtatatgtatcagctgttccgtagtctagcatacatccatagccagggagtgtgccatcgcgatatcaagccacagaacctgttagtcgatccagacactgctgtgttaaagctttgtgactttggaagcgcgaagcaactggtaaggggtgaacctaacgtttcctacatttgctccagatattatagggccccagaactgatttttggcgcaactgactacacatccagcatcgacgtgtggtccgcgggttgtgtgctggcagaattgctcctggggcagcctatctttcctggagactccggcgtggaccagctggttgaaatcattaaggtcttggggacacccacaagagaacagatccgggagatgaatcctaactataccgagttcaagtttcctcagatcaaggcacacccatggacgaaagtgtttaaatcccgcacccccccagaggcgatagccttgtgcagctcgcttcttgagtatacaccatcctctcgacttagcccgttggaggcttgcgcacattcttttttcgatgagttgcgatgccttgggacccaactgcccaacaatcgcccactcccgccactctttaatttcagtgcaggcgaactgagcatccaaccaagcttgaacgcaattctcatccccccgcacttacgctcaccagctgggacgactactctgactccctcatctcaagcccttaccgagacccccacaagttcagactggcagtcaaccgacgcaactcctactcttaccaattcctcctag

SEQ ID NO: 202236 - DNA, 1287 bp, Artificial Sequence
  derived and/or modified sequence
atgggcggcggcgtgggcgccagcagcagcggcggcggccccggcggcagcggtggtgggggtagcggagggccgggagctggaacctcttttccaccaccgggcgtgaaactgggccgggatagcgggaaggtcaccacagtagttgccacactgggccagggccccgagcggtcacaagaggtggcgtacacggacattaaggtcatcggcaacggatcattcggtgtggtttatcaggctaggctggcagagactagggagcttgtggccatcaagaaggtgctgcaagataagagattcaaaaatagggagttacagataatgagaaagctggatcactgcaacatcgttcggcttcggtacttcttctattccagtggcgagaagaaagatgagttgtacctcaacctggtgctggagtacgtgccagaaaccgtatatagggtggcaaggcattttacgaaggctaagctcacaatccccatactgtacgttaaagtgtacatgtaccagctctttaggtccctcgcttacatccactcccagggcgtttgccatcgagacatcaaaccccagaatttactagtagatcctgataccgcagtactcaagctctgcgattttggtagtgccaaacagctggttagaggagaacctaatgtttcctacatttgcagccgctactaccgagcccccgagctgattttcggagccacagactatacctcttccatcgacgtgtggagcgcgggatgtgttttggctgagttgcttttgggccagcccatttttcccggggactctggggtggaccagctcgtggagatcattaaggttctgggtacgcccaccagggaacagattcgagaaatgaatcctaattacactgaattcaaatttccccaaatcaaggcacacccgtggactaaagtgttcaagtcacggacaccaccggaggctatcgccttgtgctcctctttgctggagtacacacccagcagcaggttatctcctctggaagcttgtgcccactccttttttgatgaattacgttgtttaggaacacagctccctaataaccgaccactgccacctttgtttaatttttctgccggcgagctctcaattcagccaagtctgaatgcgatcctgatacctccccatttacgtagcccggcagggaccacaactcttaccccgtcctctcaagcgctgaccgaaactccaacctcatctgattggcagagtactgacgccacaccaacactaaccaactcctcctag

SEQ ID NO: 202237 - DNA, 1452 bp, Artificial Sequence
  derived and/or modified sequence
atgtctggcggaggcccttccggcggaggccctggaggttcaggcagggcaaggacctccagtttcgcagagcccggtgggggaggcggtggaggcggaggcggtccaggcggatccgcctctggcccaggcggaacaggaggtgggaaggccagcgttggggctatggggggaggcgtcggagcaagctcttccgggggaggtcctgggggtagtggtgggggtggaagcgggggaccaggcgctgggacgtccttccctcccccaggcgtcaagttaggcagagactcaggcaaagtgaccaccgttgttgcaaccttgggtcagggacctgaacgatcacaggaggtggcatacacagatataaaggtgatcgggaacggatctttcggggtggtgtaccaggccagactggctgaaaccagagagctagtggcaatcaagaaggttctccaggacaaaaggtttaagaatcgcgaactgcagattatgcggaagctggatcactgtaatatcgtcagactacgctacttcttttactcctccggtgaaaagaaagacgagctctatctgaaccttgtgctggaatacgtgcccgagaccgtttaccgggtggctcgtcatttcaccaaggctaagctcactatacccatcctgtacgttaaggtgtacatgtaccagctttttagaagtctagcctacattcacagccagggcgtctgccacagagacatcaagccgcagaacctcctggtggacccagacaccgctgtgctaaaactgtgtgacttcggcagcgccaaacaactcgttcgcggtgagcccaatgtgtcctacatatgtagtcgttactaccgggctcctgaactgatcttcggagccaccgactacacctcaagcatcgacgtgtggagtgcgggatgcgtgctggcggagcttctactgggtcagcccatcttcccaggggattctggcgtggatcagctggtcgagataatcaaggtgctaggaacccctactagggagcagattcgcgagatgaacccaaactacacagagtttaagtttccgcagataaaagctcatccttggactaaggtgtttaagagcaggacccccccagaagctatcgccttgtgttcctcgctcctggagtacactcctagtagccggctgagtcccttggaggcttgtgcgcactctttttttgacgagctacgatgtctgggaacacaattgccgaataatcgccctctgcccccactgttcaatttctcagctggcgagctctctattcagccaagtctgaatgctattctcattccccctcatcttagatcaccagctggtactacaacactcacaccatcctcccaggctctaacagaaacccccaccagcagcgattggcagagtactgacgcaacaccaacactcaccaacagctcatag

SEQ ID NO: 202238 - DNA, 1287 bp, Artificial Sequence
  derived and/or modified sequence
atgggcggaggcgttggggcttccagctcagggggtggcccaggcggtagcggcggtggcggaagtggtgggcctggagcaggaacctccttcccaccacccggagtaaaattgggccgtgattcaggcaaagtcacgaccgtcgtggcaacccttggccagggcccagagcgatcccaggaggtggcctacaccgatatcaaagtcatcgggaacggctcttttggcgtcgtgtatcaggctaggttagccgagacccgggagctcgtggcgatcaagaaggtattacaggacaagcggttcaaaaacagagagctgcagatcatgaggaagctcgaccactgtaacatcgtgcgcctgagatattttttttatagcagcggagaaaagaaggatgaactgtacctcaatctggtgctggaatatgtgcctgagaccgtgtacagggtagctcgacactttaccaaagctaaacttactattccaattctgtatgtgaaagtgtacatgtatcagttattcagaagcctcgcttatatccacagtcagggagtgtgtcaccgcgatattaaacctcagaaccttctggtcgacccggacaccgcagtgctgaaactttgcgacttcgggtcagctaagcaactggtgaggggcgagcccaatgtcagctatatttgctctaggtactacagggccccagagctaatttttggagccaccgattacacttctagcatagacgtgtggtctgcaggatgcgtgctcgctgagctgctgttgggacaacccatctttcccggtgacagtggagtggaccaactcgtggagataatcaaagtgttagggactccaacaagagagcagatccgtgaaatgaaccccaactataccgaattcaagttcccgcagattaaggcccatccctggaccaaggtatttaaaagcagaacccccccagaggctatcgccttgtgctccagtctgctggagtacacccctagtagtcgcctgtcaccgctagaggcctgtgcacacagcttcttcgacgagctgcggtgcctcgggacccaactacctaataatcgcccattacccccactgttcaacttctcagccggtgaactgagtattcagccatccctcaacgcgatcctgattcccccacacctcagaagtccagcaggaacaactactttgacaccgagctctcaggcactgaccgaaactccaacctctagtgactggcagtctacagacgccactcctaccttgacaaattcttcctag

SEQ ID NO: 202239 - DNA, 1897 bp, Artificial Sequence
  derived and/or modified sequence
tcccggcgtgccccgcggcgggcgctgggccggagccggagcccaagccagagcggcgcggcctggaagaggccagggcccgggggaggcggcggcagcggcggcggctggggcagcccgggcagcccgagccccgcagcctgggcctgtgctcggcgccatgagcggcggcgggccttcgggaggcggccctgggggctcgggcagggcgcggactagctcgttcgcggagcccggcggcggaggcggaggaggcggcggcggccccggaggctcggcctccggcccaggcggcaccggcggcggaaaggcatctgtcggggccatgggtgggggcgtcggggcctcgagctccgggggtggacccggcggcagcggcggaggaggcagcggaggccccggcgcaggcactagcttcccgccgcccggggtgaagctgggccgtgacagcgggaaggtgaccacagtcgtagccactctaggccaaggcccagagcgctcccaagaagtggcttacacggacatcaaagtgattggcaatggctcatttggggtcgtgtaccaggcacggctggcagagaccagggaactagtcgccatcaagaaggttctccaggacaagaggttcaagaaccgagagctgcagatcatgcgtaagctggaccactgcaatattgtgaggctgagatactttttctactccagtggcgagaagaaagacgagctttacctaaatctggtgctggaatatgtgcccgagacagtgtaccgggtggcccgccacttcaccaaggccaagttgaccatccctatcctctatgtcaaggtgtacatgtaccagctcttccgcagcttggcctacatccactcccagggcgtgtgtcaccgcgacatcaagccccagaacctgctggtggaccctgacactgctgtcctcaagctctgcgattttggcagtgcaaagcagttggtccgaggggagcccaatgtctcctacatctgttctcgctactaccgggccccagagctcatctttggagccactgattacacctcatccatcgatgtttggtcagctggctgtgtactggcagagctcctcttgggccagcccatcttccctggggacagtggggtggaccagctggtggagatcatcaaggtgctgggaacaccaacccgggaacaaatccgagagatgaaccccaactacacggagttcaagttccctcagattaaagctcacccctggacaaaggtgttcaaatctcgaacgccgccagaggccatcgcgctctgctctagcctgctggagtacaccccatcctcaaggctctccccactagaggcctgtgcgcacagcttctttgatgaactgcgatgtctgggaacccagctgcctaacaaccgcccacttccccctctcttcaacttcagtgctggtgaactctccatccaaccgtctctcaacgccattcttatccctcctcacttgaggtccccagcgggcactaccaccctcaccccgtcctcacaagctttaactgagactccgaccagctcagactggcagtcgaccgatgccacacctaccctcactaactcctcctgagggccccaccaagcacccttccacttccatctgggagccccaagaggggctgggaaggggggccatagcccatcaagctcctgccctggctgggcccctagactagagggcagagaaaacgtcgattcgcaccgtccaacctggccccgcccctcctacagctgtaactcccctcctgtcctctgcccccaaggtctactccctcctcaccccaccctggagggccaggggagtggagagagctcctgatgtcttagtttccacagtaaggtttgcctgtgtaca

SEQ ID NO: 202240 - DNA, 2186 bp, Artificial Sequence
  derived and/or modified sequence
gggccggagccggagcccaagccagagcggcgcggcctggaagaggccagggcccgggggaggcggcggcagcggcggcggctggggcagcccgggcagcccgagccccgcagcctgggcctgtgctcggcgccatgagcggcggcgggccttcgggaggcggccctgggggctcgggcagggcgcggactagctcgttcgcggagcccggcggcggaggcggaggaggcggcggcggccccggaggctcggcctccggcccaggcggcaccggcggcggaaaggcatctgtcggggccatgggtgggggcgtcggggcctcgagctccgggggtggacccggcggcagcggcggaggaggcagcggaggccccggcgcaggcactagcttcccgccgcccggggtgaagctgggccgtgacagcgggaaggtgaccacagtcgtagccactctaggccaaggcccagagcgctcccaagaagtggcttacacggacatcaaagtgattggcaatggctcatttggggtcgtgtaccaggcacggctggcagagaccagggaactagtcgccatcaagaaggttctccaggacaagaggttcaagaaccgagagctgcagatcatgcgtaagctggaccactgcaatattgtgaggctgagatactttttctactccagtggcgagaagaaagacgagctttacctaaatctggtgctggaatatgtgcccgagacagtgtaccgggtggcccgccacttcaccaaggccaagttgaccatccctatcctctatgtcaaggtgtacatgtaccagctcttccgcagcttggcctacatccactcccagggcgtgtgtcaccgcgacatcaagccccagaacctgctggtggaccctgacactgctgtcctcaagctctgcgattttggcagtgcaaagcagttggtccgaggggagcccaatgtctcctacatctgttctcgctactaccgggccccagagctcatctttggagccactgattacacctcatccatcgatgtttggtcagctggctgtgtactggcagagctcctcttgggccagcccatcttccctggggacagtggggtggaccagctggtggagatcatcaaggtgctgggaacaccaacccgggaacaaatccgagagatgaaccccaactacacggagttcaagttccctcagattaaagctcacccctggacaaaggtgttcaaatctcgaacgccgccagaggccatcgcgctctgctctagcctgctggagtacaccccatcctcaaggctctccccactagaggcctgtgcgcacagcttctttgatgaactgcgatgtctgggaacccagctgcctaacaaccgcccacttccccctctcttcaacttcagtgctggtgaactctccatccaaccgtctctcaacgccattcttatccctcctcacttgaggtccccagcgggcactaccaccctcaccccgtcctcacaagctttaactgagactccgaccagctcagactggcagtcgaccgatgccacacctaccctcactaactcctcctgagggccccaccaagcacccttccacttccatctgggagccccaagaggggctgggaaggggggccatagcccatcaagctcctgccctggctgggcccctagactagagggcagaggtaaatgagtccctgtccccacctccagtccctccctcaccagcctcacccctgtggtgggctttttaagaggattttaactggttgtggggagggaagagaaggacagggtgttggggggatgaggacctcctacccccttggccccctcccctcccccagacctccacctcctccagaccccctcccctcctgtgtcccttgtaaatagaaccagcccagcccgtctcctcttcccttccctggcccccgggtgtaaatagattgttataatttttttcttaaagaaaacgtcgattcgcaccgtccaacctggccccgcccctcctacagctgtaactcccctcctgtcctctgcccccaaggtctactccctcctcaccccaccctggagggccaggggagtggagagagctcctgatgtcttagtttccacagtaaggtttgcctgtgtacagacctccgttcaataaattattggcatg

SEQ ID NO: 202241 - DNA, 1452 bp, Artificial Sequence
  derived and/or modified sequence
atgagcggcggagggccatccggcggagggcccggcggatccggtagggccagaaccagttccttcgctgaacctggtggtggtggtggtgggggcggcggtgggcccggagggtctgcctcagggccaggcggaacaggcggcggaaaggcatccgtaggggctatggggggaggcgtaggcgcctcatcgtcaggaggaggaccaggcgggtctgggggtggggggagcggcggccctggcgccggaaccagcttccctcctccgggggttaaactcgggcgggattctgggaaggtgacaaccgtagtggccaccttaggccaaggccccgaacgtagccaagaggtggcctacactgacatcaaagtgattggaaacgggtccttcggcgtcgtttaccaggcacgcttagccgagactagggagctggtggccatcaagaaggtcctgcaagacaagcgctttaaaaatagagagctacagatcatgcgaaaactggatcactgtaacatagtgagattgaggtactttttttacagctcaggagaaaagaaggacgagctgtacctaaacttggtgctggaatatgtacccgaaaccgtgtaccgcgtcgctcggcactttacaaaagctaagctgacgataccaattctctacgtgaaggtgtatatgtaccagctgtttaggtcattagcctacattcatagccagggcgtctgccaccgcgatataaagccccagaacctgttggtcgatccagacacggcagttttaaagctatgtgattttggctccgcgaagcaattagtgcgtggcgaacccaacgtgtcatatatttgctccaggtattacagagccccagaactcattttcggcgctacggattacaccagcagcatcgatgtgtggtccgccgggtgcgtgctggctgagttgctcctcggtcaacctattttccccggggatagcggcgttgatcagctcgtagaaatcattaaggtactgggcactcctacgagggagcaaatcagagagatgaacccaaactacaccgagtttaagtttcctcagattaaggcgcacccatggaccaaagtgttcaagagcagaacgcctcctgaggctattgccctgtgcagcagtctcctagagtatactcctagtagtcggctctccccactagaggcatgcgctcattcgttttttgacgagctgcggtgcttaggcactcagctgcccaacaacaggccgttgcccccactattcaacttttccgccggagaactgtctatccagcccagtttaaatgctattctgattcctcctcaccttaggtctcccgcaggcactaccacacttacaccatcttcacaggccctgaccgaaacgccaacctctagcgattggcaatcaactgatgccacacctacacttacaaattcgtcgtag

SEQ ID NO: 202242 - DNA, 1452 bp, Artificial Sequence
  derived and/or modified sequence
atgagcggcggcggccccagcggcggcggccccggcggcagcggccgagccagaacatcctctttcgccgagcccgggggcgggggcggcggagggggcggcgggcctggaggttctgcgtccggtcccggaggcaccggaggcggcaaagccagcgtgggggccatggggggaggcgtgggcgcctcctcctctgggggaggtcctggcggttctgggggcgggggcagtggcggccctggagccggaaccagtttcccaccgcctggcgtaaagctaggaagggacagtggcaaggtgactactgtagttgcgaccctaggccagggccccgagcggagtcaggaggtcgcctatacagacatcaaggtaataggtaacggatctttcggcgtcgtatatcaggcgcgactggcagagactcgggaattggtagctattaaaaaggtgttgcaggataagcgatttaagaaccgtgaacttcaaatcatgcggaaactggaccattgtaatatcgtccggttgaggtactttttttatagctccggggagaagaaggatgaactgtacttgaatttggtgttagaatacgtacctgagactgtctaccgagtggccaggcactttacgaaggctaagttaaccattcccattctgtacgtcaaagtctacatgtatcagttattccgatctctcgcatatattcatagtcagggggtgtgccacagagatattaaacctcagaacctgcttgtcgatcctgacacagcagtgctcaaactgtgcgatttcgggagcgcaaagcagctggtgcggggggaacctaacgtgtcctacatttgctccaggtattatagagctccggaactaatctttggcgcaactgactacacttcctccatcgacgtgtggtctgcgggctgcgtgctggccgagctcctactggggcagcccattttccccggtgatagtggggtggatcagttagttgaaattatcaaggtgctgggaacccccacaagagaacagattagggagatgaatccgaattatacagaattcaaattcccacagattaaggcccatccatggaccaaagtttttaagagccgtacaccaccagaagcgattgctctatgttcttcccttctcgagtacacacctagtagtaggttgtcacccctggaagcgtgtgcccacagcttctttgacgaattacggtgcttagggactcaattgccaaataatcgccctctgcctccactcttcaattttagtgcaggcgagctgtctattcaaccatcgctgaacgcgatcctgattccccctcaccttaggtctcccgcaggcaccacaactctgactccttcctctcaggcccttacagaaacccctacgtctagtgattggcagtctacagatgcaactcccacgctcacaaattccagctag

SEQ ID NO: 202243 - DNA, 1452 bp, Artificial Sequence
  derived and/or modified sequence
atgtccggcggagggccatcagggggaggtcctggcggttccggccgagctcgaacaagctctttcgcagagccagggggaggaggtggagggggaggtggaggacccggagggagtgccagtggcccaggcggtacaggcggaggaaaagctagcgtgggcgcaatgggaggcggtgtaggcgcatctagctccgggggaggacccggtgggtccggagggggaggcagcggaggacccggagctggaacatctttccctcccccaggcgttaaactcgggcgtgacagcggcaaggtgaccacagtggtggctacattgggccaaggaccagagaggagtcaggaggtggcttatactgacattaaagtgattggtaatggtagcttcggcgtggtctatcaggcccgactggccgaaacccgtgagttggttgcgataaaaaaggtcctccaggataaacgcttcaaaaatcgcgagcttcagattatgagaaagctggaccactgcaatattgtgaggctgcgctattttttctattcaagtggcgaaaagaaggacgaactttacctaaatctcgtgttggaatatgttcctgaaacagtctaccgggtcgctaggcattttaccaaggcaaaactgacaatccctatcctttatgtgaaagtctatatgtaccaactcttccggagcctcgcttatattcattcccagggggtgtgtcaccgcgatattaaacctcagaatcttctggtagatccagacaccgccgtgctaaaattgtgcgacttcggaagtgccaagcagcttgtgagaggcgagccaaacgtgtcatacatatgtagtcgctactaccgcgctccagaacttattttcggggctacggattatactagttccattgacgtgtggagtgccggttgcgtgctagcagagcttctcttgggacagcccatcttccccggagactcaggggtggatcagttagtagagattatcaaggtgttgggcaccccaaccagggagcagatcagagaaatgaatcctaactataccgagtttaaatttccacaaattaaggcacacccatggactaaggtattcaagtcccgaaccccacccgaggccatagcactctgttcatccctgttggagtacaccccctcgagtaggctgtcacccctggaggcgtgcgcccactctttttttgatgagctacgctgcctcgggacacaactgccgaataaccggcctctgccacccctgttcaacttctccgccggagagctcagcatccagccttcactgaacgcgattctcattcctcctcacctgagatcacccgctggtacaaccaccctgacccccagcagccaggccttaaccgagacccccacaagttccgattggcagtctaccgatgctactccgactctgaccaactcaagctag

SEQ ID NO: 202244 - protein, 512 aa, Artificial Sequence
  derived and/or modified sequence
MLFEGLDLVSALATLAACLVSVTLLLAVSQQLWQLRWAATRDKSCKLPIPKGSMGFPLIGETGHWLLQGSGFQSSRREKYGNVFKTHLLGRPLIRVTGAENVRKILMGEHHLVSTEWPRSTRMLLGPNTVSNSIGDIHRNKRKVFSKIFSHEALESYLPKIQLVIQDTLRAWSSHPEAINVYQEAQKLTFRMAIRVLLGFSIPEEDLGHLFEVYQQFVDNVFSLPVDLPFSGYRRGIQARQILQKGLEKAIREKLQCTQGKDYLDALDLLIESSKEHGKEMTMQELKDGTLELIFAAYATTASASTSLIMQLLKHPTVLEKLRDELRAHGILHSGGCPCEGTLRLDTLSGLRYLDCVIKEVMRLFTPISGGYRTVLQTFELDGFQIPKGWSVMYSIRDTHDTAPVFKDVNVFDPDRFSQARSEDKDGRFHYLPFGGGVRTCLGKHLAKLFLKVLAVELASTSRFELATRTFPRITLVPVLHPVDGLSVKFFGLDSNQNEILPETEAMLSATV

SEQ ID NO: 202245 - DNA, 1539 bp, Artificial Sequence
  derived and/or modified sequence
atgctgttcgagggcctggacctggtgagcgccctggccaccctggccgcctgcctggtgagcgtgaccctgctgctggccgtgagccagcagctgtggcagctgagatgggccgccaccagagacaagagctgcaagctgcccatccccaagggcagcatgggcttccccctgatcggcgagaccggccactggctgctgcagggcagcggcttccagagcagcagaagagagaagtacggcaacgtgttcaagacccacctgctgggcagacccctgatcagagtgaccggcgccgagaacgtgagaaagatcctgatgggcgagcaccacctggtgagcaccgagtggcccagaagcaccagaatgctgctgggccccaacaccgtgagcaacagcatcggcgacatccacagaaacaagagaaaggtgttcagcaagatcttcagccacgaggccctggagagctacctgcccaagatccagctggtgatccaggacaccctgagagcctggagcagccaccccgaggccatcaacgtgtaccaggaggcccagaagctgaccttcagaatggccatcagagtgctgctgggcttcagcatccccgaggaggacctgggccacctgttcgaggtgtaccagcagttcgtggacaacgtgttcagcctgcccgtggacctgcccttcagcggctacagaagaggcatccaggccagacagatcctgcagaagggcctggagaaggccatcagagagaagctgcagtgcacccagggcaaggactacctggacgccctggacctgctgatcgagagcagcaaggagcacggcaaggagatgaccatgcaggagctgaaggacggcaccctggagctgatcttcgccgcctacgccaccaccgccagcgccagcaccagcctgatcatgcagctgctgaagcaccccaccgtgctggagaagctgagagacgagctgagagcccacggcatcctgcacagcggcggctgcccctgcgagggcaccctgagactggacaccctgagcggcctgagatacctggactgcgtgatcaaggaggtgatgagactgttcacccccatcagcggcggctacagaaccgtgctgcagaccttcgagctggacggcttccagatccccaagggctggagcgtgatgtacagcatcagagacacccacgacaccgcccccgtgttcaaggacgtgaacgtgttcgaccccgacagattcagccaggccagaagcgaggacaaggacggcagattccactacctgcccttcggcggcggcgtgagaacctgcctgggcaagcacctggccaagctgttcctgaaggtgctggccgtggagctggccagcaccagcagattcgagctggccaccagaaccttccccagaatcaccctggtgcccgtgctgcaccccgtggacggcctgagcgtgaagttcttcggcctggacagcaaccagaacgagatcctgcccgagaccgaggccatgctgagcgccaccgtgtag

SEQ ID NO: 202246 - DNA, 4732 bp, Artificial Sequence
  derived and/or modified sequence
aggcaatttttttcctccctctctccgctcccctcgcagcctccactccctttcccttggccccttcctccttctctgtttcggctggaggtgccaggacccccggccgcagcctcccctcccccgccgctccggtcccctcccgtcgggccctcccctcccccgccgcggccggcacagccaatcccccgagcggccgccaacatgctctttgagggcttggatctggtgtcggcgctggccaccctcgccgcgtgcctggtgtccgtgacgctgctgctggccgtgtcgcagcagctgtggcagctgcgctgggccgccactcgcgacaagagctgcaagctgcccatccccaagggatccatgggcttcccgctcatcggagagaccggccactggctgctgcagggttctggcttccagtcgtcgcggagggagaagtatggcaacgtgttcaagacgcatttgttggggcggccgctgatacgcgtgaccggcgcggagaacgtgcgcaagatcctcatgggcgagcaccacctcgtgagcaccgagtggcctcgcagcacccgcatgttgctgggccccaacacggtgtccaattccattggcgacatccaccgcaacaagcgcaaggtcttctccaagatcttcagccacgaggccctggagagttacctgcccaagatccagctggtgatccaggacacactgcgcgcctggagcagccaccccgaggccatcaacgtgtaccaggaggcgcagaagctgaccttccgcatggccatccgggtgctgctgggcttcagcatccctgaggaggaccttgggcacctctttgaggtctaccagcagtttgtggacaatgtcttctccctgcctgtcgacctgcccttcagtggctaccggcggggcattcaggctcggcagatcctgcagaaggggctggagaaggccatccgggagaagctgcagtgcacacagggcaaggactacttggacgccctggacctcctcattgagagcagcaaggagcacgggaaggagatgaccatgcaggagctgaaggacgggaccctggagctgatctttgcggcctatgccaccacggccagcgccagcacctcactcatcatgcagctgctgaagcaccccactgtgctggagaagctgcgggatgagctgcgggctcatggcatcctgcacagtggcggctgcccctgcgagggcacactgcgcctggacacgctcagtgggctgcgctacctggactgcgtcatcaaggaggtcatgcgcctgttcacgcccatttccggcggctaccgcactgtgctgcagaccttcgagcttgatggtttccagatccccaaaggctggagtgtcatgtatagcatccgggacacccatgacacagcgcccgtgttcaaagacgtgaacgtgttcgaccccgatcgcttcagccaggcgcggagcgaggacaaggatggccgcttccattacctcccgttcggtggcggtgtccggacctgcctgggcaagcacctggccaagctgttcctgaaggtgctggcggtggagctggctagcaccagccgctttgagctggccacacggaccttcccccgcatcaccttggtccccgtcctgcaccccgtggatggcctcagcgtcaagttctttggcctggactccaaccagaacgagatcctgccggagacggaggccatgctgagcgccacagtctaacccaagacccacccgcctcagcccagcccaggcagcggggtggtggttgtgggaggtagaaacctgtgtgtgggagggggccggaacggggagggcgagtggcccccatacttgccctcccttgctccccctccctggcaaaccctacccaaagccagtgggccccattcctagggctgggctccccttctggctccagcttccctccagccactccccatttaccatcagctcagcccctgggaagggcgtggcaggggctctgcatgcccgtgacagtgttaggtgtcagcgcgtgctacagtgtttttgtgatgttctgaactgctcccttccctccgttcctttcggacccttttagctggggttgggggacgggaagagccgtgcccccttgggcgcactcttcagcgtctcctcctcctgcgcccccactgcgtctgcccaggaacagcatcctgggtagcagaacaggagtcaaccttggcggggcgggggctgcgtccaacctggagattgcccttccctatgccacggttcccaccctccctcaccagtttggacaatttgaaattacctattgctgctacttgttctgtcctctgaccttggggcaaaggagccccaggccctgtctccccagcatcctccctggtggccctgggcaggtgcactgacacccccaccttcccatcccctgctgaaccaggccctgttacacacagccgcctaaggcccgcggctcatgtgctgcccgcccccatatttattcactgatagagaatcttggggatgctggggtctggagtgaacatctcctccccttcatgccctagcctgtgttctagctgtcctggcgagacttctgtgagtgaagaggaaggggtctctggtcaaacccagcccccagggcctagggttgaaagccttccccggctccgggcattatttgggtttaatctcggagcctcactcctggactgaagtccggtgcctctgccttatccctggtggagatggaatgtggcccattgcctcctccctctcctgtcaaaaaccctgatcaggtagatttggaggcggccacgatttcctgtttggcccctgttcaccccagtgcactggccctgactccaggcgtgagtatggggaaggatacgggttcttctgacggggagcaagggcctccgtcttcccttccttaactctccccctttgccctccgccctgaaaaaggtgtccttgaagtcccttccacctctatgccactgtctgcttagcccagctcaggggtggggaagaggcgaaagcgtgggggaggtgagcgcagcggcagttctgcctcggagctgattgcagggccctgtgtggtctccggacagctgcgggaaggctgccgcagctgaagctgaagaggcggctacgtgcggtttgtcagggggattgggttgaaaactggccagtcgggatgactgggtgaaagaggagtagctcctgccactggcgttttgagtgttggcaatttgggatgcctcctggggaaggtttccgggcgtttggtgagtctctagatttttccttgctttctgtgtttattggtttttgatgttgtaaaagcaatgaatcccctttacaagaaaatcgaaaacacagaagaatgaaggacatgccagtccccgatcgctgctgtgagcacctcagtggctccctcagaccagatcccgtaggcagccccacagaccgaccctgaccccactcacagccaccctgaagatagactataggaacgggcccataccacacagactgctctccaatccctgagtctcagatgtttcatttatttcctacttttccactactaaaaaacagtgtggaatagacattattggcaaaattgctcatccctaatcctgaaaaacaggccagaatgggtaaagacttgtcaaagcttgcaacatagctacatggtgcacccggacctgtaccccctccccccaacacaaaaccagtgtctgggaggttcattttcctttaaactgatccagctggccctgaaccaattgtttttgactgagtatctaggagagcagtaagtggaacttcagacaagcccactgggtctggtccaggtgaggggcagggggcatggggctgggaggtctcaggggccttccctgggggtggccagcctggtagggggcagagaaggaaaagctgaggggggtccctgtgagggaggaaagaaggatcatttgccccgctgggtctcaaaggcagtgagaagagagctgaagaaagctctggctggctgacaggatccctgtgttgtaattggtccctcctttcagctctctagtgagatgcccgtgtctgtgcgtgtgcgtgtgtgtttcatacagctagcattagatgggtgatgtttcttacttatcatccctaactattgcaacttgaccttaaaaagacaaaaccccacaaaactcttcctgccacgggcttgcagattgaagcactttcgatgttgggcgctggcgtttgtgttctgggcaccaccgtgaccctgcccagatggctataatattattttatacacaaaccttttttttcataaatgttataattttgtgtctgtctttataaactattataagtactatttttgttataattcaaaatagatatttagtataaagtttttgctgttaaatatttgttatttagtaaaatatgaattttgctctattgtaaacatggttcaaaatattaatatgtttttatcacagtcgttttaatattgaaaaagcacttgtgtgttttgttttgatatgaaactggtaccgtgtgagtgtttttgctgtcgtggttttaatctgtatataatattccatgttgcatattaaaaacatgaatgttgtgcattttgtgattttggaaatactcaatgtggctcttctataggcttctagaataaaccgtggggacccgc

SEQ ID NO: 202247 - DNA, 1539 bp, Artificial Sequence
  derived and/or modified sequence
atgttgtttgaaggcctagatctagtgtctgcccttgccacccttgccgcgtgtctcgtgtctgtcacactgctcctcgccgtatcacagcagctgtggcagctgcgctgggccgctacacgcgataagtcgtgcaaactgcccattccaaaagggtccatggggttccccctcataggagagaccggccactggttgctccagggttccgggttccagagctcgaggcgggagaagtacggaaacgtgttcaagacccacctgctggggcgcccacttattcgggtcaccggtgcagaaaatgtccgtaagattctcatgggcgaacaccacctcgtctcaaccgagtggccccggagcacacggatgctgcttggacccaatactgtgagcaattcaattggcgatatccatcggaacaaaagaaaagtattctccaagatcttttcccatgaggccctggagtcatacctgcccaagattcagcttgtgatccaagatacattgagagcctggtcctcccatcccgaggcaatcaatgtataccaagaggcccagaaattaaccttccggatggcaattcgggtgcttttgggattttctattccggaggaggatctgggccatctgtttgaagtttaccagcagtttgtggataacgttttttctctccctgtagatctgcctttcagtggctacaggaggggcatccaggcccgccagattcttcagaagggtttggaaaaggccataagggaaaaactgcagtgcactcagggaaaagattatctggatgcattagatcttttgattgaatcttccaaagaacatgggaaagaaatgaccatgcaggagctgaaggacggaacgcttgagcttatatttgctgcctatgccacaacggccagcgcctccacctcactcattatgcagctcctcaagcatccaacagtcctcgagaaactgagagacgagctgagagcccatggcatcctccacagtggtggatgtccatgcgaaggaactctccgtctggataccctcagcggactgaggtaccttgactgcgtaattaaggaggtcatgcgtctgttcacacctattagcggagggtacagaaccgtgctgcagacctttgaacttgatgggttccagattccaaagggatggtcagtgatgtactccataagagacacacatgacaccgcaccagttttcaaagatgttaacgtctttgacccagacagattctcacaggctcggtctgaagacaaggatgggagatttcactatcttccgtttggtgggggggttaggacttgtctgggcaagcacctcgcaaaactttttcttaaggtactcgccgtggaactggcctccacctcccgctttgagctggccacccgcacatttccacggataacattagtaccagtactgcaccccgtggatggcctgtctgttaaattcttcggtcttgattccaatcaaaatgaaatcttgccggaaacagaagctatgctgagtgcgactgtttag
